United States Patent Application Publication US 2024/0066114 A1 - sequence listing, part 3

SEQ ID NO: 3382 - protein, 1147 aa, Artificial Sequence
  SARS-CoV-2/Belgium/BC-03016/2020__EPI_ISL_415157 spike protein (1-1147)(F970C_G999C)
MFVFLVLLPLVSSQCVNLTTRTQLPPAYTNSFTRGVYYPDKVFRSSVLHSTQDLFLPFFSNVTWFHAIHVSGTNGTKRFDNPVLPFNDGVYFASTEKSNIIRGWIFGTTLDSKTQSLLIVNNATNVVIKVCEFQFCNDPFLGVYYHKNNKSWMESEFRVYSSANNCTFEYVSQPFLMDLEGKQGNFKNLREFVFKNIDGYFKIYSKHTPINLVRDLPQGFSALEPLVDLPIGINITRFQTLLALHRSYLTPGDSSSGWTAGAAAYYVGYLQPRTFLLKYNENGTITDAVDCALDPLSETKCTLKSFTVEKGIYQTSNFRVQPTESIVRFPNITNLCPFGEVFNATRFASVYAWNRKRISNCVADYSVLYNSASFSTFKCYGVSPTKLNDLCFTNVYADSFVIRGDEVRQIAPGQTGKIADYNYKLPDDFTGCVIAWNSNNLDSKVGGNYNYLYRLFRKSNLKPFERDISTEIYQAGSTPCNGVEGFNCYFPLQSYGFQPTNGVGYQPYRVVVLSFELLHAPATVCGPKKSTNLVKNKCVNFNFNGLTGTGVLTESNKKFLPFQQFGRDIADTTDAVRDPQTLEILDITPCSFGGVSVITPGTNTSNQVAVLYQGVNCTEVPVAIHADQLTPTWRVYSTGSNVFQTRAGCLIGAEHVNNSYECDIPIGAGICASYQTQTNSPRRARSVASQSIIAYTMSLGAENSVAYSNNSIAIPTNFTISVTTEILPVSMTKTSVDCTMYICGDSTECSNLLLQYGSFCTQLNRALTGIAVEQDKNTQEVFAQVKQIYKTPPIKDFGGFNFSQILPDPSKPSKRSFIEDLLFNKVTLADAGFIKQYGDCLGDIAARDLICAQKFNGLTVLPPLLTDEMIAQYTSALLAGTITSGWTFGAGAALQIPFAMQMAYRFNGIGVTQNVLYENQKLIANQFNSAIGKIQDSLSSTAPALGKLQDVVNQNAQALNTLVKQLSSNCGAISSVLNDILSRLDKVEAEVQIDRLITCRLQSLQTYVTQQLIRAAEIRASANLAATKMSECVLGQSKRVDFCGKGYHLMSFPQSAPHGVVFLHVTYVPAQEKNFTTAPAICHDGKAHFPREGVFVSNGTHWFVTQRNFYEPQIITTDNTFVSGNCDVVIGIVNNTVYDPLQPELDS

SEQ ID NO: 3383 - protein, 1147 aa, Artificial Sequence
  SARS-CoV-2/Germany/BavPat3/2020__EPI_ISL_414521 spike protein (1-1147)(F970C_G999C)
MFVFLVLLPLVSSQCVNLTTRTQLPPAYTNSFTRGVYYPDKVFRSSVLHSTQDLFLPFFSNVTWFHAIHVSGTNGTKRFDNPVLPFNDGVYFASTEKSNIIRGWIFGTTLDSKTQSLLIVNNATNVVIKVCEFQFCNDPFLGVYYHKNNKSWMESEFRVYSSANNCTFEYVSQPFLMDLEGKQGNFKNLREFVFKNIDGYFKIYSKHTPINLVRDLPQGFSALEPLVDLPIGINITRFQTLLALHRSYLTPGDSSSGWTAGAAAYYVGYLQPRTFLLKYNENGTITDAVDCALDPLSETKCTLKSFTVEKGIYQTSNFRVQPTESIVRFPNITNLCPFGEVFNATRFASVYAWNRKRISNCVADYSVLYNSASFSTFKCYGVSPTKLNDLCFTNVYADSFVIRGDEVRQIAPGQTGKIADYNYKLPDDFTGCVIAWNSNNLDSKVGGNYNYLYRLFRKSNLKPFERDISTEIYQAGSTPCNGVEGFNCYFPLQSYGFQPTNGVGYQPYRVVVLSFELLHAPATVCGPKKSTNLVKNKCVNFNFNGLTGTGVLTESNKKFLPFQQFGRDIADTTDAVRDPQTLEILDITPCSFGGVSVITPGTNTSNQVAVLYQDVNCTEVPVAIHADQLTPTWRVYSTGSNVFQTRAGCLIGAEHVNNSYECDIPIGAGICASYQTQTNSPRRARSVASQSIIAYTMSLGAENSVAYSNNSIAIPTNFTISVTTEILPVSMTKTSVDCTMYICGDSTECSNLLLQYGSFCTQLNRALTGIAVEQDKNTQQVFAQVKQIYKTPPIKDFGGFNFSQILPDPSKPSKRSFIEDLLFNKVTLADAGFIKQYGDCLGDIAARDLICAQKFNGLTVLPPLLTDEMIAQYTSALLAGTITSGWTFGAGAALQIPFAMQMAYRFNGIGVTQNVLYENQKLIANQFNSAIGKIQDSLSSTASALGKLQDVVNQNAQALNTLVKQLSSNCGAISSVLNDILSRLDKVEAEVQIDRLITCRLQSLQTYVTQQLIRAAEIRASANLAATKMSECVLGQSKRVDFCGKGYHLMSFPQSAPHGVVFLHVTYVPAQEKNFTTAPAICHDGKAHFPREGVFVSNGTHWFVTQRNFYEPQIITTDNTFVSGNCDVVIGIVNNTVYDPLQPELDS

SEQ ID NO: 3384 - protein, 1147 aa, Artificial Sequence
  SARS-CoV-2/France/HF1805/2020__EPI_ISL_414628 spike protein (1-1147)(F970C_G999C)
MFVFLVLLPLVSSQCVNLTTRTQLPPAYTNSFTRGVYYPDKVFRSSVLHSTQDLFLPFFSNVTWFHAIHVSGTNGTKRFDNPVLPFNDGVYFASTEKSNIIRGWIFGTTLDSKTQSLLIVNNATNVVIKVCEFQFCNDPFLGVYYHKNNKSWMESEFRVYSSANNCTFEYVSQPFLMDLEGKQGNFKNLREFVFKNIDGYFKIYSKHTPINLVRDLPQGFSALEPLVDLPIGINITRFQTLLALHRSYLTPGDSSSGWTAGAAAYYVGYLQPRTFLLKYNENGTITDAVDCALDPLSETKCTLKSFTVEKGIYQTSNFRVQPTESIVRFPNITNLCPFGEVFNATRFASVYAWNRKRISNCVADYSVLYNSASFSTFKCYGVSPTKLNDLCFTNVYADSFVIRGDEVRQIAPGQTGKIADYNYKLPDDFTGCVIAWNSNNLDSKVGGNYNYLYRLFRKSNLKPFERDISTEIYQAGSTPCNGVEGFNCYFPLQSYGFQPTNGVGYQPYRVVVLSFELLHAPATVCGPKKSTNLVKNKCVNFNFNGLTGTGVLTESNKKFLPFQQFGRDIADTTDAVRDPQTLEILDITPCSFGGVSVITPGTNTSNQVAVLYQGVNCTEVPVAIHADQLTPTWRVYSTGSNVFQTRAGCLIGAEHVNNSYECDIPIGAGICASYQTQTNSPRRARSVASQSIIAYTMSLGAENSVAYSNNSIAIPTNFTISVTTEILPVSMTKTSVDCTMYICGDSTECSNLLLQYGSFCTQLNRALTGIAVEQDKNTQEVFAQVKQIYKTPPIKDFGGFNFSQILPDPSKPSKRSFIEDLLFNKVTLADAGFIKQYGDCLGDIAARDLICAQKFNGLTVLPPLLTDEMIAQYTSALLAGTITSGWTFGAGAALQIPFAMQMAYRFNGIGVTQNVLYENQKLIANQFNSAIGKIQDSLSSTASALGKLQDVVNQNAQALNTLVKQLSSNCGAISSVLNDILSRLDKVEAEVQIDRLITCRLQSLQTYVTQQLIRAAEIRASANLAATKMSECVLGQSKRVDFCGKGYHLMSFPQSAPHGVVFLHVTYVPAQEKNFTTAPAICHDGKAHFPREGVFVSNGTHWFVTQRNFYEPQIITTDNTFVSGNCDVVIGVVNNTVYDPLQPELDS

SEQ ID NO: 3385 - protein, 1147 aa, Artificial Sequence
  SARS-CoV-2/Netherlands/ZuidHolland_9/2020__EPI_ISL_414445 spike protein (1-1147)(F970C_G999C)
MFVFLVLLPLVSSQCVNLTTRTQLPPAYTNSFTRGVYYPDKVFRSSVLHSTQDLFLPFFSNVTWFHAIHVSGTNGTKRFDNPVLPFNDGVYFASTEKSNIIRGWIFGTTLDSKTQSLLIVNNATNVVIKVCEFQFCNDPFLGVYYHKNNKSWMESEFRVYSSANNCTFEYVSQPFLMDLEGKQGNFKNLREFVFKNIDGYFKIYSKHTPINLVRDLPQGFSALEPLVDLPIGINITRFQTLLALHRSYLTPGDSSSGWTAGAAAYYVGYLQPRTFLLKYNENGTITDAVDCALDPLSETKCTLKSFTVEKGIYQTSNFRVQPTESIVRFPNITNLCPFGEVFNATRFASVYAWNRKRISNCVADYSVLYNSASFSTFKCYGVSPTKLNDLCFTNVYADSFVIRGDEVRQIAPGQTGKIADYNYKLPDDFTGCVIAWNSNNLDSKVGGNYNYLYRLFRKSNLKPFERDISTEIYQAGSTPCNGVEGFNCYFPLQSYGFQPTNGVGYQPYRVVVLSFELLHAPATVCGPKKSTNLVKNKCVNFNFNGLTGTGVLTESNKKFLPFQQFGRDIADTTDAVRDPQTLEILDITPCSFGGVSVITPGTNTSNQVAVLYQGVNCTEVPVAIHADQLTPTWRVYSTGSNVFQTRAGCLIGAEHVNNSYECDIPIGAGICASYQTQTNSPRRARSVASQSIIAYTMSLGAENSVAYSNNSIAIPTNFTISVTTEILPVSMTKTSVDCTMYICGDSTECSNLLLQYGSFCTQLNRALTGIAVEQDKNTQEVFAQVKQIYKTPPIKDFGGFNFSQILPDPSKPSKRSFIEDLLFNKVTLADAGFIKQYGDCLGDIAARDLICVQKFNGLTVLPPLLTDEMIAQYTSALLAGTITSGWTFGAGAALQIPFAMQMAYRFNGIGVTQNVLYENQKLIANQFNSAIGKIQDSLSSTASALGKLQDVVNQNAQALNTLVKQLSSNCGAISSVLNDILSRLDKVEAEVQIDRLITCRLQSLQTYVTQQLIRAAEIRASANLAATKMSECVLGQSKRVDFCGKGYHLMSFPQSAPHGVVFLHVTYVPAQEKNFTTAPAICHDGKAHFPREGVFVSNGTHWFVTQRNFYEPQIITTDNTFVSGNCDVVIGIVNNTVYDPLQPELDS

SEQ ID NO: 3386 - protein, 1147 aa, Artificial Sequence
  SARS-CoV-2/Finland/FIN03032020A/2020__EPI_ISL_413602 spike protein (1-1147)(F970C_G999C)
MFVFLVLLPLVSSQCVNLTTRTQLPPAYTNSFTRGVYYPDKVFRSSVLHSTQDLFLPFFSNVTWFHAIHVSGTNGTKRFDNPVLPFNDGVYFASTEKSNIIRGWIFGTTLDSKTQSLLIVNNATNVVIKVCEFQFCNDPFLGVYYHKNNKSWMESEFRVYSSANNCTFEYVSQPFLMDLEGKQGNFKNLREFVFKNIDGYFKIYSKHTPINLVRDLPQGFSALEPLVDLPIGINITRFQTLLALHRSYLTPGDSSSGWTAGAAAYYVGYLQPRTFLLKYNENGTITDAVDCALDPLSETKCTLKSFTVEKGIYQTSNFRVQPTESIVRFPNITNLCPFGEVFNATRFASVYAWNRKRISNCVADYSVLYNSASFSTFKCYGVSPTKLNDLCFTNVYADSFVIRGDEVRQIAPGQTGKIADYNYKLPDDFTGCVISWNSNNLDSKVGGNYNYLYRLFRKSNLKPFERDISTEIYQAGSTPCNGVEGFNCYFPLQSYGFQPTNGVGYQPYRVVVLSFELLHAPATVCGPKKSTNLVKNKCVNFNFNGLTGTGVLTESNKKFLPFQQFGRDIADTTDAVRDPQTLEILDITPCSFGGVSVITPGTNTSNQVAVLYQGVNCTEVPVAIHADQLTPTWRVYSTGSNVFQTRAGCLIGAEHVNNSYECDIPIGAGICASYQTQTNSPRRARSVASQSIIAYTMSLGAENSVAYSNNSIAIPTNFTISVTTEILPVSMTKTSVDCTMYICGDSTECSNLLLQYGSFCTQLNRALTGIAVEQDKNTQEVFAQVKQIYKTPPIKDFGGFNFSQILPDPSKPSKRSFIEDLLFNKVTLADAGFIKQYGDCLGDIAARDLICAQKFNGLTVLPPLLTDEMIAQYTSALLAGTITSGWTFGAGAALQIPFAMQMAYRFNGIGVTQNVLYENQKLIANQFNSAIGKIQDSLSSTASALGKLQDVVNQNAQALNTLVKQLSSNCGAISSVLNDILSRLDKVEAEVQIDRLITCRLQSLQTYVTQQLIRAAEIRASANLAATKMSECVLGQSKRVDFCGKGYHLMSFPQSAPHGVVFLHVTYVPAQEKNFTTAPAICHDGKAHFPREGVFVSNGTHWFVTQRNFYEPQIITTDNTFVSGNCDVVIGIVNNTVYDPLQPELDS

SEQ ID NO: 3387 - protein, 1147 aa, Artificial Sequence
  SARS-CoV-2/France/GE1977/2020__EPI_ISL_414632 spike protein (1-1147)(F970C_G999C)
MFVFLVLLPLVSSQCVNLTTRTQLPPAYTNSFTRGVYYPDKVFRSSVLHSTQDLFLPFFSNVTWFHAIHVSGTNGTKRFDNPVLPFNDGVYFASTEKSNIIRGWIFGTTLDSKTQSLLIVNNATNVVIKVCEFQFCNDPFLGVYYHKNNKSWMESEFRVYSSANNCTFEYVSQPFLMDLEGKQGNFKNLREFVFKNIDGYFKIYSKHTPINLVRDLPQGFSALEPLVDLPIGINITRFQTLLALHRSYLTPGDSSSGWTAGAAAYYVGYLQPRTFLLKYNENGTITDAVDCALDPLSETKCTLKSFTVEKGIYQTSNFRVQPTESIVRFPNITNLCPFGEVFNATRFASVYAWNRKRISNCVADYSVLYNSASFSTFKCYGVSPTKLNDLCFTNVYADSFVIRGDEVRQIAPGQTGKIADYNYKLPDDFTGCVIAWNSNNLDSKVGGNYNYLYRLFRKSNLKPFERDISTEIYQAGSTPCNGVEGFNCYFPLQSYGFQPTNGVGYQPYRVVVLSFELLHAPATVCGPKKSTNLVKNKCVNFNFNGLTGTGVLTESNKKFLPFQQFGRDIADTTDAVRDPQTLEILDITPCSFGGVSVITPGTNTSNQVAVLYQGVNCTEVPVAIHADQLTPTWRVYSTGSNVFQTRAGCLIGAEHVNNSYECDIPIGAGICASYQTQTNSPRRARSVASQSIIAYTMSLGAENSVAYSNNSIAIPTNFTISVTTEILPVSMTKTSVDCTMYICGDSTECSNLLLQYGSFCTQLNRALTGIAVEQDKNTQEVFAQVKQIYKTPPIKDFGGFNFSQILPDPSKPSKRSFIEDLLFNKVTLADAGFIKQYGDCLGDIAARDLICAQKFNGLTVLPPLLTDEMIAQYTSALLAGTITSGWTFGAGAALQIPFAMQMAYRFNGIGVTQNVLYENQKLIANQFNSAIGKIQDSLFSTASALGKLQDVVNQNAQALNTLVKQLSSNCGAISSVLNDILSRLDKVEAEVQIDRLITCRLQSLQTYVTQQLIRAAEIRASANLAATKMSECVLGQSKRVDFCGKGYHLMSFPQSAPHGVVFLHVTYVPAQEKNFTTAPAICHDGKAHFPREGVFVSNGTHWFVTQRNFYEPQIITTDNTFVSGNCDVVIGIVNNTVYDPLQPELDS

SEQ ID NO: 3388 - protein, 1147 aa, Artificial Sequence
  SARS-CoV-2/Finland/FIN-313/2020__EPI_ISL_414641 spike protein (1-1147)(F970C_G999C)
MFVFLVLLPLVSSQCVNLTTRTQLPPAYTNSFTRGVYYPDKVFRSSVLHSTQDLFLPFFSNVTWFHAIHVSGTNGTKRFDNPVLPFNDGVYFASTEKSNIIRGWIFGTTLDSKTQSLLIVNNATNVVIKVCEFQFCNDPFLGVYYHKNNKSWMESEFRVYSSANNCTFEYVSQPFLMDLEGKQGNFKNLREFVFKNIDGYFKIYSKHTPINLVRDLPQGFSALEPLVDLPIGINITRFKTLLALHRSYLTPGDSSSGWTAGAAAYYVGYLQPRTFLLKYNENGTITDAVDCALDPLSETKCTLKSFTVEKGIYQTSNFRVQPTESIVRFPNITNLCPFGEVFNATRFASVYAWNRKRISNCVADYSVLYNSASFSTFKCYGVSPTKLNDLCFTNVYADSFVIRGDEVRQIAPGQTGKIADYNYKLPDDFTGCVIAWNSNNLDSKVGGNYNYLYRLFRKSNLKPFERDISTEIYQAGSTPCNGVEGFNCYFPLQSYGFQPTNGVGYQPYRVVVLSFELLHAPATVCGPKKSTNLVKNKCVNFNFNGLTGTGVLTESNKKFLPFQQFGRDIADTTDAVRDPQTLEILDITPCSFGGVSVITPGTNTSNQVAVLYQGVNCTEVPVAIHADQLTPTWRVYSTGSNVFQTRAGCLIGAEHVNNSYECDIPIGAGICASYQTQTNSPRRARSVASQSIIAYTMSLGAENSVAYSNNSIAIPTNFTISVTTEILPVSMTKTSVDCTMYICGDSTECSNLLLQYGSFCTQLNRALTGIAVEQDKNTQEVFAQVKQIYKTPPIKDFGGFNFSQILPDPSKPSKRSFIEDLLFNKVTLADAGFIKQYGDCLGDIAARDLICAQKFNGLTVLPPLLTDEMIAQYTSALLAGTITSGWTFGAGAALQIPFAMQMAYRFNGIGVTQNVLYENQKLIANQFNSAIGKIQDSLSSTASALGKLQDVVNQNAQALNTLVKQLSSNCGAISSVLNDILSRLDKVEAEVQIDRLITCRLQSLQTYVTQQLIRAAEIRASANLAATKMSECVLGQSKRVDFCGKGYHLMSFPQSAPHGVVFLHVTYVPAQEKNFTTAPAICHDGKAHFPREGVFVSNGTHWFVTQRNFYEPQIITTDNTFVSGNCDVVIGIVNNTVYDPLQPELDS

SEQ ID NO: 3389 - protein, 1147 aa, Artificial Sequence
  SARS-CoV-2/Netherlands/ZuidHolland_2/2020__EPI_ISL_414556 spike protein (1-1147)(F970C_G999C)
MFVFLVLLPLVSSQCVNLTTRTQLPPAYTNSFTRGVYYPDKVFRSSVLHSTQDLFLPFFSNVTWFHAIHVSGTNGTKRFDNPVLPFNDGVYFASTEKSNIIRGWIFGTTLDSKTQSLLIVNNATNVVIKVCEFQFCNDPFLGVYYHKNNKSWMESEFRVYSSANNCTFEYVSQPFLMDLEGKQGNFKNLREFVFKNIDGYFKIYSKHTPINLVRDLPQGFSALEPLVDLPIGINITRFQTLLALHRSYLTPGDSSSGWTAGAAAYYVGYLQPRTFLLKYNENGTITDAVDCALDPLSETKCTLKSFTVEKGIYQTSNFRVQPTESIVRFPNITNLCPFGEVFNATRFASVYAWNRKRISNCVADYSVLYNSASFSTFKCYGVSPTKLNDLCFTNVYADSFVIRGDEVRQIAPGQTGKIADYNYKLPDDFTGCVIAWNSNNLDSKVGGNYNYLYRLFRKSNLKPFERDISTEIYQAGSTPCNGVEGFNCYFPLQSYGFQPTNGVGYQPYRVVVLSFELLHAPATVCGPKKSTNLVKNKCVNFNFNGLTGTGVLTESNKKFLPFQQFGRDIADTTDAVRDPQTLEILDITPCSFGGVSVITPGTNTSNQVAVLYQGVNCTEVPVAIHADQLTPTWRVYSTGSNVFQTRAGCLIGAEHVNNSYECDIPIGAGICASYQTQTNSPRRARSVASQSIIAYTMSLGAENSVAYSNNSIAIPTNFTISVTTEILPVSMTKTSVDCTMYICGDSTECSNLLLQYGSFCTQLNRALTGIALEQDKNTQEVFAQVKQIYKTPPIKDFGGFNFSQILPDPSKPSKRSFIEDLLFNKVTLADAGFIKQYGDCLGDIAARDLICAQKFNGLTVLPPLLTDEMIAQYTSALLAGTITSGWTFGAGAALQIPFAMQMAYRFNGIGVTQNVLYENQKLIANQFNSAIGKIQDSLSSTASALGKLQDVVNQNAQALNTLVKQLSSNCGAISSVLNDILSRLDKVEAEVQIDRLITCRLQSLQTYVTQQLIRAAEIRASANLAATKMSECVLGQSKRVDFCGKGYHLMSFPQSAPHGVVFLHVTYVPAQEKNFTTAPAICHDGKAHFPREGVFVSNGTHWFVTQRNFYEPQIITTDNTFVSGNCDVVIGIVNNTVYDPLQPELDS

SEQ ID NO: 3390 - protein, 1147 aa, Artificial Sequence
  SARS-CoV-2/USA/WA-UW31/2020__EPI_ISL_414618 spike protein (1-1147)(F970C_G999C)
MFVFLVLLPLVSSQCVNLTTRTQLPPAYTNSFTRGVYYPDKVFRSSVLHSTQDLFLPFFSNVTWFHAIHVSGTNGTKRFDNPVLPFNDGVYFASTEKSNIIRGWIFGTTLDSKTQSLLIVNNATNVVIKVCEFQFCNDPFLGVYYHKNNKSWMESEFRVYSSANNCTFEYVSQPFLMDLEGKQGNFKNLREFVFKNIDGYFKIYSKHTPINLVRDLPQGFSALEPLVDLPIGINITRFQTLLALHRSYLTPGDSSSGWTAGAAAYYVGYLQPRTFLLKYNENGTITDAVDCALDPLSETKCTLKSFTVEKGIYQTSNFRVQPTESIVRFPNITNLCPFGEVFNATRFASVYAWNRKRISNCVADYSVLYNSASFSTFKCYGVSPTKLNDLCFTNVYADSFVIRGDEVRQIAPGQTGKIADYNYKLPDDFTGCVIAWNSNNLDSKVGGNYNYLYRLFRKSNLKPFERDISTEIYQAGSTPCNGAEGFNCYFPLQSYGFQPTNGVGYQPYRVVVLSFELLHAPATVCGPKKSTNLVKNKCVNFNFNGLTGTGVLTESNKKFLPFQQFGRDIADTTDAVRDPQTLEILDITPCSFGGVSVITPGTNTSNQVAVLYQDVNCTEVPVAIHADQLTPTWRVYSTGSNVFQTRAGCLIGAEHVNNSYECDIPIGAGICASYQTQTNSPRRARSVASQSIIAYTMSLGAENSVAYSNNSIAIPTNFTISVTTEILPVSMTKTSVDCTMYICGDSTECSNLLLQYGSFCTQLNRALTGIAVEQDKNTQEVFAQVKQIYKTPPIKDFGGFNFSQILPDPSKPSKRSFIEDLLFNKVTLADAGFIKQYGDCLGDIAARDLICAQKFNGLTVLPPLLTDEMIAQYTSALLAGTITSGWTFGAGAALQIPFAMQMAYRFNGIGVTQNVLYENQKLIANQFNSAIGKIQDSLSSTASALGKLQDVVNQNAQALNTLVKQLSSNCGAISSVLNDILSRLDKVEAEVQIDRLITCRLQSLQTYVTQQLIRAAEIRASANLAATKMSECVLGQSKRVDFCGKGYHLMSFPQSAPHGVVFLHVTYVPAQEKNFTTAPAICHDGKAHFPREGVFVSNGTHWFVTQRNFYEPQIITTDNTFVSGNCDVVIGIVNNTVYDPLQPELDS

SEQ ID NO: 3391 - protein, 1147 aa, Artificial Sequence
  SARS-CoV-2/South Korea/SNU01/2020__EPI_ISL_411929 spike protein (1-1147)(F970C_G999C)
MFVFLVLLPLVSSQCVNLTTRTQLPPAYTNSFTRGVYYPDKVFRSSVLHSTQDLFLPFFSNVTWFHAIHVSGTNGTKRFDNPVLPFNDGVYFASTEKSNIIRGWIFGTTLDSKTQSLLIVNNATNVVIKVCEFQFCNDPFLGVYYHKNNKSWMESEFRVYSSANNCTFEYVSQPFLMDLEGKQGNFKNLREFVFKNIDGYFKIYSKHTPINLVRDLPQGFWALEPLVDLPIGINITRFQTLLALHRSYLTPGDSSSGWTAGAAAYYVGYLQPRTFLLKYNENGTITDAVDCALDPLSETKCTLKSFTVEKGIYQTSNFRVQPTESIVRFPNITNLCPFGEVFNATRFASVYAWNRKRISNCVADYSVLYNSASFSTFKCYGVSPTKLNDLCFTNVYADSFVIRGDEVRQIAPGQTGKIADYNYKLPDDFTGCVIAWNSNNLDSKVGGNYNYLYRLFRKSNLKPFERDISTEIYQAGSTPCNGVEGFNCYFPLQSYGFQPTNGVGYQPYRVVVLSFELLHAPATVCGPKKSTNLVKNKCVNFNFNGLTGTGVLTESNKKFLPFQQFGRDIADTTDAVRDPQTLEILDITPCSFGGVSVITPGTNTSNQVAVLYQDVNCTEVPVAIHADQLTPTWRVYSTGSNVFQTRAGCLIGAEHVNNSYECDIPIGAGICASYQTQTNSPRRARSVASQSIIAYTMSLGAENSVAYSNNSIAIPTNFTISVTTEILPVSMTKTSVDCTMYICGDSTECSNLLLQYGSFCTQLNRALTGIAVEQDKNTQEVFAQVKQIYKTPPIKDFGGFNFSQILPDPSKPSKRSFIEDLLFNKVTLADAGFIKQYGDCLGDIAARDLICAQKFNGLTVLPPLLTDEMIAQYTSALLAGTITSGWTFGAGAALQIPFAMQMAYRFNGIGVTQNVLYENQKLIANQFNSAIGKIQDSLSSTASALGKLQDVVNQNAQALNTLVKQLSSNCGAISSVLNDILSRLDKVEAEVQIDRLITCRLQSLQTYVTQQLIRAAEIRASANLAATKMSECVLGQSKRVDFCGKGYHLMSFPQSAPHGVVFLHVTYVPAQEKNFTTAPAICHDGKAHFPREGVFVSNGTHWFVTQRNFYEPQIITTDNTFVSGNCDVVIGIVNNTVYDPLQPELDS

SEQ ID NO: 3392 - protein, 1147 aa, Artificial Sequence
  SARS-CoV-2/China/WF0004/2020__EPI_ISL_413694 spike protein (1-1147)(F970C_G999C)
MFVFLVLLPLVSSQCVNLTTRTQLPPAYTNSFTRGVYYPDKVFRSSVLHSTQDLFLPFFSNVTWFHAIHVSGTNGTKRFDNPVLPFNDGVYFASTEKSNIIRGWIFGTTLDSKTQSLLIVNNATNVVIKVCEFQFCNDPFLGVYYHKNNKSWTESEFRVYSSANNCTFEYVSQPFLMDLEGKQGNFKNLREFVFKNIDGYFKIYSKHTPINLVRDLPQGFSALEPLVDLPIGINITRFQTLLALHRSYLTPGDSSSGWTAGAAAYYVGYLQPRTFLLKYNENGTITDAVDCALDPLSETKCTLKSFTVEKGIYQTSNFRVQPTESIVRFPNITNLCPFGEVFNATRFASVYAWNRKRISNCVADYSVLYNSASFSTFKCYGVSPTKLNDLCFTNVYADSFVIRGDEVRQIAPGQTGKIADYNYKLPDDFTGCVIAWNSNNLDSKVGGNYNYLYRLFRKSNLKPFERDISTEIYQAGSTPCNGVEGFNCYFPLQSYGFQPTNGVGYQPYRVVVLSFELLHAPATVCGPKKSTNLVKNKCVNFNFNGLTGTGVLTESNKKFLPFQQFGRDIADTTDAVRDPQTLEILDITPCSFGGVSVITPGTNTSNQVAVLYQDVNCTEVPVAIHADQLTPTWRVYSTGSNVFQTRAGCLIGAEHVNNSYECDIPIGAGICASYQTQTNSPRRARSVASQSIIAYTMSLGAENSVAYSNNSIAIPTNFTISVTTEILPVSMTKTSVDCTMYICGDSTECSNLLLQYGSFCTQLNRALTGIAVEQDKNTQEVFAQVKQIYKTPPIKDFGGFNFSQILPDPSKPSKRSFIEDLLFNKVTLADAGFIKQYGDCLGDIAARDLICAQKFNGLTVLPPLLTDEMIAQYTSALLAGTITSGWTFGAGAALQIPFAMQMAYRFNGIGVTQNVLYENQKLIANQFNSAIGKIQDSLSSTASALGKLQDVVNQNAQALNTLVKQLSSNCGAISSVLNDILSRLDKVEAEVQIDRLITCRLQSLQTYVTQQLIRAAEIRASANLAATKMSECVLGQSKRFDFCGKGYHLMSFPQSAPHGVVFLHVTYVPAQEKNFTTAPAICHDGKAHFPREGVFVSNGTHWFVTQRNFYEPQIITTDNTFVSGNCDVVIGIVNNTVYDPLQPELDS

SEQ ID NO: 3393 - protein, 1147 aa, Artificial Sequence
  SARS-CoV-2/China/WF0028/2020__EPI_ISL_413791 spike protein (1-1147)(F970C_G999C)
MFVFLVLLPLVSSQCVNLTTRTQLPPAYTNSFTRGVYYPDKVFRSSVLHSTQDLFLPFFSNVTWFHAIHVSGTNGTKRFDNPVLPFNDGVYFASTEKSNIIRGWIFGTTLDSKTQSLLIVNNATNVVIKVCEFQFCNDPFLGVYYHKNNKSWMESEFRVYSSANNCTFEYVSQPFLMDLEGKQGNFKNLREFVFKNIDGYFKIYSKHTPINLVRDLPQGFSALEPLVDLPIGINITRFQTLLALHRSYLTPGDSSSGWTAGAAAYYVGYLQPRTFLLKYNENGTITDAVDCALDPLSETKCTLKSFTVEKGIYQTSNFRVQPTESIVRFPNITNLCPFGEVFNATRFASVYAWNRKRISNCVADYSVLYNSASFSTFKCYGVSPTKLNDLCFTNVYADSFVIRGDEVRQIAPGQTGKIADYNYKLPDDFTGCVIAWNSNNLDSKVGGNYNYLYRLFRKSNLKPFERDISTEIYQAGSTPCNGVEGFNCYFPLQSYGFQPTNGVGYQPYRVVVLSFELLHAPATVCGPKKSTNLVKNKCVNFNFNGLTGTGVLTESNKKFLPFQQFGRDIADTTDAVRDPQTLEILDITPCSFGGVSVITPGTNTSNQVAVLYQDVNCTEVPVAIHADQLTPTWRVYSTGSNVFQTRAGCLIGAEHVNNSYECDIPIGAGICASYQTQTNSPRRARSVASQSIIAYTMSLGAENSVAYSNNSIAIPTNFTISVTTEILPVSMTKTSVDCTMYICGDSTECSNLLLQYGSFCTQLNRALTGIAVEQDKNTQEVFAQVKQIYKTPPIKDFGGFNFSQILPDPSKPSKRSFIEDLLFNKVTLADAGFIKQYGDCLGDIAARDLICAQKFNGLTVLPPLLTDEMIAQYTSALLAGTITSGWTFGAGAALQIPFAMQMAYRFNGIGVTQNVLYENQKLIANQFNSAIGKIQDSLSSTASALGKLQDVVNQNAQALNTLVKQLSSNCGAISSVLNDILSRLDKVEAEVQIDRLITCRLQSLQTYVTQQLIRAAEIRASANLAATKMSECVLGQSKRVDFCGKGYHLMSFPQSAPHGVVFLHVTYVPAQEKNFTTAPAICHDGKAHFPREGVFVSNGTHWFVTQRNFYEPQIITTDNTFVSGNCDVVIGIVNNTVYDPLQPELES

SEQ ID NO: 3394 - protein, 1147 aa, Artificial Sequence
  SARS-CoV-2/2019-nCoV/USA-CruiseA-18/2020__MT159716.1 spike protein (1-1147)(F970C_G999C)
MFVFLVLLPLVSSQCVNLTTRTQLPPAYTNSFTRGVYYPDKVFRSSVLHSTQDLFLPFFSNVTWFHAIHVSGTNGTKRFDNPVLPFNDGVYFASTEKSNIIRGWIFGTTLDSKTQSLLIVNNATNVVIKVCEFQFCNDPFLGVYYHKNNKSWMESELRVYSSANNCTFEYVSQPFLMDLEGKQGNFKNLREFVFKNIDGYFKIYSKHTPINLVRDLPQGFSALEPLVDLPIGINITRFQTLLALHRSYLTPGDSSSGWTAGAAAYYVGYLQPRTFLLKYNENGTITDAVDCALDPLSETKCTLKSFTVEKGIYQTSNFRVQPTESIVRFPNITNLCPFGEVFNATRFASVYAWNRKRISNCVADYSVLYNSASFSTFKCYGVSPTKLNDLCFTNVYADSFVIRGDEVRQIAPGQTGKIADYNYKLPDDFTGCVIAWNSNNLDSKVGGNYNYLYRLFRKSNLKPFERDISTEIYQAGSTPCNGVEGFNCYFPLQSYGFQPTNGVGYQPYRVVVLSFELLHAPATVCGPKKSTNLVKNKCVNFNFNGLTGTGVLTESNKKFLPFQQFGRDIADTTDAVRDPQTLEILDITPCSFGGVSVITPGTNTSNQVAVLYQDVNCTEVPVAIHADQLTPTWRVYSTGSNVFQTRAGCLIGAEHVNNSYECDIPIGAGICASYQTQTNSPRRARSVASQSIIAYTMSLGAENSVAYSNNSIAIPTNFTISVTTEILPVSMTKTSVDCTMYICGDSTECSNLLLQYGSFCTQLNRALTGIAVEQDKNTQEVFAQVKQIYKTPPIKDFGGFNFSQILPDPSKPSKRSFIEDLLFNKVTLADAGFIKQYGDCLGDIAARDLICAQKFNGLTVLPPLLTDEMIAQYTSALLAGTITSGWTFGAGAALQIPFAMQMAYRFNGIGVTQNVLYENQKLIANQFNSAIGKIQDSLSSTASALGKLQDVVNQNAQALNTLVKQLSSNCGAISSVLNDILSRLDKVEAEVQIDRLITCRLQSLQTYVTQQLIRAAEIRASANLAATKMSECVLGQSKRVDFCGKGYHLMSFPQSAPHGVVFLHVTYVPAQEKNFTTAPAICHDGKAHFPREGVFVSNGTHWFVTQRNFYEPQIITTDNTFVSGNCDVVIGIVNNTVYDPLQPELDS

SEQ ID NO: 3395 - protein, 1147 aa, Artificial Sequence
  SARS-CoV-2/SARS-CoV-2/Yunnan-01/human/2020/CHN__MT049951.1 spike protein (1-1147)(F970C_G999C)
MFVFLVLLPLVSSQCVNLTTRTQLPPANTNSFTRGVYYPDKVFRSSVLHSTQDLFLPFFSNVTWFHAIHVSGTNGTKRFDNPVLPFNDGVYFASTEKSNIIRGWIFGTTLDSKTQSLLIVNNATNVVIKVCEFQFCNDPFLGVYYHKNNKSWMESEFRVYSSANNCTFEYVSQPFLMDLEGKQGNFKNLREFVFKNIDGYFKIYSKHTPINLVRDLPQGFSALEPLVDLPIGINITRFQTLLALHRSYLTPGDSSSGWTAGAAAYYVGYLQPRTFLLKYNENGTITDAVDCALDPLSETKCTLKSFTVEKGIYQTSNFRVQPTESIVRFPNITNLCPFGEVFNATRFASVYAWNRKRISNCVADYSVLYNSASFSTFKCYGVSPTKLNDLCFTNVYADSFVIRGDEVRQIAPGQTGKIADYNYKLPDDFTGCVIAWNSNNLDSKVGGNYNYLYRLFRKSNLKPFERDISTEIYQAGSTPCNGVEGFNCYFPLQSYGFQPTNGVGYQPYRVVVLSFELLHAPATVCGPKKSTNLVKNKCVNFNFNGLTGTGVLTESNKKFLPFQQFGRDIADTTDAVRDPQTLEILDITPCSFGGVSVITPGTNTSNQVAVLYQDVNCTEVPVAIHADQLTPTWRVYSTGSNVFQTRAGCLIGAEHVNNSYECDIPIGAGICASYQTQTNSPRRARSVASQSIIAYTMSLGAENSVAYSNNSIAIPTNFTISVTTEILPVSMTKTSVDCTMYICGDSTECSNLLLQYGSFCTQLNRALTGIAVEQDKNTQEVFAQVKQIYKTPPIKDFGGFNFSQILPDPSKPSKRSFIEDLLFNKVTLADAGFIKQYGDCLGDIAARDLICAQKFNGLTVLPPLLTDEMIAQYTSALLAGTITSGWTFGAGAALQIPFAMQMAYRFNGIGVTQNVLYENQKLIANQFNSAIGKIQDSLSSTASALGKLQDVVNQNAQALNTLVKQLSSNCGAISSVLNDILSRLDKVEAEVQIDRLITCRLQSLQTYVTQQLIRAAEIRASANLAATKMSECVLGQSKRVDFCGKGYHLMSFPQSAPHGVVFLHVTYVPAQEKNFTTAPAICHDGKAHFPREGVFVSNGTHWFVTQRNFYEPQIITTDNTFVSGNCDVVIGIVNNTVYDPLQPELDS

SEQ ID NO: 3396 - protein, 1147 aa, Artificial Sequence
  SARS-CoV-2/USA/WA-UW292/2020__EPI_ISL_418077 spike protein (1-1147)(F970C_G999C)
MFVFLVLLPLVSSQCVNLTTRTQLPPAYTNSFTRGVYYPDKVFRSSVLHSTQDLFLPFFSNVTWFHAIHVSGTNGTKRFDNPVLPFNDGVYFASTEKSNIIRGWIFGTTLDSKTQSLLIVNNATNVVIKVCEFQFCNDPFLGVYYHKNNKSWMESEFRVYSSANNCTFEYVSQPFLMDLEGKQGNFKNLREFVFKNIDGYFKIYSKHTPINLVRDLPQGFSALEPLVDLPIGINITRFQTLLALHRSYLTPGDSSSGWTAGAAAYYVGYLQPRTFLLKYNENGTITDAVDCALDPLSETKCTLKSFTVEKGIYQTSNFRVQPTESIVRFPNITNLCPFGEVFNATRFASVYAWNRKRISNCVADYSVLYNSASFSTFKCYGVSPTKLNDLCFTNVYADSFVIRGDEVRQIAPGQTGKIADYNYKLPDDFTGCVIAWNSNNLDSKVGGNYNYLYRLFRKSNLKPFERDISTEIYQASSTPCNGVEGFNCYFPLQSYGFQPTNGVGYQPYRVVVLSFELLHAPATVCGPKKSTNLVKNKCVNFNFNGLTGTGVLTESNKKFLPFQQFGRDIADTTDAVRDPQTLEILDITPCSFGGVSVITPGTNTSNQVAVLYQDVNCTEVPVAIHADQLTPTWRVYSTGSNVFQTRAGCLIGAEHVNNSYECDIPIGAGICASYQTQTNSPRRARSVASQSIIAYTMSLGAENSVAYSNNSIAIPTNFTISVTTEILPVSMTKTSVDCTMYICGDSTECSNLLLQYGSFCTQLNRALTGIAVEQDKNTQEVFAQVKQIYKTPPIKDFGGFNFSQILPDPSKPSKRSFIEDLLFNKVTLADAGFIKQYGDCLGDIAARDLICAQKFNGLTVLPPLLTDEMIAQYTSALLAGTITSGWTFGAGAALQIPFAMQMAYRFNGIGVTQNVLYENQKLIANQFNSAIGKIQDSLSSTASALGKLQDVVNQNAQALNTLVKQLSSNCGAISSVLNDILSRLDKVEAEVQIDRLITCRLQSLQTYVTQQLIRAAEIRASANLAATKMSECVLGQSKRVDFCGKGYHLMSFPQSAPHGVVFLHVTYVPAQEKNFTTAPAICHDGKAHFPREGVFVSNGTHWFVTQRNFYEPQIITTDNTFVSGNCDVVIGIVNNTVYDPLQPELDS

SEQ ID NO: 3397 - protein, 1147 aa, Artificial Sequence
  SARS-CoV-2/Iceland/192/2020__EPI_ISL_417819 spike protein (1-1147)(F970C_G999C)
MFVFFVLLPLVSSQCVNLTTRTQLPPAYTNSFTRGVYYPDKVFRSSVLHSTQDLFLPFFSNVTWFHAIHVSGTNGTKRFDNPVLPFNDGVYFASTEKSNIIRGWIFGTTLDSKTQSLLIVNNATNVVIKVCEFQFCNDPFLGVYYHKNNKSWMESEFRVYSSANNCTFEYVSQPFLMDLEGKQGNFKNLREFVFKNIDGYFKIYSKHTPINLVRDLPQGFSALEPLVDLPIGINITRFQTLLALHRSYLTPGDSSSGWTAGAAAYYVGYLQPRTFLLKYNENGTITDAVDCALDPLSETKCTLKSFTVEKGIYQTSNFRVQPTESIVRFPNITNLCPFGEVFNATRFASVYAWNRKRISNCVADYSVLYNSASFSTFKCYGVSPTKLNDLCFTNVYADSFVIRGDEVRQIAPGQTGKIADYNYKLPDDFTGCVIAWNSNNLDSKVGGNYNYLYRLFRKSNLKPFERDISTEIYQAGSTPCNGVEGFNCYFPLQSYGFQPTNGVGYQPYRVVVLSFELLHAPATVCGPKKSTNLVKNKCVNFNFNGLTGTGVLTESNKKFLPFQQFGRDIADTTDAVRDPQTLEILDITPCSFGGVSVITPGTNTSNQVAVLYQGVNCTEVPVAIHADQLTPTWRVYSTGSNVFQTRAGCLIGAEHVNNSYECDIPIGAGICASYQTQTNSPRRARSVASQSIIAYTMSLGAENSVAYSNNSIAIPTNFTISVTTEILPVSMTKTSVDCTMYICGDSTECSNLLLQYGSFCTQLNRALTGIAVEQDKNTQEVFAQVKQIYKTPPIKDFGGFNFSQILPDPSKPSKRSFIEDLLFNKVTLADAGFIKQYGDCLGDIAARDLICAQKFNGLTVLPPLLTDEMIAQYTSALLAGTITSGWTFGAGAALQIPFAMQMAYRFNGIGVTQNVLYENQKLIANQFNSAIGKIQDSLSSTASALGKLQDVVNQNAQALNTLVKQLSSNCGAISSVLNDILSRLDKVEAEVQIDRLITCRLQSLQTYVTQQLIRAAEIRASANLAATKMSECVLGQSKRVDFCGKGYHLMSFPQSAPHGVVFLHVTYVPAQEKNFTTAPAICHDGKAHFPREGVFVSNGTHWFVTQRNFYEPQIITTDNTFVSGNCDVVIGIVNNTVYDPLQPELDS

SEQ ID NO: 3398 - protein, 1147 aa, Artificial Sequence
  SARS-CoV-2/Belgium/ULG-6939/2020__EPI_ISL_417020 spike protein (1-1147)(F970C_G999C)
MFVFLVLLPLVSSQCVNLTTRTQLPPAYTNSFTRGVYYPDKVFRSSVLHSTQDLFLPFFSNVTWFHAIHVSGTNGTKRFDNPVLPFNDGVYFASTEKSNIIRGWIFGTTLDSKTQSLLIVNNATNVVIKVCEFQFCNDPFLGVYYHKNNKSWMESEFRVYSSANNCTFEYVSQPFLMDLEGKQGNFKNLREFVFKNIDGYFKIYSKHTPINLVRDLPQGFSALEPLVDLPIGINITRFQTLLALHRSYLTPGDSSSGWTAGAAAYYVGYLQPRTFLLKYNENGTITDAVDCALDPLSETKCTLKSFTVEKGIYQTSNFRVQPTESIVRFPNITNLCPFGEVFNATRFASVYAWNRKRISNCVADYSVLYNSASFSTFKCYGVSPTKLNDLCFTNVYADSFVIRGDEVRQIAPGQTGKIADYNYKLPDDFTGCVIAWNSNNLDSKVGGNYNYLYRLFRKSNLKPFERDISTEIYQAGSTPCNGVEGFNCYFPLQSYGFQPTNGVGYQPYRVVVLSFELLHAPATVCGPKKSTNLVKNKCVNFNFNGLTGTGVLTESNKKFLPFQQFGRDIADTTDAVRDPQTLEILDITPCSFGGVSVITPGTNTSNQVAVLYQGVNCTEVPVAIHADQLTPTWRVYSTGSNVFQTRAGCLIGAEHVNNSYECDIPIGAGICASYQTQTNSPRRARSVASQSIIAYTMSLGAENSVVYSNNSIAIPTNFTISVTTEILPVSMTKTSVDCTMYICGDSTECSNLLLQYGSFCTQLNRALTGIAVEQDKNTQEVFAQVKQIYKTPPIKDFGGFNFSQILPDPSKPSKRSFIEDLLFNKVTLADAGFIKQYGDCLGDIAARDLICAQKFNGLTVLPPLLTDEMIAQYTSALLAGTITSGWTFGAGAALQIPFAMQMAYRFNGIGVTQNVLYENQKLIANQFNSAIGKIQDSLSSTASALGKLQDVVNQNAQALNTLVKQLSSNCGAISSVLNDILSRLDKVEAEVQIDRLITCRLQSLQTYVTQQLIRAAEIRASANLAATKMSECVLGQSKRVDFCGKGYHLMSFPQSAPHGVVFLHVTYVPAQEKNFTTAPAICHDGKAHFPREGVFVSNGTHWFVTQRNFYEPQIITTDNTFVSGNCDVVIGIVNNTVYDPLQPELDS

SEQ ID NO: 3399 - protein, 1147 aa, Artificial Sequence
  SARS-CoV-2/France/HF2496/2020__EPI_ISL_418231 spike protein (1-1147)(F970C_G999C)
MFVFLVLLPLVSSQCVNLTTRTQLPPAYTNSFTRGVYYPDKVFRSSVLHSTQDLFLPFFSNVTWFHAIHVSGTNGTKRFDNPVLPFNDGVYFASTEKSNIIRGWIFGTTLDSKTQSLLIVNNATNVVIKVCEFQFCNDPFLGVYYHKNNKSWMESEFRVYSSANNCTFEYVSQPFLMDLEGKQGNFKNLREFVFKNIDGYFKIYSKHTPINLVRDLPQGFSALEPLVDLPIGINITRFQTLLALHRSYLTPGDSSSGWTAGAAAYYVGYLQPRTFLLKYNENGTITDAVDCALDPLSETKCTLKSFTVEKGIYQTSNFRVQPTESIVRFPNITNLCPFGEVFNATRFASVYAWNRKRISNCVADYSVLYNSASFSTFKCYGVSPTKLNDLCFTNVYADSFVIRGDEVRQIAPGQTGKIADYNYKLPDDFTGCVIAWNSNNLDSKVGGNYNYLYRLFRKSNLKPFERDISTEIYQAGSTPCNGVEGFNCYFPLQSYGFQPTNGVGYQPYRVVVLSFELLHAPATVCGPKKSTNLVKNKCVNFNFNGLTGTGVLTESNKKFLPFQQFGRDIADTTDAVRDPQTLEILDITPCSFGGVSVITPGTNTSNQVAVLYQGVNCTEVPVAIHADQLTPTWRVYSTGSNVFQTRAGCLIGAEHVNNSYECDIPIGAGICASYQTQTNSPRRARSVASQSIIAYTMSLGAENSVAYSNNSIAIPTNFTISVTTEILPVSMTKTSVDCTMYICGDSTECSNLLLQYGSFCTQLNRALTGIAVEQDKNTQEVFAQVKQIYKTPPIKDFGGFNFSQILPDPSKPSKRSFIEDLLFNKVTLADAGFIKQYGDCLGDIVARDLICAQKFNGLTVLPPLLTDEMIAQYTSALLAGTITSGWTFGAGAALQIPFAMQMAYRFNGIGVTQNVLYENQKLIANQFNSAIGKIQDSLSSTASALGKLQDVVNQNAQALNTLVKQLSSNCGAISSVLNDILSRLDKVEAEVQIDRLITCRLQSLQTYVTQQLIRAAEIRASANLAATKMSECVLGQSKRVDFCGKGYHLMSFPQSAPHGVVFLHVTYVPAQEKNFTTAPAICHDGKAHFPREGVFVSNGTHWFVTQRNFYEPQIITTDNTFVSGNCDVVIGIVNNTVYDPLQPELDS

SEQ ID NO: 3400 - protein, 1147 aa, Artificial Sequence
  SARS-CoV-2/USA/WA-UW291/2020__EPI_ISL_418076 spike protein (1-1147)(F970C_G999C)
MFVFLVLLPLVSSQCVNLTTRTQLPPAYTNSFTRGVYYPDKVFRSSVLHSTQDLFLPFFSNVTWFHAIHVSGTNGTKRFDNPVLPFNDGVYFASTEKSNIIRGWIFGTTLDSKTQSLLIVNNATNVVIKVCEFQFCNDPFLGVYYHKNNKSWMESEFRVYSSANNCTFEYVSQPFLMDLEGKQGNFKNLREFVFKNIDGYFKIYSKHTPINLVRDLPQGFSALEPLVDLPIGINITRFQTLLALHRSYLTPGDSSSGWTAGAAAYYVGYLQPRTFLLKYNENGTITDAVDCALDPLSETKCTLKSFTVEKGIYQTSNFRVQPTESIVRFPNITNLCPFGEVFNATRFASVYAWNRKRISNCVADYSVLYNSASFSTFKCYGVSPTKLNDLCFTNVYADSFVIRGDEVRQIAPGQTGKIADYNYKLPDDFTGCVIAWNSNNLDSKVGGNYNYLYRLFRKSNLKPFERDISTEIYQAGSTPCNGVEGFNCYFPLQSYGFQPTNGVGYQPYRVVVLSFELLHAPATVCGPKKSTNLVKNKCVNFNFNGLTGTGVLTESNKKFLPFQQFGRDIADTTDAVRDPQTLEILDITPCSFGGVSVITPGTNTSNQVAVLYQGVNCTEVPVAIHADQLTPTWRVYSTGSNVFQTRAGCLIGAEHVNNSYECDIPIGAGICASYQTQTNSPRRARSVASQSIIAYTMSLGAENSVAYSNNSIAIPTNFTISVTTEILPVSMTKTSVDCTMYICGDSTECSNLLLQYGSFCTQLNRALTGIAVEQDKNTQEVFAQVKQIYKTPPIKDFGGFNFSQILPDPSKPSKRSFIEDLLFNKVTLADAGFIKQYGDCLGDIAARDLICAQKFNGLTVLPPLLTDEMIAQYTSALLAGTITSGWTFGAGAALQIPFAMQMAYRFNGIGVTQNVLYENQKLIANQFNSAIGKIQYSLSSTASALGKLQDVVNQNAQALNTLVKQLSSNCGAISSVLNDILSRLDKVEAEVQIDRLITCRLQSLQTYVTQQLIRAAEIRASANLAATKMSECVLGQSKRVDFCGKGYHLMSFPQSAPHGVVFLHVTYVPAQEKNFTTAPAICHDGKAHFPREGVFVSNGTHWFVTQRNFYEPQIITTDNTFVSGNCDVVIGIVNNTVYDPLQPELDS

SEQ ID NO: 3401 - protein, 1147 aa, Artificial Sequence; identical to SEQ ID NO: 3364
  SARS-CoV-2/Portugal/PT0034/2020__EPI_ISL_418019 spike protein (1-1147)(F970C_G999C)

SEQ ID NO: 3402 - protein, 1147 aa, Artificial Sequence; identical to SEQ ID NO: 3356
  SARS-CoV-2/Iceland/202/2020__EPI_ISL_417750 spike protein (1-1147)(F970C_G999C)

SEQ ID NO: 3403 - protein, 1147 aa, Artificial Sequence
  SARS-CoV-2/USA/WA-UW261/2020__EPI_ISL_418046 spike protein (1-1147)(F970C_G999C)
MFVFLVLLPLVSSQCVNLTTRTQLPPAYTNSFTRGVYYPDKVFRSSVLHSTQDLFLPFFSNVTWFHAIHVSGTNGTKRFDNPVLPFNDGVYFASTEKSNIIRGWIFGTTLDSKTQSLLIVNNATNVVIKVCEFQFCNDPFLGVYYHKNNKSWMESEFRVYSSANNCTFEYVSQPFLMDLEGKQGNFKNLREFVFKNIDGYFKIYSKHTPINLVRDLPQGFSALEPLVDLPIGINITRFQTLLALHRSYLTPGDSSSGWTAGAAAYYVGYLQPRTFLLKYNENGTITDAVDCALDPLSETKCTLKSFTVEKGIYQTSNFRVQPTESIVRFPNITNLCPFGEVFNATRFTSVYAWNRKRISNCVADYSVLYNSASFSTFKCYGVSPTKLNDLCFTNVYADSFVIRGDEVRQIAPGQTGKIADYNYKLPDDFTGCVIAWNSNNLDSKVGGNYNYLYRLFRKSNLKPFERDISTEIYQAGSTPCNGVEGFNCYFPLQSYGFQPTNGVGYQPYRVVVLSFELLHAPATVCGPKKSTNLVKNKCVNFNFNGLTGTGVLTESNKKFLPFQQFGRDIADTTDAVRDPQTLEILDITPCSFGGVSVITPGTNTSNQVAVLYQDVNCTEVPVAIHADQLTPTWRVYSTGSNVFQTRAGCLIGAEHVNNSYECDIPIGAGICASYQTQTNSPRRARSVASQSIIAYTMSLGAENSVAYSNNSIAIPTNFTISVTTEILPVSMTKTSVDCTMYICGDSTECSNLLLQYGSFCTQLNRALTGIAVEQDKNTQEVFAQVKQIYKTPPIKDFGGFNFSQILPDPSKPSKRSFIEDLLFNKVTLADAGFIKQYGDCLGDIAARDLICAQKFNGLTVLPPLLTDEMIAQYTSALLAGTITSGWTFGAGAALQIPFAMQMAYRFNGIGVTQNVLYENQKLIANQFNSAIGKIQDSLSSTASALGKLQDVVNQNAQALNTLVKQLSSNCGAISSVLNDILSRLDKVEAEVQIDRLITCRLQSLQTYVTQQLIRAAEIRASANLAATKMSECVLGQSKRVDFCGKGYHLMSFPQSAPHGVVFLHVTYVPAQEKNFTTAPAICHDGKAHFPREGVFVSNGTHWFVTQRNFYEPQIITTDNTFVSGNCDVVIGIVNNTVYDPLQPELDS

SEQ ID NO: 3404 - protein, 1147 aa, Artificial Sequence
  SARS-CoV-2/Portugal/PT0035/2020__EPI_ISL_418020 spike protein (1-1147)(F970C_G999C)
MFVFLVLLPLVSSQCVNLTTRTQLPPAYTNSFTRGVYYPDKVFRSSVLHSTQDLFLPFFSNVTWFHAIHVSGTNGTKRFDNPVLPFNDGVYFASTEKSNIIRGWIFGTTLDSKTQSLLIVNNATNVVIKVCEFQFCNDPFLGVYYHKNNKSWMESEFRVYSSANNCTFEYVSQPFLMDLEGKQGNFKNLREFVFKNIDGYFKIYSKHTPINLVRDLPQGFSALEPLVDLPIGINITRFQTLLALHRSYLTPGDSSSGWTAGAAAYYVGYLQPRTFLLKYNENGTITDAVDCALDPLSETKCTLKSFTVEKGIYQTSNFRVQPTESIVRFPNITNLCPFGEVFNATRFASVYAWNRKRISNCVADYSVLYNSASFSTFKCYGVSPTKLNDLCFTNVYADSFVIRGDEVRQIAPGQTGKIADYNYKLPDDFTGCVIAWNSNNLDSKVGGNYNYLYRLFRKSNLKPFERDISTEIYQAGSTPCNGVEGFNCYFPLQSYGFQPTNGVGYQPYRVVVLSFELLHAPATVCGPKKSTNLVKNKCVNFNFNGLTGTGVLTESNKKFLPFQQFGRDIADTTDAVRDPQTLEILDITPCSFGGVSVITPGTNTSNQVAVLYQDVNCTEVPVAIHADQLTPTWRVYSTGSNVFQTRAGCLIGAEHVNNSYECDIPIGAGICASYQTQTNSPRRARSVASQSIIAYTMSLGAENSVAYSNNSIAIPTNFTISVTTEILPVSMTKTSVDCTMYICGDSTECSNLLLQYGSFCTQLNRALTGIAVEQDKNTQEVFAQVKQIYKTPPIKDFGGFNFSQILPDPSKPSKRSFIEDLLFNKVTLADAGFIKQYGDCLGDISARDLICAQKFNGLTVLPPLLTDEMIAQYTSALLAGTITSGWTFGAGAALQIPFAMQMAYRFNGIGVTQNVLYENQKLIANQFNSAIGKIQDSLSSTASALGKLQDVVNQNAQALNTLVKQLSSNCGAISSVLNDILSRLDKVEAEVQIDRLITCRLQSLQTYVTQQLIRAAEIRASANLAATKMSECVLGQSKRVDFCGKGYHLMSFPQSAPHGVVFLHVTYVPAQEKNFTTAPAICHDGKAHFPREGVFVSNGTHWFVTQRNFYEPQIITTDNTFVSGNCDVVIGIVNNTVYDPLQPELDS

SEQ ID NO: 3405 - protein, 1147 aa, Artificial Sequence
  SARS-CoV-2/USA/NY-NYUMC7/2020__EPI_ISL_418192 spike protein (1-1147)(F970C_G999C)
MFVFLVLLPLVSSQCVNLTTRTQLPPAYTNSFTRGVYYPDKVFRSSVLHSTQDLFLPFFSNVTWFHAIHVSGTNGTKRFDNPVLPFNDGVYFASTEKSNIIRGWIFGTTLDSKTQSLLIVNNATNVVIKVCEFQFCNDPFLGVYHHKNNKSWMESEFRVYSSANNCTFEYVSQPFLMDLEGKQGNFKNLREFVFKNIDGYFKIYSKHTPINLVRDLPQGFSALEPLVDLPIGINITRFQTLLALHRSYLTPGDSSSGWTAGAAAYYVGYLQPRTFLLKYNENGTITDAVDCALDPLSETKCTLKSFTVEKGIYQTSNFRVQPTESIVRFPNITNLCPFGEVFNATRFASVYAWNRKRISNCVADYSVLYNSASFSTFKCYGVSPTKLNDLCFTNVYADSFVIRGDEVRQIAPGQTGKIADYNYKLPDDFTGCVIAWNSNNLDSKVGGNYNYLYRLFRKSNLKPFERDISTEIYQAGSTPCNGVEGFNCYFPLQSYGFQPTNGVGYQPYRVVVLSFELLHAPATVCGPKKSTNLVKNKCVNFNFNGLTGTGVLTESNKKFLPFQQFGRDIADTTDAVRDPQTLEILDITPCSFGGVSVITPGTNTSNQVAVLYQGVNCTEVPVAIHADQLTPTWRVYSTGSNVFQTRAGCLIGAEHVNNSYECDIPIGAGICASYQTQTNSPRRARSVASQSIIAYTMSLGAENSVAYSNNSIAIPTNFTISVTTEILPVSMTKTSVDCTMYICGDSTECSNLLLQYGSFCTQLNRALTGIAVEQDKNTQEVFAQVKQIYKTPPIKDFGGFNFSQILPDPSKPSKRSFIEDLLFNKVTLADAGFIKQYGDCLGDIAARDLICAQKFNGLTVLPPLLTDEMIAQYTSALLAGTITSGWTFGAGAALQIPFAMQMAYRFNGIGVTQNVLYENQKLIANQFNSAIGKIQDSLSSTASALGKLQDVVNQNAQALNTLVKQLSSNCGAISSVLNDILSRLDKVEAEVQIDRLITCRLQSLQTYVTQQLIRAAEIRASANLAATKMSECVLGQSKRVDFCGKGYHLMSFPQSAPHGVVFLHVTYVPAQEKNFTTAPAICHDGKAHFPREGVFVSNGTHWFVTQRNFYEPQIITTDNTFVSGNCDVVIGIVNNTVYDPLQPELDS

SEQ ID NO: 3406 - protein, 1147 aa, Artificial Sequence
  SARS-CoV-2/Iceland/189/2020__EPI_ISL_417709 spike protein (1-1147)(F970C_G999C)
MFVFLVLLPLVSSQCVNLTTRTQLPPAYTNSFTRGVYYPDKVFRSSVLHSTQDLFLPFFSNVTWFHAIHVSGTNGTKRFDNPVLPFNDGVYFASTEKSNIIRGWIFGTTLDSKTQSLLIVNNATNVVIKVCEFQFCNDPFLGVYYHKNNKSWMESEFRVYSSANNCTFEYVSQPFLMDLEGKQGNFKNLREFVFKNIDGYFKIYSKHTPINLVRDLPQGFSALEPLVDLPIGINITRFQTLLALHRSYLTPGDSSSGWTAGAAAYYVGYLQPRTFLLKYNENGTITDAVDCALDPLSETKCTLKSFTVEKGIYQTSNFRVQPTESIVRFPNITNLCPFGEVFNATRFASVYAWNRKRISNCVADYSVLYNSASFSTFKCYGVSPTKLNDLCFTNVYADSFVIRGDEVRQIAPGQTGKIADYNYKLPDDFTGCVIAWNSNNLDSKVGGNYNYLYRLFRKSNLKPFERDISTEIYQAGSTPCNGVEGFNCYFPLQSYGFQPTNGVGYQPYRVVVLSFELLHAPATVCGPKKSTNLVKNKCVNFNFNGLTGTGVLTESNKKFLPFQQFGRDIADTTDAVRDPQTLEILDITPCSFGGVSVITPGTNTSNQVAVLYQGVNCTEVPVAIHADQLTPTWRVYSTGSNVFQTRAGCLIGAEHVNNSYECDIPIGAGICASYQTQTNSPRRARSVASQSIIAYTMSLGAENSVAYSNNSIAIPTNFTISVTTEILPVSMTKTSVDCTMYICGDSTECSNLLLQYGSFCTQLNRALTGIAVEQDKNTQEVFAQVKQIYKTPPIKDFGGFNFSQILPDPSKPSKRSFIEDLLFNKVTLADAGFTKQYGDCLGDIAARDLICAQKFNGLTVLPPLLTDEMIAQYTSALLAGTITSGWTFGAGAALQIPFAMQMAYRFNGIGVTQNVLYENQKLIANQFNSAIGKIQDSLSSTASALGKLQDVVNQNAQALNTLVKQLSSNCGAISSVLNDILSRLDKVEAEVQIDRLITCRLQSLQTYVTQQLIRAAEIRASANLAATKMSECVLGQSKRVDFCGKGYHLMSFPQSAPHGVVFLHVTYVPAQEKNFTTAPAICHDGKAHFPREGVFVSNGTHWFVTQRNFYEPQIITTDNTFVSGNCDVVIGIVNNTVYDPLQPELDS

SEQ ID NO: 3407 - protein, 1147 aa, Artificial Sequence
  SARS-CoV-2/Australia/NSW56/2020__EPI_ISL_417408 spike protein (1-1147)(F970C_G999C)
MFVFLVLLPLVSSQCVNLTTRTQLPPAYTNSFTRGVYYPDKVFRSSVLHSTQDLFLPFFSNVTWFHAIHVSGTNGTKRFDNPVLPFNDGVYFASTEKSNIIRGWIFGTTLDSKTQSLLIVNNATNVVIKVCEFQFCNDPFLGVYYHKNNKSWMESEFRVYSSANNCTFEYVSQPFLMDLEGKQGNFKNLREFVFKNIDGYFKIYSKHTPINLVRDLPQGFSALEPLVDLPIGINITRFQTLLALHRSYLTPGDSSSGWTAGAAAYYVGYLQPRTFLLKYNENGTITDAVDCALDPLSETKCTLKSFTVEKGIYQTSNFRVQPTESIVRFPNITNLCPFGEVFNATRFASVYAWNRKRISNCVADYSVLYNSASFSTFKCYGVSPTKLNDLCFTNVYADSFVIRGDEVRQIAPGQTGKIADYNYKLPDDFTGCVIAWNSNNLDSKVGGNYNYLYRLFRKSNLKPFERDISTEIYQAGSTPCNGVEGFNCYFPLQSYGFQPTNGVGYQPYRVVVLSFELLHAPATVCGPKKSTNLVKNKCVNFNFNGLTGTGVLTESNKKFLPFQQFGRDIADTTDAVRDPQTLEILDITPCSFGGVSVITPGTNTSNQVAVLYQDVNCTEVPVAIHADQLTPTWRVYSTGSNVFQTRAGCLIGAEHVNNSYECDIPIGAGICASYQTQTNSPRRARSVASQSIIAYTMSLGAENSVAYSNNSIAIPTNFTISVTTEILPVSMTKTSVDCTMYICGDSTECSNLLLQYGSFCTQLNRALTGIAVEQDKNTQEVFAQVKQIYKTPPIKDFGGFNFSQILPDSSKPSKRSFIEDLLFNKVTLADAGFIKQYGDCLGDIAARDLICAQKFNGLTVLPPLLTDEMIAQYTSALLAGTITSGWTFGAGAALQIPFAMQMAYRFNGIGVTQNVLYENQKLIANQFNSAIGKIQDSLSSTASALGKLQDVVNQNAQALNTLVKQLSSNCGAISSVLNDILSRLDKVEAEVQIDRLITCRLQSLQTYVTQQLIRAAEIRASANLAATKMSECVLGQSKRVDFCGKGYHLMSFPQSAPHGVVFLHVTYVPAQEKNFTTAPAICHDGKAHFPREGVFVSNGTHWFVTQRNFYEPQIITTDNTFVSGNCDVVIGIVNNTVYDPLQPELDS

SEQ ID NO: 3408 - protein, 1147 aa, Artificial Sequence
  SARS-CoV-2/Iceland/280/2020__EPI_ISL_417608 spike protein (1-1147)(F970C_G999C)
MFVFLVLLPLVSSQCVNLTTRTQLPPAYTNSFTRGVYYPDKVFRSSVLHSTQDLFLPFFSNVTWFHAIHVSGTNGTKRFDNPVLPFNDGVYFASTEKSNIIRGWIFGTTLDSKTQSLLIVNNATNVVIKVCEFQFCNDPFLGVYYHKNNKSWMESEFRVYSSANNCTFEYVSQPFLMDLEGKQGNFKNLREFVFKNIDGYFKIYSKHTPINLVRDLPQGFSALEPLVDLPIGINITRFQTLLALHRSYLTPGDSSSGWTAGAAAYYVGYLQPRTFLLKYNENGTITDAVDCALDPLSETKCTLKSFTVEKGIYQTSNFRVQPTESIVRFPNITNLCPFGEVFNATRFASVYAWNRKRISNCVADYSVLYNSASFSTFKCYGVSPTKLNDLCFTNVYADSFVIRGDEVRQIAPGQTGKIADYNYKLPDDFTGCVIAWNSNNLDSKVGGNYNYLYRLFRKSNLKPFERDISTEIYQAGSTPCNGVEGFNCYFPLQSYGFQPTNGVGYQPYRVVVLSFELLHAPATVCGPKKSTNLVKNKCVNFNFNGLTGTGVLTESNKKFLPFQQFGRDIADTTDAVRDPQTLEILDITPCSFGGVSVITPGTNTSNQVAVLYQGVNCTEVPVAIHADQLTPTWRVYSTGSNVFQTRAGCLIGAEHVNNSYECDIPIGAGICASYHTQTNSPRRARSVASQSIIAYTMSLGAENSVAYSNNSIAIPTNFTISVTTEILPVSMTKTSVDCTMYICGDSTECSNLLLQYGSFCTQLNRALTGIAVEQDKNTQEVFAQVKQIYKTPPIKDFGGFNFSQILPDPSKPSKRSFIEDLLFNKVTLADAGFIKQYGDCLGDIAARDLICAQKFNGLTVLPPLLTDEMIAQYTSALLAGTITSGWTFGAGAALQIPFAMQMAYRFNGIGVTQNVLYENQKLIANQFNSAIGKIQDSLSSTASALGKLQDVVNQNAQALNTLVKQLSSNCGAISSVLNDILSRLDKVEAEVQIDRLITCRLQSLQTYVTQQLIRAAEIRASANLAATKMSECVLGQSKRVDFCGKGYHLMSFPQSAPHGVVFLHVTYVPAQEKNFTTAPAICHDGKAHFPREGVFVSNGTHWFVTQRNFYEPQIITTDNTFVSGNCDVVIGIVNNTVYDPLQPELDS

SEQ ID NO: 3409 - protein, 1147 aa, Artificial Sequence; identical to SEQ ID NO: 3364
  SARS-CoV-2/Iceland/247/2020__EPI_ISL_417575 spike protein (1-1147)(F970C_G999C)

SEQ ID NO: 3410 - protein, 1147 aa, Artificial Sequence
  SARS-CoV-2/Iceland/238/2020__EPI_ISL_417566 spike protein (1-1147)(F970C_G999C)
MFVFLVLLPLVSSQCVNLTTRTQLPPAYTNSFTRGVYYPDKVFRSSVLHSTQDLFLPFFSNVTWFHAIHVSGTNGTKRFDNPVLPFNDGVYFASTEKSNIIRGWIFGTTLDSKTQSLLIVNNATNVVIKVCEFQFCNDPFLGVYYHKNNKSWMESEFRVYSSANNCTFEYVSQPFLMDLEGKQGNFKNLREFVFKNIDGYFKIYSKHTPINLVRDLPQGFSALEPLVDLPIGINITRFQTLLALHRSYLTPGDSSSGWTAGAAAYYVGYLQPRTFLLKYNENGTITDAVDCALDPLSETKCTLKSFTVEKGIYQTSNFRVQPTESIVRFPNITNLCPFGEVFNATRFASVYAWNRKRISNCVADYSVLYNSASFSTFKCYGVSPTKLNDLCFTNVYADSFVIRGDEVRQIAPGQTGKIADYNYKLPDDFTGCVIAWNSNNLDSKVGGNYNYLYRLFRKSNLKPFERDISTEIYQAGSTPCNGVEGFNCYFPLQSYGFQPTNGVGYQPYRVVVLSFELLHAPATVCGPKKSTNLVKNKCVNFNFNGLTGTGVLTESNKKFLPFQQFGRDIADTTDAVRDPQTLEILDITPCSFGGVSVITPGTNTSNQVAVLYQGVNCTEVPVAIHADQLTPTWRVYSTGSNVFQTRAGCLIGAEHVNNSYECDIPIGAGICASYQTQTNSPRRARSVASQSIIAYTMSLGAENSVAYSNNSIAIPTNFTISVTTEILPVSMTKTSVDCTMYICGDSTECSNLLLQYGSFCTQLNRALTGIAVEQDKNTQEVFAQVKQIYKTPPIKDFGGFNFSQILPDPSKPSKRSFIEDLLFNKVTLADVGFIKQYGDCLGDIAARDLICAQKFNGLTVLPPLLTDEMIAQYTSALLAGTITSGWTFGAGAALQIPFAMQMAYRFNGIGVTQNVLYENQKLIANQFNSAIGKIQDSLSSTASALGKLQDVVNQNAQALNTLVKQLSSNCGAISSVLNDILSRLDKVEAEVQIDRLITCRLQSLQTYVTQQLIRAAEIRASANLAATKMSECVLGQSKRVDFCGKGYHLMSFPQSAPHGVVFLHVTYVPAQEKNFTTAPAICHDGKAHFPREGVFVSNGTHWFVTQRNFYEPQIITTDNTFVSGNCDVVIGIVNNTVYDPLQPELDS

SEQ ID NO: 3411 - protein, 1147 aa, Artificial Sequence
  SARS-CoV-2/Greece/16/2020__EPI_ISL_418265 spike protein (1-1147)(F970C_G999C)
MFVFLVLLPLVSSQCVNLTTRTQLPPAYTNSFTRGVYYPDKVFRSSVLHSTQDLFLPFFSNVTWFHAIHVSGTNGTKRFDNPVLPFNDGVYFASTEKSNIIRGWIFGTTLDSKTQSLLIVNNATNVVIKVCEFQFCNDPFLGVYYHKNNKSWMESEFRVYSSANNCTFEYVSQPFLMDLEGKQGNFKNLREFVFKNVDGYFKIYSKHTPINLVRDLPQGFSALEPLVDLPIGINITRFQTLLALHRSYLTPGDSSSGWTAGAAAYYVGYLQPRTFLLKYNENGTITDAVDCALDPLSETKCTLKSFTVEKGIYQTSNFRVQPTESIVRFPNITNLCPFGEVFNATRFASVYAWNRKRISNCVADYSVLYNSASFSTFKCYGVSPTKLNDLCFTNVYADSFVIRGDEVRQIAPGQTGKIADYNYKLPDDFTGCVIAWNSNNLDSKVGGNYNYLYRLFRKSNLKPFERDISTEIYQAGSTPCNGVEGFNCYFPLQSYGFQPTNGVGYQPYRVVVLSFELLHAPATVCGPKKSTNLVKNKCVNFNFNGLTGTGVLTESNKKFLPFQQFGRDIADTTDAVRDPQTLEILDITPCSFGGVSVITPGTNTSNQVAVLYQDVNCTEVPVAIHADQLTPTWRVYSTGSNVFQTRAGCLIGAEHVNNSYECDIPIGAGICASYQTQTNSPRRARSVASQSIIAYTMSLGAENSVAYSNNSIAIPTNFTISVTTEILPVSMTKTSVDCTMYICGDSTECSNLLLQYGSFCTQLNRALTGIAVEQDKNTQEVFAQVKQIYKTPPIKDFGGFNFSQILPDPSKPSKRSFIEDLLFNKVTLADAGFIKQYGDCLGDIAARDLICAQKFNGLTVLPPLLTDEMIAQYTSALLAGTITSGWTFGAGAALQIPFAMQMAYRFNGIGVTQNVLYENQKLIANQFNSAIGKIQDSLSSTASALGKLQDVVNQNAQALNTLVKQLSSNCGAISSVLNDILSRLDKVEAEVQIDRLITCRLQSLQTYVTQQLIRAAEIRASANLAATKMSECVLGQSKRVDFCGKGYHLMSFPQSAPHGVVFLHVTYVPAQEKNFTTAPAICHDGKAHFPREGVFVSNGTHWFVTQRNFYEPQIITTDNTFVSGNCDVVIGIVNNTVYDPLQPELDS

SEQ ID NO: 3412 - protein, 1147 aa, Artificial Sequence
  SARS-CoV-2/Iceland/319/2020__EPI_ISL_417648 spike protein (1-1147)(F970C_G999C)
MFVFLVLLPLVSSQCVNLTTRTQLPPAYTNSFTRGVYYPDKVFRSSVLHSTQDLFLPFFSNVTWFHAIHVSGTNGTKRFDNPVLPFNDGVYFASTEKSNIIRGWIFGTTLDSKTQSLLIVNNATNVVIKVCEFQFCNDPFLGVYYHKNNKSWMESEFRVYSSANNCTFEYVSQPFLIDLEGKQGNFKNLREFVFKNIDGYFKIYSKHTPINLVRDLPQGFSALEPLVDLPIGINITRFQTLLALHRSYLTPGDSSSGWTAGAAAYYVGYLQPRTFLLKYNENGTITDAVDCALDPLSETKCTLKSFTVEKGIYQTSNFRVQPTESIVRFPNITNLCPFGEVFNATRFASVYAWNRKRISNCVADYSVLYNSASFSTFKCYGVSPTKLNDLCFTNVYADSFVIRGDEVRQIAPGQTGKIADYNYKLPDDFTGCVIAWNSNNLDSKVGGNYNYLYRLFRKSNLKPFERDISTEIYQAGSTPCNGVEGFNCYFPLQSYGFQPTNGVGYQPYRVVVLSFELLHAPATVCGPKKSTNLVKNKCVNFNFNGLTGTGVLTESNKKFLPFQQFGRDIADTTDAVRDPQTLEILDITPCSFGGVSVITPGTNTSNQVAVLYQGVNCTEVPVAIHADQLTPTWRVYSTGSNVFQTRAGCLIGAEHVNNSYECDIPIGAGICASYQTQTNSPRRARSVASQSIIAYTMSLGAENSVAYSNNSIAIPTNFTISVTTEILPVSMTKTSVDCTMYICGDSTECSNLLLQYGSFCTQLNRALTGIAVEQDKNTQEVFAQVKQIYKTPPIKDFGGFNFSQILPDPSKPSKRSFIEDLLFNKVTLADAGFIKQYGDCLGDIAARDLICAQKFNGLTVLPPLLTDEMIAQYTSALLAGTITSGWTFGAGAALQIPFAMQMAYRFNGIGVTQNVLYENQKLIANQFNSAIGKIQDSLSSTASALGKLQDVVNQNAQALNTLVKQLSSNCGAISSVLNDILSRLDKVEAEVQIDRLITCRLQSLQTYVTQQLIRAAEIRASANLAATKMSECVLGQSKRVDFCGKGYHLMSFPQSAPHGVVFLHVTYVPAQEKNFTTAPAICHDGKAHFPREGVFVSNGTHWFVTQRNFYEPQIITTDNTFVSGNCDVVIGIVNNTVYDPLQPELDS

SEQ ID NO: 3413 - protein, 1147 aa, Artificial Sequence
  SARS-CoV-2/Congo/94/2020__EPI_ISL_417947 spike protein (1-1147)(F970C_G999C)
MFVFLVLLPLVSSQCVNLTTRTQLPPAYTNSFTRGVYYPDKVFRSSVLHSTQDLFLPFFSNVTWFHAIHVSGTNGTKRFDNPVLPFNDGVYFASTEKSNIIRGWIFGTTLDSKTQSLLIVNNATNVVIKVCEFQFCNDPFLGVYYHKNNKSWMESEFRVYSSANNCTFEYVSQPFLMDLEGKQGNFKNLREFVFKNIDGYFKIYSKHTPINLVRDLPQGFSALEPLVDLPIGINITRFQTLLALHRSYLTPGDSSSGWTAGAAAYYVGYLQPRTFLLKYNENGTITDAVDCALDPLSETKCTLKSFTVEKGIYQTSNFRVQPTESIVRFPNITNLCPFGEVFNATRFASVYAWNRKRISNCVADYSVLYNSASFSTFKCYGVSPTKLNDLCFTNVYADSFVIRGDEVRQIAPGQTGKIADYNYKLPDDFTGCVIAWNSNNLDSKVGGNYNYLYRLFRKSNLKPFERDISTEIYQAGSTPCNGVEGFNCYFPLQSYGFQPTNGVGYQPYRVVVLSFELLHAPATVCGPKKSTNLVKNKCVNFNFNGLTGTGVLTESNKKFLPFQQFGRDIADTTDAVRDPQTLEILDITPCSFGGVSVITPGTNTSNQVAVLYQGVNCTEVPVAIHADQLTPTWRVYSTGSNVFQTRAGCLIGAEHVNNSYECDIPIGAGICASYQTQTNSPRRARSVASQSIIAYTMSLGAENSVAYSNNSIAIPTNFTISVTTEILPVSMTKTSVDCTMYICGDSTECSNLLLQYGSFCTQLNRALTGIAVEQDKNTQEVFAQVKQIYKTPPIKDFGGFNFSQILPDPSKPSKRSFIEDILFNKVTLADAGFIKQYGDCLGDIAARDLICAQKFNGLTVLPPLLTDEMIAQYTSALLAGTITSGWTFGAGAALQIPFAMQMAYRFNGIGVTQNVLYENQKLIANQFNSAIGKIQDSLSSTASALGKLQDVVNQNAQALNTLVKQLSSNCGAISSVLNDILSRLDKVEAEVQIDRLITCRLQSLQTYVTQQLIRAAEIRASANLAATKMSECVLGQSKRVDFCGKGYHLMSFPQSAPHGVVFLHVTYVPAQEKNFTTAPAICHDGKAHFPREGVFVSNGTHWFVTQRNFYEPQIITTDNTFVSGNCDVVIGIVNNTVYDPLQPELDS

SEQ ID NO: 3414 - protein, 1147 aa, Artificial Sequence
  SARS-CoV-2/Congo/158/2020__EPI_ISL_417950 spike protein (1-1147)(F970C_G999C)
MFVFLVLLPLVSSQCVNLTTRTQLPPAYTNSFTRGVYYPDKVFRSSVLHSTQDLFLPFFSNVTWFHAIHVSGTNGTKRFDNPVLPFNDGVYFASTEKSNIIRGWIFGTTLDSKTQSLLIVNNATNVVIKVCEFQFCNDPFLGVYYHKNNKSWMESEFRVYSSANNCTFEYVSQPFLMDLEGKQGNFKNLREFVFKNIDGYFKIYSKHTPINLVRDLPQGFSALEPLVDLPIGINITRFQTLLALHRSYLTPGDSSSGWTAGAAAYYVGYLQPRTFLLKYNENGTITDAVDCALDPLSETKCTLKSFTVEKGIYQTSNFRVQPTESIVRFPNITNLCPFGEVFNATRFASVYAWNRKRISNCVADYSVLYNSASFSTFKCYGVSPTKLNDLCFTNVYADSFVIRGDEVRQIAPGQTGKIADYNYKLPDDFTGCVIAWNSNNLDSKVGGNYNYLYRLFRKSNLKPFERDISTEIYQAGSTPCNGVEGFNCYFPLQSYGFQPTNGVGYQPYRVVVLSFELLHAPATVCGPKKSTNLVKNKCVNFNFNGLTGTGVLTESNKKFLPFQQFGRDIADTTDAVRDPQTLEILDITPCSFGGVSVITPGTNTSNQVAVLYQDVNCTEVPVAIHADQLTPTWRVYSTGSNVFQTRAGCLIGAEHVNNSYECDIPIGAGICASYQTQTNSPRRARSVASQSIIAYTMSLGAENSVAYSNNSIAIPTNFTISVTTEILPVSMTKTSVDCTMYICGDSTECSNLLLQYGSFCTQLNRALTGIAVEQDKNTQEVFAQVKQIYKTPPIKDFGGFNFSQILPDPSKPSKRSFIEDLLFNKVTLADAGFIKQYGDCLGDIAARDLICAQKFNGLTVLPPLLTDEMIAQYTSALLAGTITSGWTFGAGAALQIPFAMQMAYRFNGIGVTQNVLYENQKLIANQFNSAIGKIQDSLSSTASALGKLQDVVNQNAQALNTLVKQLSSNCGAISSVLNDILSRLDKVEAEVQIDRLITCRLQSLQTYVTQQLIRAAEIRASANLAATKMSECVLGQSKRVDFCGKGYHLMSFPQSAPHGVVFLHVTYVPAQEKNFTTAPAICHDGKAHFPREGVFVSNGTHWFVTQRNFYEPQIITTDNTFLSGNCDVVIGIVNNTVYDPLQPELDS

SEQ ID NO: 3415 - protein, 1147 aa, Artificial Sequence
  SARS-CoV-2/USA/UT-00034/2020__EPI_ISL_417977 spike protein (1-1147)(F970C_G999C)
MFVFLVLLPLVSSQCVNLTTRTQLPPAYTNSFTRGVYYPDKVFRSSVLHSTQDLFLPFFSNVTWFHAIHVSGTNGTKRFDNPVLPFNDGVYFASTEKSNIIRGWIFGTTLDSKTQSLLIVNNATNVVIKVCEFQFCNDPFLGVYYYKNNKSWMESEFRVYSSANNCTFEYVSQPFLMDLEGKQGNFKNLREFVFKNIDGYFKIYSKHTPINLVRDLPQGFSALEPLVDLPIGINITRFQTLLALHRSYLTPGDSSSGWTAGAAAYYVGYLQPRTFLLKYNENGTITDAVDCALDPLSETKCTLKSFTVEKGIYQTSNFRVQPTESIVRFPNITNLCPFGEVFNATRFASVYAWNRKRISNCVADYSVLYNSASFSTFKCYGVSPTKLNDLCFTNVYADSFVIRGDEVRQIAPGQTGKIADYNYKLPDDFTGCVIAWNSNNLDSKVGGNYNYLYRLFRKSNLKPFERDISTEIYQAGSTPCNGVEGFNCYFPLQSYGFQPTNGVGYQPYRVVVLSFELLHAPATVCGPKKSTNLVKNKCVNFNFNGLTGTGVLTESNKKFLPFQQFGRDIADTTDAVRDPQTLEILDITPCSFGGVSVITPGTNTSNQVAVLYQGVNCTEVPVAIHADQLTPTWRVYSTGSNVFQTRAGCLIGAEHVNNSYECDIPIGAGICASYQTQTNSPRRARSVASQSIIAYTMSLGAENSVAYSNNSIAIPTNFTISVTTEILPVSMTKTSVDCTMYICGDSTECSNLLLQYGSFCTQLNRALTGIAVEQDKNTQEVFAQVKQIYKTPPIKDFGGFNFSQILPDPSKPSKRSFIEDLLFNKVTLADAGFIKQYGDCLGDIAARDLICAQKFNGLTVLPPLLTDEMIAQYTSALLAGTITSGWTFGAGAALQIPFAMQMAYRFNGIGVTQNVLYENQKLIANQFNSAIGKIQDSLSSTASALGKLQDVVNQNAQALNTLVKQLSSNCGAISSVLNDILSRLDKVEAEVQIDRLITCRLQSLQTYVTQQLIRAAEIRASANLAATKMSECVLGQSKRVDFCGKGYHLMSFPQSAPHGVVFLHVTYVPAQEKNFTTAPAICHDGKAHFPREGVFVSNGTHWFVTQRNFYEPQIITTDNTFVSGNCDVVIGIVNNTVYDPLQPELDS

SEQ ID NO: 3416 - protein, 1147 aa, Artificial Sequence
  SARS-CoV-2/USA/UT-00033/2020__EPI_ISL_417976 spike protein (1-1147)(F970C_G999C)
MFVFLVLLPLVSSQCVNLTTRTQLPPAYTNSFTRGVYYPDKVFRSSVLHSTQDLFLPFFSNVTWFHAIHVSGTNGTKRFDNPVLPFNDGVYFASTEKSNIIRGWIFGTTLDSKTQSLLIVNNATNVVIKVCEFQFCNDPFLGVYYHKNNKSWMESEFRVYSSANNCTFEYVSQPFLMDLEGKQGNFKNLREFVFKNIDGYFKIYSKHTPINLVRDLPQGFSALEPLVDLPIGINITRFQTLLALHRSYLTPGDSSSGLTAGAAAYYVGYLQPRTFLLKYNENGTITDAVDCALDPLSETKCTLKSFTVEKGIYQTSNFRVQPTESIVRFPNITNLCPFGEVFNATRFASVYAWNRKRISNCVADYSVLYNSASFSTFKCYGVSPTKLNDLCFTNVYADSFVIRGDEVRQIAPGQTGKIADYNYKLPDDFTGCVIAWNSNNLDSKVGGNYNYLYRLFRKSNLKPFERDISTEIYQAGSTPCNGVEGFNCYFPLQSYGFQPTNGVGYQPYRVVVLSFELLHAPATVCGPKKSTNLVKNKCVNFNFNGLTGTGVLTESNKKFLPFQQFGRDIADTTDAVRDPQTLEILDITPCSFGGVSVITPGTNTSNQVAVLYQGVNCTEVPVAIHADQLTPTWRVYSTGSNVFQTRAGCLIGAEHVNNSYECDIPIGAGICASYQTQTNSPRRARSVASQSIIAYTMSLGAENSVAYSNNSIAIPTNFTISVTTEILPVSMTKTSVDCTMYICGDSTECSNLLLQYGSFCTQLNRALTGIAVEQDKNTQEVFAQVKQIYKTPPIKDFGGFNFSQILPDPSKPSKRSFIEDLLFNKVTLADAGFIKQYGDCLGDIAARDLICAQKFNGLTVLPPLLTDEMIAQYTSALLAGTITSGWTFGAGAALQIPFAMQMAYRFNGIGVTQNVLYENQKLIANQFNSAIGKIQDSLSSTASALGKLQDVVNQNAQALNTLVKQLSSNCGAISSVLNDILSRLDKVEAEVQIDRLITCRLQSLQTYVTQQLIRAAEIRASANLAATKMSECVLGQSKRVDFCGKGYHLMSFPQSAPHGVVFLHVTYVPAQEKNFTTAPAICHDGKAHFPREGVFVSNGTHWFVTQRNFYEPQIITTDNTFVSGNCDVVIGIVNNTVYDPLQPELDS

SEQ ID NO: 3417 - protein, 1147 aa, Artificial Sequence
  SARS-CoV-2/USA/WI-13/2020__EPI_ISL_417516 spike protein (1-1147)(F970C_G999C)
MFVFLVLLPLVSSQCVNLTTRTQLPPAYTNSFTRGVYYPDKVFRSSVLHSTQDLFLPFFSNVTWFHAIHVSGTNGTKRFDNPVLPFNDGVYFASTEKSNIIRGWIFGTTLDSKTQSLLIVNNATNVVIKVCEFQFCNDPFLGVYYHKNNKSWMESEFRVYSSANNCTFEYVSQPFLMDLEGKQGNFKNLREFVFKNIDGYFKIYSKHTPINLVRDLPQGFSALEPLVDLPIGINITRFQTLLALHRSYLTPGDSSSGWTAGAAAYYVGYLQPRTFLLKYNENGTITDAVDCALDPLSETKCTLKSFTVEKGIYQTSNFRVLPTESIVRFPNITNLCPFGEVFNATRFASVYAWNRKRISNCVADYSVLYNSASFSTFKCYGVSPTKLNDLCFTNVYADSFVIRGDEVRQIAPGQTGKIADYNYKLPDDFTGCVIAWNSNNLDSKVGGNYNYLYRLFRKSNLKPFERDISTEIYQAGSTPCNGVEGFNCYFPLQSYGFQPTNGVGYQPYRVVVLSFELLHAPATVCGPKKSTNLVKNKCVNFNFNGLTGTGVLTESNKKFLPFQQFGRDIADTTDAVRDPQTLEILDITPCSFGGVSVITPGTNTSNQVAVLYQGVNCTEVPVAIHADQLTPTWRVYSTGSNVFQTRAGCLIGAEHVNNSYECDIPIGAGICASYQTQTNSPRRARSVASQSIIAYTMSLGAENSVAYSNNSIAIPTNFTISVTTEILPVSMTKTSVDCTMYICGDSTECSNLLLQYGSFCTQLNRALTGIAVEQDKNTQEVFAQVKQIYKTPPIKDFGGFNFSQILPDPSKPSKRSFIEDLLFNKVTLADAGFIKQYGDCLGDIAARDLICAQKFNGLTVLPPLLTDEMIAQYTSALLAGTITSGWTFGAGAALQIPFAMQMAYRFNGIGVTQNVLYENQKLIANQFNSAIGKIQDSLSSTASALGKLQDVVNQNAQALNTLVKQLSSNCGAISSVLNDILSRLDKVEAEVQIDRLITCRLQSLQTYVTQQLIRAAEIRASANLAATKMSECVLGQSKRVDFCGKGYHLMSFPQSAPHGVVFLHVTYVPAQEKNFTTAPAICHDGKAHFPREGVFVSNGTHWFVTQRNFYEPQIITTDNTFVSGNCDVVIGIVNNTVYDPLQPELDS

SEQ ID NO: 3418 - protein, 1146 aa, Artificial Sequence
  SARS-CoV-2/India/1-27/2020__EPI_ISL_413522 spike protein (1-1146)(F969C_G998C)
MFVFLVLLPLVSSQCVNLTTRTQLPPAYTNSFTRGVYYPDKVFRSSVLHSTQDLFLPFFSNVTWFHAIHVSGTNGTKRFDNPVLPFNDGVYFASTEKSNIIRGWIFGTTLDSKTQSLLIVNNATNVVIKVCEFQFCNDPFLGVYHKNNKSWMESEFRVYSSANNCTFEYVSQPFLMDLEGKQGNFKNLREFVFKNIDGYFKIYSKHTPINLVRDLPQGFSALEPLVDLPIGINITRFQTLLALHRSYLTPGDSSSGWTAGAAAYYVGYLQPRTFLLKYNENGTITDAVDCALDPLSETKCTLKSFTVEKGIYQTSNFRVQPTESIVRFPNITNLCPFGEVFNATRFASVYAWNRKRISNCVADYSVLYNSASFSTFKCYGVSPTKLNDLCFTNVYADSFVIRGDEVIQIAPGQTGKIADYNYKLPDDFTGCVIAWNSNNLDSKVGGNYNYLYRLFRKSNLKPFERDISTEIYQAGSTPCNGVEGFNCYFPLQSYGFQPTNGVGYQPYRVVVLSFELLHAPATVCGPKKSTNLVKNKCVNFNFNGLTGTGVLTESNKKFLPFQQFGRDIADTTDAVRDPQTLEILDITPCSFGGVSVITPGTNTSNQVAVLYQDVNCTEVPVAIHADQLTPTWRVYSTGSNVFQTRAGCLIGAEHVNNSYECDIPIGAGICASYQTQTNSPRRARSVASQSIIAYTMSLGAENSVAYSNNSIAIPTNFTISVTTEILPVSMTKTSVDCTMYICGDSTECSNLLLQYGSFCTQLNRALTGIAVEQDKNTQEVFAQVKQIYKTPPIKDFGGFNFSQILPDPSKPSKRSFIEDLLFNKVTLADAGFIKQYGDCLGDIAARDLICAQKFNGLTVLPPLLTDEMIAQYTSALLAGTITSGWTFGAGAALQIPFAMQMAYRFNGIGVTQNVLYENQKLIANQFNSAIGKIQDSLSSTASALGKLQDVVNQNAQALNTLVKQLSSNCGAISSVLNDILSRLDKVEAEVQIDRLITCRLQSLQTYVTQQLIRAAEIRASANLAATKMSECVLGQSKRVDFCGKGYHLMSFPQSAPHGVVFLHVTYVPAQEKNFTTAPAICHDGKAHFPREGVFVSNGTHWFVTQRNFYEPQIITTDNTFVSGNCDVVIGIVNNTVYDPLQPELDS

SEQ ID NO: 3419 - protein, 1141 aa, Artificial Sequence
  SARS-CoV-2/pangolin/Guangxi/P4L/2017__EPI_ISL_410538 spike protein (1-1141)(F964C_G993C)
MFVFLFVLPLVSSQCVNLTTRTGIPPGYTNSSTRGVYYPDKVFRSSILHLTQDLFLPFFSNVTWFNTINYQGGFKKFDNPVLPFNDGVYFASTEKSNIIRGWIFGTTLDARTQSLLIVNNATNVVIKVCEFQFCTDPFLGVYYHNNNKTWVENEFRVYSSANNCTFEYISQPFLMDLEGKQGNFKNLREFVFKNVDGYFKIYSKHTPIDLVRDLPRGFAALEPLVDLPIGINITRFQTLLALHRSYLTPGNLESGWTTGAAAYYVGYLQQRTFLLSYNQNGTITDAVDCSLDPLSETKCTLKSLTVEKGIYQTSNFRVQPTISIVRFPNITNLCPFGEVFNASKFASVYAWNRKRISNCVADYSVLYNSTSFSTFKCYGVSPTKLNDLCFTNVYADSFVVKGDEVRQIAPGQTGVIADYNYKLPDDFTGCVIAWNSVKQDALTGGNYGYLYRLFRKSKLKPFERDISTEIYQAGSTPCNGQVGLNCYYPLERYGFHPTTGVNYQPFRVVVLSFELLNGPATVCGPKLSTTLVKDKCVNFNFNGLTGTGVLTTSKKQFLPFQQFGRDISDTTDAVRDPQTLEILDITPCSFGGVSVITPGTNTSNQVAVLYQDVNCTEVPMAIHAEQLTPAWRVYSAGANVFQTRAGCLVGAEHVNNSYECDIPVGAGICASYHSMSSLRSVNQRSIIAYTMSLGAENSVAYSNNSIAIPTNFTISVTTEILPVSMTKTSVDCTMYICGDSIECSNLLLQYGSFCTQLNRALTGIAVEQDKNTQEVFAQVKQIYKTPPIKDFGGFNFSQILPDPSKPSKRSFIEDLLFNKVTLADAGFIKQYGDCLGDIAARDLICAQKFNGLTVLPPLLTDEMIAQYTSALLAGTITSGWTFGAGAALQIPFAMQMAYRFNGIGVTQNVLYENQKLIANQFNSAIGKIQDSLSSTASALGKLQDVVNQNAQALNTLVKQLSSNCGAISSVLNDILSRLDKVEAEVQIDRLITCRLQSLQTYVTQQLIRAAEIRASANLAATKMSECVLGQSKRVDFCGKGYHLMSFPQSAPHGVVFLHVTYVPAQEKNFTTAPAICHEGKAHFPREGVFVSNGTHWFITQRNFYEPQIITTDNTFVSGSCDVVIGIVNNTVYDPLQPELDS

SEQ ID NO: 3420 - protein, 1141 aa, Artificial Sequence
  SARS-CoV-2/pangolin/Guangxi/P5L/2017__EPI_ISL_410540 spike protein (1-1141)(F964C_G993C)
MFVFLFVLPLVSSQCVNLTTRTGIPPGYTNSSTRGVYYPDKVFRSSILHLTQDLFLPFFSNVTWFNTINYQGGFKKFDNPVLPFNDGVYFASTEKSNIIRGWIFGTTLDARTQSLLIVNNATNVVIKVCEFQFCTDPFLGVYYHNNNKTWVENEFRVYSSANNCTFEYISQPFLMDLEGKQGNFKNLREFVFKNVDGYFKIYSKHTPIDLVRDLPRGFAALEPLVDLPIGINITRFQTLLALHRSYLTPGKLESGWTTGAAAYYVGYLQQRTFLLSYNQNGTITDAVDCSLDPLSETKCTLKSLTVEKGIYQTSNFRVQPTISIVRFPNITNLCPFGEVFNASKFASVYAWNRKRISNCVADYSVLYNSTSFSTFKCYGVSPTKLNDLCFTNVYADSFVVKGDEVRQIAPGQTGVIADYNYKLPDDFTGCVIAWNSVKQDALTGGNYGYLYRLFRKSKLKPFERDISTEIYQAGSTPCNGQVGLNCYYPLERYGFHPTTGVNYQPFRVVVLSFELLNGPATVCGPKLSTTLVKDKCVNFNFNGLTGTGVLTTSKKQFLPFQQFGRDISDTTDAVRDPQTLEILDITPCSFGGVSVITPGTNTSNQVAVLYQDVNCTEVPMAIHAEQLTPAWRVYSAGANVFQTRAGCLVGAEHVNNSYECDIPVGAGICASYHSMSSFRSVNQRSIIAYTMSLGAENSVAYSNNSIAIPTNFTISVTTEILPVSMTKTSVDCTMYICGDSIECSNLLLQYGSFCTQLNRALTGIAVEQDKNTQEVFAQVKQIYKTPPIKDFGGFNFSQILPDPSKPSKRSFIEDLLFNKVTLADAGFIKQYGDCLGDIAARDLICAQKFNGLTVLPPLLTDEMIAQYTSALLAGTITSGWTFGAGAALQIPFAMQMAYRFNGIGVTQNVLYENQKLIANQFNSAIGKIQDSLSSTASALGKLQDVVNQNAQALNTLVKQLSSNCGAISSVLNDILSRLDKVEAEVQIDRLITCRLQSLQTYVTQQLIRAAEIRASANLAATKMSECVLGQSKRVDFCGKGYHLMSFPQSAPHGVVFLHVTYVPAQEKNFTTAPAICHEGKAHFPREGVFVSNGTHWFITQRNFYEPQIITTDNTFVSGSCDVVIGIVNNTVYDPLQPELDS

SEQ ID NO: 3421 - protein, 1141 aa, Artificial Sequence
  SARS-CoV-2/pangolin/Guangxi/P5E/2017__EPI_ISL_410541 spike protein (1-1141)(F964C_G993C)
MFVFLFVLPLVSSQCVNLTTRTGIPPGYTNSSTRGVYYPDKVFRSSILHLTQDLFLPFFSNVTWFNTITYQGGSKKFDNPVLPFNDGVYFASTEKSNIIRGWIFGTTLDARTQSLLIVNNATNVVIKVCEFQFCTDPFLGVYYHNNNKTWVENEFRVYSSANNCTFEYISQPFLMDLEGKQGNFKNLREFVFKNVDGYFKIYSKHTPIDLVRDLPRGFAALEPLVDLPIGINITRFQTLLALHRSYLTPGKLESGWTTGAAAYYVGYLQQRTFLLSYNQNGTITDAVDCSLDPLSETKCTLKSLTVEKGIYQTSNFRVQPTISIVRFPNITNLCPFGEVFNASKFASVYAWNRKRISNCVADYSVLYNSTSFSTFKCYGVSPTKLNDLCFTNVYADSFVVKGDEVRQIAPGQTGVIADYNYKLPDDFTGCVIAWNSVKQDALTGDNYGYLYRLFRKSKLKPFERDISTEIYQAGSTPCNGQVGLNCYYPLERYGFHPTTGVNYQPFRVVVLSFELLNGPATVCGPKLSTTLVKDKCVNFNFNGLTGTGVLTTSKKQFLPFQQFGRDISDTTDAVRDPQTLEILDITPCSFGGVSVITPGTNTSNQVAVLYQDVNCTEVPMAIHAEQLTPAWRVYSAGANVFQTRAGCLVGAEHVNNSYECDIPVGAGICASYHSMSSFRSVNQRSIIAYTMSLGAENSVAYSNNSIAIPTNFTISVTTEILPVSMTKTSVDCTMYICGDSIECSNLLLQYGSFCTQLNRALTGIAVEQDKNTQEVFAQVKQIYKTPPIKDFGGFNFSQILPDPSKPSKRSFIEDLLFNKVTLADAGFIKQYGDCLGDIAARDLICAQKFNGLTVLPPLLTDEMIAQYTSALLAGTITSGWTFGAGAALQIPFAMQMAYRFNGIGVTQNVLYENQKLIANQFNSAIGKIQDSLSSTASALGKLQDVVNQNAQALNTLVKQLSSNCGAISSVLNDILSRLDKVEAEVQIDRLITCRLQSLQTYVTQQLIRAAEIRASANLAATKMSECVLGQSKRVDFCGKGYHLMSFPQSAPHGVVFLHVTYVPAQEKNFTTAPAICHEGKAHFPREGVFVSNGTHWFITQRNFYEPQIITTDNTFVSGSCDVVIGIVNNTVYDPLQPELDS

SEQ ID NO: 3422 - protein, 1139 aa, Artificial Sequence
  SARS-CoV-2/pangolin/Guangxi/P1E/2017__EPI_ISL_410539 spike protein (1-1139)(F962C_G991C)
MFVFLFVLPLVSSQCVNLTTRTGIQPGYTNSSTRGVYYPDKVFRSSILHLTQDLFLPFFSNVTWFNTINYQGGFKKFDNPVLPFNDGVYFASTEKSNIIRGWIFGTTLDARTQSLLIVNNATNVVIKVCEFQFCTDPFLGVYYHNNNKTWVENEFRVYSSANNCTFEYISQPFLMDLEGKQGNFKNLREFVFKNVDGYFKIYSKHTPIDLVRDLPRGFAALEPLVDLPIGINITRFQTLLALHRSYLTPGKLESGWTTGAAAYYVGYLQQRTFLLSYNQNGTITDAVDCSLDPLSETKCTLKSLTVEKGIYQTSNFRVQPTISIVRFPNITNLCPFGEVFNASKFASVYAWNRKRISNCVADYSVLYNSTSFSTFKCYGVSPTKLNDLCFTNVYADSFVVKGDEVRQIAPGQTGVIADYNYKLPDDFTGCVIAWNSVKQDALTGGNYLYRLFRKSKLKPFERDISTEIYQAGSTPCNGQVGLNCYYPLERYGFHPTTGVNYQPFRVVVLSFELLNGPATVCGPKLSTTLVKDKCVNFNFNGLTGTGVLTTSKKQFLPFQQFGRDISDTTDAVRDPQTLEILDITPCSFGGVSVITPGTNTSNQVAVLYQDVNCTEVPMAIHAEQLTPAWRVYSAGANVFQTRAGCLVGAEHVNNSYECDIPVGAGICASYHSMSSLRSVNQRSIIAYTMSLGAENSVAYSNNSIAIPTNFTISVTTEILPVSMTKTSVDCTMYICGDSIECSNLLLQYGSFCTQLNRALTGIAVEQDKNTQEVFAQVKQIYKTPPIKDFGGFNFSQILPDPSKPSKRSFIEDLLFNKVTLADAGFIKQYGDCLGDIAARDLICAQKFNGLTVLPPLLTDEMIAQYTSALLAGTITSGWTFGAGAALQIPFAMQMAYRFNGIGVTQNVLYENQKLIANQFNSAIGKIQDSLSSTASALGKLQDVVNQNAQALNTLVKQLSSNCGAISSVLNDILSRLDKVEAEVQIDRLITCRLQSLQTYVTQQLIRAAEIRASANLAATKMSECVLGQSKRVDFCGKGYHLMSFPQSAPHGVVFLHVTYVPAQEKNFTTAPAICHEGKAHFPREGVFVSNGTHWFITQRNFYEPQIITTDNTFVSGSCDVVIGIVNNTVYDPLQPELDS

SEQ ID NO: 3423 - protein, 1147 aa, Artificial Sequence
  SARS-CoV-2/Wuhan/WIV05/2019__EPI_ISL_402128 spike protein (1-1147)(A972C_R995C)
MFVFLVLLPLVSSQCVNLTTRTQLPPAYTNSFTRGVYYPDKVFRSSVLHSTQDLFLPFFSNVTWFHAIHVSGTNGTKRFDNPVLPFNDGVYFASTEKSNIIRGWIFGTTLDSKTQSLLIVNNATNVVIKVCEFQFCNDPFLGVYYHKNNKSWMESEFRVYSSANNCTFEYVSQPFLMDLEGKQGNFKNLREFVFKNIDGYFKIYSKHTPINLVRDLPQGFSALEPLVDLPIGINITRFQTLLALHRSYLTPGDSSSGWTAGAAAYYVGYLQPRTFLLKYNENGTITDAVDCALDPLSETKCTLKSFTVEKGIYQTSNFRVQPTESIVRFPNITNLCPFGEVFNATRFASVYAWNRKRISNCVADYSVLYNSASFSTFKCYGVSPTKLNDLCFTNVYADSFVIRGDEVRQIAPGQTGKIADYNYKLPDDFTGCVIAWNSNNLDSKVGGNYNYLYRLFRKSNLKPFERDISTEIYQAGSTPCNGVEGFNCYFPLQSYGFQPTNGVGYQPYRVVVLSFELLHAPATVCGPKKSTNLVKNKCVNFNFNGLTGTGVLTESNKKFLPFQQFGRDIADTTDAVRDPQTLEILDITPCSFGGVSVITPGTNTSNQVAVLYQDVNCTEVPVAIHADQLTPTWRVYSTGSNVFQTRAGCLIGAEHVNNSYECDIPIGAGICASYQTQTNSPRRARSVASQSIIAYTMSLGAENSVAYSNNSIAIPTNFTISVTTEILPVSMTKTSVDCTMYICGDSTECSNLLLQYGSFCTQLNRALTGIAVEQDKNTQEVFAQVKQIYKTPPIKDFGGFNFSQILPDPSKPSKRSFIEDLLFNKVTLADAGFIKQYGDCLGDIAARDLICAQKFNGLTVLPPLLTDEMIAQYTSALLAGTITSGWTFGAGAALQIPFAMQMAYRFNGIGVTQNVLYENQKLIANQFNSAIGKIQDSLSSTASALGKLQDVVNQNAQALNTLVKQLSSNFGCISSVLNDILSRLDKVEAEVQIDCLITGRLQSLQTYVTQQLIRAAEIRASANLAATKMSECVLGQSKRVDFCGKGYHLMSFPQSAPHGVVFLHVTYVPAQEKNFTTAPAICHDGKAHFPREGVFVSNGTHWFVTQRNFYEPQIITTDNTFVSGNCDVVIGIVNNTVYDPLQPELDS

SEQ ID NO: 3424 - protein, 1143 aa, Artificial Sequence
  SARS-CoV-2/bat/Yunnan/RaTG13/2013__EPI_ISL_402131 spike protein (1-1143)(A968C_R991C)
MFVFLVLLPLVSSQCVNLTTRTQLPPAYTNSSTRGVYYPDKVFRSSVLHLTQDLFLPFFSNVTWFHAIHVSGTNGIKRFDNPVLPFNDGVYFASTEKSNIIRGWIFGTTLDSKTQSLLIVNNATNVVIKVCEFQFCNDPFLGVYYHKNNKSWMESEFRVYSSANNCTFEYVSQPFLMDLEGKQGNFKNLREFVFKNIDGYFKIYSKHTPINLVRDLPPGFSALEPLVDLPIGINITRFQTLLALHRSYLTPGDSSSGWTAGAAAYYVGYLQPRTFLLKYNENGTITDAVDCALDPLSETKCTLKSFTVEKGIYQTSNFRVQPTDSIVRFPNITNLCPFGEVFNATTFASVYAWNRKRISNCVADYSVLYNSTSFSTFKCYGVSPTKLNDLCFTNVYADSFVITGDEVRQIAPGQTGKIADYNYKLPDDFTGCVIAWNSKHIDAKEGGNFNYLYRLFRKANLKPFERDISTEIYQAGSKPCNGQTGLNCYYPLYRYGFYPTDGVGHQPYRVVVLSFELLNAPATVCGPKKSTNLVKNKCVNFNFNGLTGTGVLTESNKKFLPFQQFGRDIADTTDAVRDPQTLEILDITPCSFGGVSVITPGTNASNQVAVLYQDVNCTEVPVAIHADQLTPTWRVYSTGSNVFQTRAGCLIGAEHVNNSYECDIPIGAGICASYQTQTNSRSVASQSIIAYTMSLGAENSVAYSNNSIAIPTNFTISVTTEILPVSMTKTSVDCTMYICGDSTECSNLLLQYGSFCTQLNRALTGIAVEQDKNTQEVFAQVKQIYKTPPIKDFGGFNFSQILPDPSKPSKRSFIEDLLFNKVTLADAGFIKQYGDCLGDIAARDLICAQKFNGLTVLPPLLTDEMIAQYTSALLAGTITSGWTFGAGAALQIPFAMQMAYRFNGIGVTQNVLYENQKLIANQFNSAIGKIQDSLSSTASALGKLQDVVNQNAQALNTLVKQLSSNFGCISSVLNDILSRLDKVEAEVQIDCLITGRLQSLQTYVTQQLIRAAEIRASANLAATKMSECVLGQSKRVDFCGKGYHLMSFPQSAPHGVVFLHVTYVPAQEKNFTTAPAICHDGKAHFPREGVFVSNGTHWFVTQRNFYEPQIITTDNTFVSGSCDVVIGIVNNTVYDPLQPELDS

SEQ ID NO: 3425 - protein, 1147 aa, Artificial Sequence
  SARS-CoV-2/Wuhan/HBCDC-HB-01/2019__EPI_ISL_402132 spike protein (1-1147)(A972C_R995C)
MFVFLVLLPLVSSQCVNLTTRTQLPPAYTNSITRGVYYPDKVFRSSVLHSTQDLFLPFFSNVTWFHAIHVSGTNGTKRFDNPVLPFNDGVYFASTEKSNIIRGWIFGTTLDSKTQSLLIVNNATNVVIKVCEFQFCNDPFLGVYYHKNNKSWMESEFRVYSSANNCTFEYVSQPFLMDLEGKQGNFKNLREFVFKNIDGYFKIYSKHTPINLVRDLPQGFSALEPLVDLPIGINITRFQTLLALHRSYLTPGDSSSGWTAGAAAYYVGYLQPRTFLLKYNENGTITDAVDCALDPLSETKCTLKSFTVEKGIYQTSNFRVQPTESIVRFPNITNLCPFGEVFNATRFASVYAWNRKRISNCVADYSVLYNSASFSTFKCYGVSPTKLNDLCFTNVYADSFVIRGDEVRQIAPGQTGKIADYNYKLPDDFTGCVIAWNSNNLDSKVGGNYNYLYRLFRKSNLKPFERDISTEIYQAGSTPCNGVEGFNCYFPLQSYGFQPTNGVGYQPYRVVVLSFELLHAPATVCGPKKSTNLVKNKCVNFNFNGLTGTGVLTESNKKFLPFQQFGRDIADTTDAVRDPQTLEILDITPCSFGGVSVITPGTNTSNQVAVLYQDVNCTEVPVAIHADQLTPTWRVYSTGSNVFQTRAGCLIGAEHVNNSYECDIPIGAGICASYQTQTNSPRRARSVASQSIIAYTMSLGAENSVAYSNNSIAIPTNFTISVTTEILPVSMTKTSVDCTMYICGDSTECSNLLLQYGSFCTQLNRALTGIAVEQDKNTQEVFAQVKQIYKTPPIKDFGGFNFSQILPDPSKPSKRSFIEDLLFNKVTLADAGFIKQYGDCLGDIAARDLICAQKFNGLTVLPPLLTDEMIAQYTSALLAGTITSGWTFGAGAALQIPFAMQMAYRFNGIGVTQNVLYENQKLIANQFNSAIGKIQDSLSSTASALGKLQDVVNQNAQALNTLVKQLSSNFGCISSVLNDILSRLDKVEAEVQIDCLITGRLQSLQTYVTQQLIRAAEIRASANLAATKMSECVLGQSKRVDFCGKGYHLMSFPQSAPHGVVFLHVTYVPAQEKNFTTAPAICHDGKAHFPREGVFVSNGTHWFVTQRNFYEPQIITTDNTFVSGNCDVVIGIVNNTVYDPLQPELDS

SEQ ID NO: 3426 - protein, 1147 aa, Artificial Sequence
  SARS-CoV-2/Guangdong/20SF028/2020__EPI_ISL_403936 spike protein (1-1147)(A972C_R995C)
MFVFLVLLPLVSSQCVNLTTRTQLPPAYTNSFTRGVYYPDKVFRSSVLYSTQDLFLPFFSNVTWFHAIHVSGTNGTKRFDNPVLPFNDGVYFASTEKSNIIRGWIFGTTLDSKTQSLLIVNNATNVVIKVCEFQFCNDPFLGVYYHKNNKSWMESEFRVYSSANNCTFEYVSQPFLMDLEGKQGNFKNLREFVFKNIDGYFKIYSKHTPINLVRDLPQGFSALEPLVDLPIGINITRFQTLLALHRSYLTPGDSSSGWTAGAAAYYVGYLQPRTFLLKYNENGTITDAVDCALDPLSETKCTLKSFTVEKGIYQTSNFRVQPTESIVRFPNITNLCPFGEVFNATRFASVYAWNRKRISNCVADYSVLYNSASFSTFKCYGVSPTKLNDLCFTNVYADSFVIRGDEVRQIAPGQTGKIADYNYKLPDDFTGCVIAWNSNNLDSKVGGNYNYLYRLFRKSNLKPFERDISTEIYQAGSTPCNGVEGFNCYFPLQSYGFQPTNGVGYQPYRVVVLSFELLHAPATVCGPKKSTNLVKNKCVNFNFNGLTGTGVLTESNKKFLPFQQFGRDIADTTDAVRDPQTLEILDITPCSFGGVSVITPGTNTSNQVAVLYQDVNCTEVPVAIHADQLTPTWRVYSTGSNVFQTRAGCLIGAEHVNNSYECDIPIGAGICASYQTQTNSPRRARSVASQSIIAYTMSLGAENSVAYSNNSIAIPTNFTISVTTEILPVSMTKTSVDCTMYICGDSTECSNLLLQYGSFCTQLNRALTGIAVEQDKNTQEVFAQVKQIYKTPPIKDFGGFNFSQILPDPSKPSKRSFIEDLLFNKVTLADAGFIKQYGDCLGDIAARDLICAQKFNGLTVLPPLLTDEMIAQYTSALLAGTITSGWTFGAGAALQIPFAMQMAYRFNGIGVTQNVLYENQKLIANQFNSAIGKIQDSLSSTASALGKLQDVVNQNAQALNTLVKQLSSNFGCISSVLNDILSRLDKVEAEVQIDCLITGRLQSLQTYVTQQLIRAAEIRASANLAATKMSECVLGQSKRVDFCGKGYHLMSFPQSAPHGVVFLHVTYVPAQEKNFTTAPAICHDGKAHFPREGVFVSNGTHWFVTQRNFYEPQIITTDNTFVSGNCDVVIGIVNNTVYDPLQPELDS

SEQ ID NO: 3427 - protein, 1147 aa, Artificial Sequence
  SARS-CoV-2/Shenzhen/SZTH-001/2020__EPI_ISL_406592 spike protein (1-1147)(A972C_R995C)
MFVFLVLLPLVSSQCVNLTTRTQLPPAYTNSFTRGVYYPDKVFRSSVLHSTQDLFLPFFSNVTWFHAIHVSGTNGTKRFDNPVLPFNDGVYFASTEKSNIIRGWIFGTTLDSKTQSLLIVNNATNVVIKVCEFQFCNDPFLGVYYHKNNKSWMESEFRVYSSANNCTFEYVSQPFLMDLEGKQGNFKNLREFVFKNIDGYFKIYSKHTPINLVRDLPQGFSALEPLVDLPIGINITRFQTLLALHRSYLTPGDSSSGWTAGAAAYYVGYLQPRTFLLKYNENGTITDAVDCALDPLSETKCTLKSFTVEKGIYQTSNFRVQPTESIVRFPNITNLCPFGEVFNATRFASVYAWNRKRISNCVADYSVLYNSASFSTFKCYGVSPTKLNDLCFTNVYADSFVIRGDEVRQIAPGQTGKIADYNYKLPDDFTGCVIAWNSNNLDSKVGGNYNYLYRLFRKSNLKPFERDISTEIYQAGSTPCNGVEGFNCYFPLQSYGFQPTNGVGYQPYRVVVLSFELLHAPATVCGPKKSTNLVKNKCVNFNFNGLTGTGVLTESNKKFLPFQQFGRDIADTTDAVRDPQTLEILDITPCSFGGVSVITPGTNTSNQVAVLYQDVNCTEVPVAIHADQLTPTWRVYSTGSNVFQTRAGCLIGAEHVNNSYECDIPIGAGICASYQTQTNSPRRARSVASQSIIAYTMSLGAENSVAYSNNSIAIPTNFTISVTTEILPVSMTKTSVDCTMYICGDSTECSNLLLQYGSFCTQLNRALTGIAVEQDKNTQEVFAQVKQIYKTPPIKDFGGFNFSQILPDPSKPSKRSFIEDLLFNKVTLADAGFIKQYGDCLGDIAARDLICAQKFNGLTVLPPLLTDEMIAQYTSALLAGTITSGWTFGAGAALQIPFAMQMAYRFNGIGVTQNVLYENQKLIANQFNSAIGKIQDSLSSTASALGKLQDVVNQNAQALNTLVKQLSSNFGCISSVLNDILSRLDKVEAEVQIDCLITGRLQSLQTYVTQQLIRAAEIRASANLAATKMSECVLGQSKRVDFCGKGYHLMSFPQSAPHGVVFLHVTYVPAQEKNFTTAPAICHDGKAHFPREGVFVSNGTHWFVTQRNFYEPQIITTDNTFVSGNCDVLIGIVNNTVYDPLQPELDS

SEQ ID NO: 3428 - protein, 1147 aa, Artificial Sequence
  SARS-CoV-2/Shenzhen/SZTH-004/2020__EPI_ISL_406595 spike protein (1-1147)(A972C_R995C)
MFVFLVLLPLVSSQCVNLTTRTQLPPAYTNSFTRGVYYPDKVFRSSVLHSTQDLFLPFFSNVTWFHAIHVSGTNGTKRFDNPVLPFNDGVYFASTEKSNIIRGWIFGTTLDSKTQSLLIVNNATNVVIKVCEFQFCNDPFLGVYYHKNNKSWMESEFRVYSSANNCTFEYVSQPFLMDLEGKQGNFKNLREFVFKNIDGYFKIYSKHTPINLVRDLPQGFSALEPLVDLPIGINITRFQTLLALHRSYLTPGDSSSGWTAGAAAYYVGYLQPRTFLLKYNENGTITDAVDCALDPLSETKCTLKSFTVEKGIYQTSNFRVQPTESIVRFPNITNLCPFGEVFNATRFASVYAWDRKRISNCVAYYSVLYNSASFSTFKCYGVSPTKLNDLCFTNVYADSFVIRGDEVRQIAPGQTGKIADYNYKLPDDFTGCVIAWNSNNLDSKVGGNYNYLYRLFRKSNLKPFERDISTEIYQAGSTPCNGVEGFNCYFPLQSYGFQPTNGVGYQPYRVVVLSFELLHAPATVCGPKKSTNLVKNKCVNFNFNGLTGTGVLTESNKKFLPFQQFGRDIADTTDAVRDPQTLEILDITPCSFGGVSVITPGTNTSNQVAVLYQDVNCTEVPVAIHADQLTPTWRVYSTGSNVFQTRAGCLIGAEHVNNSYECDIPIGAGICASYQTQTNSPRRARSVASQSIIAYTMSLGAENSVAYSNNSIAIPTNFTISVTTEILPVSMTKTSVDCTMYICGDSTECSNLLLQYGSFCTQLNRALTGIAVEQDKNTQEVFAQVKQIYKTPPIKDFGGFNFSQILPDPSKPSKRSFIEDLLFNKVTLADAGFIKQYGDCLGDIAARDLICAQKFNGLTVLPPLLTDEMIAQYTSALLAGTITSGWTFGAGAALQIPFAMQMAYRFNGIGVTQNVLYENQKLIANQFNSAIGKIQDSLSSTASALGKLQDVVNQNAQALNTLVKQLSSNFGCISSVLNDILSRLDKVEAEVQIDCLITGRLQSLQTYVTQQLIRAAEIRASANLAATKMSECVLGQSKRVDFCGKGYHLMSFPQSAPHGVVFLHVTYVPAQEKNFTTAPAICHDGKAHFPREGVFVSNGTHWFVTQRNFYEPQIITTDNTFVSGNCDVVIGIVNNTVYDPLQPELDS

SEQ ID NO: 3429 - protein, 1147 aa, Artificial Sequence
  SARS-CoV-2/France/IDF0372/2020__EPI_ISL_406596 spike protein (1-1147)(A972C_R995C)
MFVFLVLLPLVSSQCVNLTTRTQLPPAYTNSFTRGVYYPDKVFRSSVLHSTQDLFLPFFSNVTWFHAIHVSGTNGTKRFDNPVLPFNDGVYFASTEKSNIIRGWIFGTTLDSKTQSLLIVNNATNVVIKVCEFQFCNDPFLGVYYHKNNKSWMESEFRVYSSANNCTFEYVSQPFLMDLEGKQGNFKNLREFVFKNIDGYFKIYSKHTPINLVRDLPQGFSALEPLVDLPIGINITRFQTLLALHRSYLTPGDSSSGWTAGAAAYYVGYLQPRTFLLKYNENGTITDAVDCALDPLSETKCTLKSFTVEKGIYQTSNFRVQPTESIVRFPNITNLCPFGEVFNATRFASVYAWNRKRISNCVADYSFLYNSASFSTFKCYGVSPTKLNDLCFTNVYADSFVIRGDEVRQIAPGQTGKIADYNYKLPDDFTGCVIAWNSNNLDSKVGGNYNYLYRLFRKSNLKPFERDISTEIYQAGSTPCNGVEGFNCYFPLQSYGFQPTNGVGYQPYRVVVLSFELLHAPATVCGPKKSTNLVKNKCVNFNFNGLTGTGVLTESNKKFLPFQQFGRDIADTTDAVRDPQTLEILDITPCSFGGVSVITPGTNTSNQVAVLYQDVNCTEVPVAIHADQLTPTWRVYSTGSNVFQTRAGCLIGAEHVNNSYECDIPIGAGICASYQTQTNSPRRARSVASQSIIAYTMSLGAENSVAYSNNSIAIPTNFTISVTTEILPVSMTKTSVDCTMYICGDSTECSNLLLQYGSFCTQLNRALTGIAVEQDKNTQEVFAQVKQIYKTPPIKDFGGFNFSQILPDPSKPSKRSFIEDLLFNKVTLADAGFIKQYGDCLGDIAARDLICAQKFNGLTVLPPLLTDEMIAQYTSALLAGTITSGWTFGAGAALQIPFAMQMAYRFNGIGVTQNVLYENQKLIANQFNSAIGKIQDSLSSTASALGKLQDVVNQNAQALNTLVKQLSSNFGCISSVLNDILSRLDKVEAEVQIDCLITGRLQSLQTYVTQQLIRAAEIRASANLAATKMSECVLGQSKRVDFCGKGYHLMSFPQSAPHGVVFLHVTYVPAQEKNFTTAPAICHDGKAHFPREGVFVSNGTHWFVTQRNFYEPQIITTDNTFVSGNCDVVIGIVNNTVYDPLQPELDS

SEQ ID NO: 3430 - protein, 1147 aa, Artificial Sequence
  SARS-CoV-2/Australia/VIC01/2020__EPI_ISL_406844 spike protein (1-1147)(A972C_R995C)
MFVFLVLLPLVSSQCVNLTTRTQLPPAYTNSFTRGVYYPDKVFRSSVLHSTQDLFLPFFSNVTWFHAIHVSGTNGTKRFDNPVLPFNDGVYFASTEKSNIIRGWIFGTTLDSKTQSLLIVNNATNVVIKVCEFQFCNDPFLGVYYHKNNKSWMESEFRVYSSANNCTFEYVSQPFLMDLEGKQGNFKNLREFVFKNIDGYFKIYSKHTPINLVRDLPQGFSALEPLVDLPIGINITRFQTLLALHRRYLTPGDSSSGWTAGAAAYYVGYLQPRTFLLKYNENGTITDAVDCALDPLSETKCTLKSFTVEKGIYQTSNFRVQPTESIVRFPNITNLCPFGEVFNATRFASVYAWNRKRISNCVADYSVLYNSASFSTFKCYGVSPTKLNDLCFTNVYADSFVIRGDEVRQIAPGQTGKIADYNYKLPDDFTGCVIAWNSNNLDSKVGGNYNYLYRLFRKSNLKPFERDISTEIYQAGSTPCNGVEGFNCYFPLQSYGFQPTNGVGYQPYRVVVLSFELLHAPATVCGPKKSTNLVKNKCVNFNFNGLTGTGVLTESNKKFLPFQQFGRDIADTTDAVRDPQTLEILDITPCSFGGVSVITPGTNTSNQVAVLYQDVNCTEVPVAIHADQLTPTWRVYSTGSNVFQTRAGCLIGAEHVNNSYECDIPIGAGICASYQTQTNSPRRARSVASQSIIAYTMSLGAENSVAYSNNSIAIPTNFTISVTTEILPVSMTKTSVDCTMYICGDSTECSNLLLQYGSFCTQLNRALTGIAVEQDKNTQEVFAQVKQIYKTPPIKDFGGFNFSQILPDPSKPSKRSFIEDLLFNKVTLADAGFIKQYGDCLGDIAARDLICAQKFNGLTVLPPLLTDEMIAQYTSALLAGTITSGWTFGAGAALQIPFAMQMAYRFNGIGVTQNVLYENQKLIANQFNSAIGKIQDSLSSTASALGKLQDVVNQNAQALNTLVKQLSSNFGCISSVLNDILSRLDKVEAEVQIDCLITGRLQSLQTYVTQQLIRAAEIRASANLAATKMSECVLGQSKRVDFCGKGYHLMSFPQSAPHGVVFLHVTYVPAQEKNFTTAPAICHDGKAHFPREGVFVSNGTHWFVTQRNFYEPQIITTDNTFVSGNCDVVIGIVNNTVYDPLQPELDS

SEQ ID NO: 3431 - protein, 1147 aa, Artificial Sequence
  SARS-CoV-2/Germany/BavPat1/2020__EPI_ISL_406862 spike protein (1-1147)(A972C_R995C)
MFVFLVLLPLVSSQCVNLTTRTQLPPAYTNSFTRGVYYPDKVFRSSVLHSTQDLFLPFFSNVTWFHAIHVSGTNGTKRFDNPVLPFNDGVYFASTEKSNIIRGWIFGTTLDSKTQSLLIVNNATNVVIKVCEFQFCNDPFLGVYYHKNNKSWMESEFRVYSSANNCTFEYVSQPFLMDLEGKQGNFKNLREFVFKNIDGYFKIYSKHTPINLVRDLPQGFSALEPLVDLPIGINITRFQTLLALHRSYLTPGDSSSGWTAGAAAYYVGYLQPRTFLLKYNENGTITDAVDCALDPLSETKCTLKSFTVEKGIYQTSNFRVQPTESIVRFPNITNLCPFGEVFNATRFASVYAWNRKRISNCVADYSVLYNSASFSTFKCYGVSPTKLNDLCFTNVYADSFVIRGDEVRQIAPGQTGKIADYNYKLPDDFTGCVIAWNSNNLDSKVGGNYNYLYRLFRKSNLKPFERDISTEIYQAGSTPCNGVEGFNCYFPLQSYGFQPTNGVGYQPYRVVVLSFELLHAPATVCGPKKSTNLVKNKCVNFNFNGLTGTGVLTESNKKFLPFQQFGRDIADTTDAVRDPQTLEILDITPCSFGGVSVITPGTNTSNQVAVLYQGVNCTEVPVAIHADQLTPTWRVYSTGSNVFQTRAGCLIGAEHVNNSYECDIPIGAGICASYQTQTNSPRRARSVASQSIIAYTMSLGAENSVAYSNNSIAIPTNFTISVTTEILPVSMTKTSVDCTMYICGDSTECSNLLLQYGSFCTQLNRALTGIAVEQDKNTQEVFAQVKQIYKTPPIKDFGGFNFSQILPDPSKPSKRSFIEDLLFNKVTLADAGFIKQYGDCLGDIAARDLICAQKFNGLTVLPPLLTDEMIAQYTSALLAGTITSGWTFGAGAALQIPFAMQMAYRFNGIGVTQNVLYENQKLIANQFNSAIGKIQDSLSSTASALGKLQDVVNQNAQALNTLVKQLSSNFGCISSVLNDILSRLDKVEAEVQIDCLITGRLQSLQTYVTQQLIRAAEIRASANLAATKMSECVLGQSKRVDFCGKGYHLMSFPQSAPHGVVFLHVTYVPAQEKNFTTAPAICHDGKAHFPREGVFVSNGTHWFVTQRNFYEPQIITTDNTFVSGNCDVVIGIVNNTVYDPLQPELDS

SEQ ID NO: 3432 - protein, 1147 aa, Artificial Sequence
  SARS-CoV-2/Wuhan/HBCDC-HB-02/2020__EPI_ISL_412978 spike protein (1-1147)(A972C_R995C)
MFVFLVLLPLVSSQCVNLTTRTQLPPAYTNSFTRGVYYPDKVFRSSVLHSTQDLFLPFFSNVTWFHAIHVSGTNGTKRFDNPVLPFNDGVYFASTEKSNIIRGWIFGTTLDSKTQSLLIVNNATNVVIKVCEFQFCNDPFLGVYYHKNNKSWMESEFRVYSSANNCTFEYVSQPFLMDLEGKQGNFKNLREFVFKNIDGYFKIYSKHTPINLVRDLPQGFSALEPLVDLPIGINITRFQTLLALHRSYLTPGDSSSGWTAGAAAYYVGYLQPRTFLLKYNENGTITDAVDCALDPLSETKCTLKSFTVEKGIYQTSNFRVQPTESIVRFPNITNLCPFGEVFNATRFASVYAWNRKRISNCVADYSVLYNSASFSTFKCYGVSPTKLNDLCFTNVYADSFVIRGDEVRQIAPGQTGKIADYNYKLPDDFTGCVIAWNSNNLDSKVGGNYNYLYRLFRKSNLKPFERDISTEIYQAGSTPCNGVEGFNCYFPLQSYGFQPTNGVGYQPYRVVVLSFELLHAPATVCGPKKSTNLVKNKCVNFNFNGLTGTGVLTESNKKFLPFQQFGRDIADTTDAVRDPQTLEILDITPCSFGGVSVITPGTNTSNQVAVLYQDVNCTEVPVAIHADQLTPTWRVYSTGSNVFQTRAGCLIGAEHVNNSYECDIPIGAGICASYQTQTNSPRRARSVASQSIIAYTMSLGAENSVAYSNNSIAIPTNFTISVTTEILPVSMTKTSVDCTMYICGDSTECSNFLLQYGSFCTQLNRALTGIAVEQDKNTQEVFAQVKQIYKTPPIKDFGGFNFSQILPDPSKPSKRSFIEDLLFNKVTLADAGFIKQYGDCLGDIAARDLICAQKFNGLTVLPPLLTDEMIAQYTSALLAGTITSGWTFGAGAALQIPFAMQMAYRFNGIGVTQNVLYENQKLIANQFNSAIGKIQDSLSSTASALGKLQDVVNQNAQALNTLVKQLSSNFGCISSVLNDILSRLDKVEAEVQIDCLITGRLQSLQTYVTQQLIRAAEIRASANLAATKMSECVLGQSKRVDFCGKGYHLMSFPQSAPHGVVFLHVTYVPAQEKNFTTAPAICHDGKAHFPREGVFVSNGTHWFVTQRNFYEPQIITTDNTFVSGNCDVVIGIVNNTVYDPLQPELDS

SEQ ID NO: 3433 - protein, 1147 aa, Artificial Sequence
  SARS-CoV-2/Australia/QLD02/2020__EPI_ISL_407896 spike protein (1-1147)(A972C_R995C)
MFVFLVLLPLVSSQCVNLTTRTQLPPAYTNSFTRGVYYPDKVFRSSVLHSTQDLFLPFFSNVTWFHAIHVSGTNGTKRFDNPVLPFNDGVYFASTEKSNIIRGWIFGTTLDSKTQSLLIVNNATNVVIKVCEFQFCNDPFLGVYYHKNNKSWMESEFRVYSSANNCTFEYVSQPFLMDLEGKQGNFKNLREFVFKNIDGYFKIYSKHTPINLVRDLPQGFSALEPLVDLPIGINITRFQTLLALHRSYLTPGDSSSGWTAGAAAYYVGYLQPRTFLLKYNENGTITDAVDCALDPLSETKCTLKSFTVEKGIYQTSNFRVQPTESIVRFPNITNLCPFGEVFNATRFASVYAWNRKRISNCVADYSVLYNSASFSTFKCYGVSPTKLNDLCFTNVYADSFVIRGDEVRQIAPGQTGKIADYNYKLPDDFTGCVIAWNSNNLDSKVGGNYNYLYRLFRKSNLKPFERDISTEIYQAGSTPCNGVEGFNCYFPLQSYGFQPTNGVGYQPYRVVVLSFELLHAPATVCGPKKSTNLVKNKCVNFNFNGLTGTGVLTESNKKFLPFQQFGRDIADTTDAVRDPQTLEILDITPCSFGGVSVITPGTNTSNQVAVLYQDVNCTEVPVAIHADQLTPTWRVYSTGSNVFQTRAGCLIGAEHVNNSYECDIPIGAGICASYQTQTNSPRRARSVASQSIIAYTMSLGAENSVAYSNNSIAIPTNFTISVTTEILPVSMTKTSVDCTMYICGDSTECSNLLLQYGSFCTQLNRALTGIAVEQDKNTQEVFAQVKQIYKTPPIKDFGGFNFSQILPDPSKPSKRSFIEDLLFNKVTLADAGFIKQYGDCLGDIAARDLICAQKFNGLTVLPPLLTDEMIAQYTSALLAGTITSGWTFGAGAALQIPFAMQMAYRFNGIGVTQNVLYENQKLIANQFNSAIGKIQDSLSSTASALGKLQDVVNQNAQALNTLVKQLSSNFGCISSVLNDILSRLDKVEAEVQIDCLITGRLQSLQTYVTQQLIRAAEIRASANLAATKMSECVLGQSKRVDFCGKGYHLMSFPQSAPHGVVFLHVTYVPAQEKNFTTAPAICHDGKAHFPREGVFVSNGTHWFVTQRNFYEPQIITTDNTFVSGNCDVVIGIVNNTVYDPLQLELDS

SEQ ID NO: 3434 - protein, 1147 aa, Artificial Sequence
  SARS-CoV-2/India/1-31/2020__EPI_ISL_413523 spike protein (1-1147)(A972C_R995C)
MFVFLVLLPLVSSQCVNLTTRTQLPPAYTNSFTRGVYYPDKVFRSSVLHSTQDLFLPFFSNVTWFHAIHVSGTNGTKRFDNPVLPFNDGVYFASTEKSNIIRGWIFGTTLDSKTQSLLIVNNATNVVIKVCEFQFCNDPFLGVYYHKNNKSWMESEFRVYSSANNCTFEYVSQPFLMDLEGKQGNFKNLREFVFKNIDGYFKIYSKHTPINLVRDLPQGFSALEPLVDLPIGINITRFQTLLALHRSYLTPGDSSSGWTAGAAAYYVGYLQPRTFLLKYNENGTITDAVDCALDPLSETKCTLKSFTVEKGIYQTSNFRVQPTESIVRFPNITNLCPFGEVFNATRFASVYAWNRKRISNCVADYSVLYNSASFSTFKCYGVSPTKLNDLCFTNVYADSFVIRGDEVRQIAPGQTGKIADYNYKLPDDFTGCVIAWNSNNLDSKVGGNYNYLYRLFRKSNLKPFERDISTEIYQAGSTPCNGVEGFNCYFPLQSYGFQPTNGVGYQPYRVVVLSFELLHAPATVCGPKKSTNLVKNKCVNFNFNGLTGTGVLTESNKKFLPFQQFGRDIADTTDAVRDPQTLEILDITPCSFGGVSVITPGTNTSNQVAVLYQDVNCTEVPVAIHADQLTPTWRVYSTGSNVFQTRAGCLIGAEHVNNSYECDIPIGAGICASYQTQTNSPRRARSVASQSIIAYTMSLGAENSVAYSNNSIAIPTNFTISVTTEILPVSMTKTSVDCTMYICGDSTECSNLLLQYGSFCTQLNRALTGIAVEQDKNTQEVFAQVKQIYKTPPIKDFGGFNFSQILPDPSKPSKRSFIEDLLFNKVTLADAGFIKQYGDCLGDIAARDLICAQKFNGLTVLPPLLTDEMIAQYTSALLAGTITSGWTFGAGAALQIPFAMQMAYRFNGIGVTQNVLYENQKLIANQFNSVIGKIQDSLSSTASALGKLQDVVNQNAQALNTLVKQLSSNFGCISSVLNDILSRLDKVEAEVQIDCLITGRLQSLQTYVTQQLIRAAEIRASANLAATKMSECVLGQSKRVDFCGKGYHLMSFPQSAPHGVVFLHVTYVPAQEKNFTTAPAICHDGKAHFPREGVFVSNGTHWFVTQRNFYEPQIITTDNTFVSGNCDVVIGIVNNTVYDPLQPELDS

SEQ ID NO: 3435 - protein, 1147 aa, Artificial Sequence
  SARS-CoV-2/Guangdong/GD2020087-P0008/2020__EPI_ISL_413863 spike protein (1-1147)(A972C_R995C)
MFVFLVLLPLVSSQCVNLTTRTQLPPAYTNSFTRGVYYPDKVFRSSVLHSTQDLFLPFFSNVTWFHAIHVSGTNGTKRFDNPVLPFNDGVYFASTEKSNIIRGWIFGTTLDSKTQSLLIVNNATNVVIKVCEFQFCNDPFLGVYYHKNNKSWMESEFRVYSSANNCTFEYVSQPFLMDLEGKQGNFKNLREFVFKNIDGYFKIYSKHTPINLVRDLPQGFSALEPLVDLPIGINITRFQTLLALHRSYLTPGDSSSGWTAGAAAYYVGYLQPRTFLLKYNENGTITDAVDCALDPLSETKCTLKSFTVEKGIYQTSNFRVQPTESIVRFPNITNLCPFGEVFNATRFASVYAWNRKRISNCVADYSVLYNSASFSTFKCYGVSPTKLNDLCFTNVYADSFVIRGDEVREIAPGQTGKIADYNYKLPDDFTGCVIAWNSNNLDSKVGGNYNYLYRLFRKSNLKPFERDISTEIYQAGSTPCNGVEGFNCYFPLQSYGFQPTNGVGYQPYRVVVLSFELLHAPATVCGPKKSTNLVKNKCVNFNFNGLTGTGVLTESNKKFLPFQQFGRDIADTTDAVRDPQTLEILDITPCSFGGVSVITPGTNTSNQVAVLYQDVNCTEVPVAIHADQLTPTWRVYSTGSNVFQTRAGCLIGAEHVNNSYECDIPIGAGICASYQTQTNSPRRARSVASQSIIAYTMSLGAENSVAYSNNSIAIPTNFTISVTTEILPVSMTKTSVDCTMYICGDSTECSNLLLQYGSFCTQLNRALTGIAVEQDKNTQEVFAQVKQIYKTPPIKDFGGFNFSQILPDPSKPSKRSFIEDLLFNKVTLADAGFIKQYGDCLGDIAARDLICAQKFNGLTVLPPLLTDEMIAQYTSALLAGTITSGWTFGAGAALQIPFAMQMAYRFNGIGVTQNVLYENQKLIANQFNSAIGKIQDSLSSTASALGKLQDVVNQNAQALNTLVKQLSSNFGCISSVLNDILSRLDKVEAEVQIDCLITGRLQSLQTYVTQQLIRAAEIRASANLAATKMSECVLGQSKRVDFCGKGYHLMSFPQSAPHGVVFLHVTYVPAQEKNFTTAPAICHDGKAHFPREGVFVSNGTHWFVTQRNFYEPQIITTDNTFVSGNCDVVIGIVNNTVYDPLQPELDS

SEQ ID NO: 3436 - protein, 1147 aa, Artificial Sequence
  SARS-CoV-2/Sweden/01/2020__EPI_ISL_411951 spike protein (1-1147)(A972C_R995C)
MFVFLVLLPLVSSQCVNLTTRTQLPPAYTNSFTRGVYYPDKVFRSSVLHSTQDLFLPFFSNVTWFHAIHVSGTNGTKRFDNPVLPFNDGVYFASTEKSNIIRGWIFGTTLDSKTQSLLIVNNATNVVIKVCEFQFCNDPFLGVYYHKNNKSWMESEFRVYSSANNCTFEYVSQPFLMDLEGKQGNFKNLREFVFKNIDGYFKIYSKHTPINLVRDLPQGFSALEPLVDLPIGINITRFQTLLALHRSYLTPGDSSSGWTAGAAAYYVGYLQPRTFLLKYNENGTITDAVDCALDPLSETKCTLKSFTVEKGIYQTSNFRVQPTESIVRFPNITNLCPFGEVFNATRFASVYAWNRKRISNCVADYSVLYNSASFSTFKCYGVSPTKLNDLCFTNVYADSFVIRGDEVRQIAPGQTGKIADYNYKLPDDFTGCVIAWNSNNLDSKVGGNYNYLYRLFRKSNLKPFERDISTEIYQAGSTPCNGVEGFNCYFPLQSYGFQPTNGVGYQPYRVVVLSFELLHAPATVCGPKKSTNLVKNKCVNFNFNGLTGTGVLTESNKKFLPFQQFGRDIADTTDAVRDPQTLEILDITPCSFGGVSVITPGTNTSNQVAVLYQDVNCTEVPVAIHADQLTPTWRVYSTGSNVFQTRAGCLIGAEHVNNSYECDIPIGAGICASYQTQTNSPRRARSVASQSIIAYTMSLGAENSVAYSNNSIAIPTNFTISVTTEILPVSMTKTSVDCTMYICGDSTECSNLLLQYGSFCTQLNRALTGIAVEQDKNTQEVFAQVKQIYKTPPIKDCGGFNFSQILPDPSKPSKRSFIEDLLFNKVTLADAGFIKQYGDCLGDIAARDLICAQKFNGLTVLPPLLTDEMIAQYTSALLAGTITSGWTFGAGAALQIPFAMQMAYRFNGIGVTQNVLYENQKLIANQFNSAIGKIQDSLSSTASALGKLQDVVNQNAQALNTLVKQLSSNFGCISSVLNDILSRLDKVEAEVQIDCLITGRLQSLQTYVTQQLIRAAEIRASANLAATKMSECVLGQSKRVDFCGKGYHLMSFPQSAPHGVVFLHVTYVPAQEKNFTTAPAICHDGKAHFPREGVFVSNGTHWFVTQRNFYEPQIITTDNTFVSGNCDVVIGIVNNTVYDPLQPELDS

SEQ ID NO: 3437 - protein, 1147 aa, Artificial Sequence
  SARS-CoV-2/Tianmen/HBCDC-HB-07/2020__EPI_ISL_412983 spike protein (1-1147)(A972C_R995C)
MFVFLVLLPLVSSQCVNLTTRTQLPPAYTNSFTRGVYYPDKVFRSSVLHSTQDLFLPFFSNVTWFHAIHVSGTNGTKRFDNPVLPFNDGVYFASTEKSNIIRGWIFGTTLDSKTQSLLIVNNATNVVIKVCEFQFCNDPFLGVYYHKNNKSWMESEFRVYSSANNCTFEYVSQPFLMDLEGKQGNFKNLREFVFKNIDGYFKIYSKHTPINLVRDLPQGFSALEPLVDLPIGINITRFQTLLALHRSYLTPGDSSSGWTAGAAAYYVGYLQPRTFLLKYNENGTITDAVDCALDPLSETKCTLKSFTVEKGIYQTSNFRVQPTESIVRFPNITNLCPFGEVFNATRFASVYAWNRKRISNCVADYSVLYNSASFSTFKCYGVSPTKLNDLCFTNVYADSFVIRGDEVRQIAPGQTGKIADYNYKLPDDFTGCVIAWNSNNLDSKVGGNYNYLYRLFRKSNLKPFERDISTEIYQAGSTPCNGVEGFNCYFPLQSYGFQPTNGVGYQPYRVVVLSFELLHAPATVCGPKKSTNLVKNKCVNFNFNGLTGTGVLTESNKKFLPFQQFGRDIADTTDAVRDPQTLEILDITPCSFGGVSVITPGTNTSNQVAVLYQDLNCTEVPVAIHADQLTPTWRVYSTGSNVFQTRAGCLIGAEHVNNSYECDIPIGAGICASYQTQTNSPRRARSVASQSIIAYTMSLGAENSVAYSNNSIAIPTNFTISVTTEILPVSMTKTSVDCTMYICGDSTECSNLLLQYGSFCTQLNRALTGIAVEQDKNTQEVFAQVKQIYKTPPIKDFGGFNFSQILPDPSKPSKRSFIEDLLFNKVTLADAGFIKQYGDCLGDIAARDLICAQKFNGLTVLPPLLTDEMIAQYTSALLAGTITSGWTFGAGAALQIPFAMQMAYRFNGIGVTQNVLYENQKLIANQFNSAIGKIQDSLSSTASALGKLQDVVNQNAQALNTLVKQLSSNFGCISSVLNDILSRLDKVEAEVQIDCLITGRLQSLQTYVTQQLIRAAEIRASANLAATKMSECVLGQSKRVDFCGKGYHLMSFPQSAPHGVVFLHVTYVPAQEKNFTTAPAICHDGKAHFPREGVFVSNGTHWFVTQRNFYEPQIITTDNTFVSGNCDVVIGIVNNTVYDPLQPELDS

SEQ ID NO: 3438 - protein, 1147 aa, Artificial Sequence
  SARS-CoV-2/Hong Kong/case42_VM20002493/2020__EPI_ISL_414527 spike protein (1-1147)(A972C_R995C)
MFVFLVLLPLVSSQCVNLTTRTQLPPAYTNSFTRGVYYPDKVFRSSVLHSTQDLFLPFFSNVTWFHAIHVSGTNGTKRFDNPVLPFNDGVYFASTEKSNIIRGWIFGTTLDSKTQSLLIVNNATNVVIKVCEFQFCNDPFLGVYYHKNNKSWMESEFRVYSSANNCTFEYVSQPFLMDLEGKQGNFKNLREFVFKNIDGYFKIYSKHTPINLVRDLPQGFSALEPLVDLPIGINITRFQTLLALHRSYLTPGDSSSGWTAGAAAYYVGYLQPRTFLLKYNENGTITDAVDCALDPLSETKCTLKSFTVEKGIYQTSNFRVQPTESIVRFPNITNLCPFGEVFNATRFASVYAWNRKRISNCVADYSVLYNSASFSTFKCYGVSPTKLNDLCFTNVYADSFVIRGDEVRQIAPGQTGKIADYNYKLPDDFTGCVIAWNSNNLDSKVGGNYNYLYRLFRKSNLKPFERDISTEIYQAGSTPCNGVEGFNCYFPLQSYGFQPTNGVGYQPYRVVVLSFELLHAPATVCGPKKSTNLVKNKCVNFNFNGLTGTGVLTESNKKFLPFQQFGRDIADTTDAVRDPQTLEILDITPCSFGGVSVITPGTNTSNQVAVLYQDVNCTEVPVAIHADQLTPTWRVYSTGSNVFQTRAGCLIGAEHVNNSYECDIPIGAGICASYQTQTNSPRRARSVASQSIIAYTMSLGAENSVAYSNNSIAIPTNFAISVTTEILPVSMTKTSVDCTMYICGDSTECSNLLLQYGSFCTQLNRALTGIAVEQDKNTQEVFAQVKQIYKTPPIKDFGGFNFSQILPDPSKPSKRSFIEDLLFNKVTLADAGFIKQYGDCLGDIAARDLICAQKFNGLTVLPPLLTDEMIAQYTSALLAGTITSGWTFGAGAALQIPFAMQMAYRFNGIGVTQNVLYENQKLIANQFNSAIGKIQDSLSSTASALGKLQDVVNQNAQALNTLVKQLSSNFGCISSVLNDILSRLDKVEAEVQIDCLITGRLQSLQTYVTQQLIRAAEIRASANLAATKMSECVLGQSKRVDFCGKGYHLMSFPQSAPHGVVFLHVTYVPAQEKNFTTAPAICHDGKAHFPREGVFVSNGTHWFVTQRNFYEPQIITTDNTFVSGNCDVVIGIVNNTVYDPLQPELDS

SEQ ID NO: 3439 - protein, 1147 aa, Artificial Sequence
  SARS-CoV-2/USA/CruiseA-23/2020__EPI_ISL_414482 spike protein (1-1147)(A972C_R995C)
MFVFLVLLPLVSSQCVNLTTRTQLPPAYTNSFTRGVYYPDKVFRSSVLHSTQDLFLPFFSNVTWFHAIHVSGTNGTKRFDNPVLPFNDGVYFASTEKSNIIRGWIFGTTLDSKTQSLLIVNNATNVVIKVCEFQFCNDPFLGVYYHKNNKSWMESEFRVYSSANNCTFEYVSQPFLMDLEVKQGNFKNLREFVFKNIDGYFKIYSKHTPINLVRDLPQGFSALEPLVDLPIGINITRFQTLLALHRSYLTPGDSSSGWTAGAAAYYVGYLQPRTFLLKYNENGTITDAVDCALDPLSETKCTLKSFTVEKGIYQTSNFRVQPTESIVRFPNITNLCPFGEVFNATRFASVYAWNRKRISNCVADYSVLYNSASFSTFKCYGVSPTKLNDLCFTNVYADSFVIRGDEVRQIAPGQTGKIADYNYKLPDDFTGCVIAWNSNNLDSKVGGNYNYLYRLFRKSNLKPFERDISTEIYQAGSTPCNGVEGFNCYFPLQSYGFQPTNGVGYQPYRVVVLSFELLHAPATVCGPKKSTNLVKNKCVNFNFNGLTGTGVLTESNKKFLPFQQFGRDIADTTDAVRDPQTLEILDITPCSFGGVSVITPGTNTSNQVAVLYQDVNCTEVPVAIHADQLTPTWRVYSTGSNVFQTRAGCLIGAEHVNNSYECDIPIGAGICASYQTQTNSPRRARSVASQSIIAYTMSLGAENSVAYSNNSIAIPTNFTISVTTEILPVSMTKTSVDCTMYICGDSTECSNLLLQYGSFCTQLNRALTGIAVEQDKNTQEVFAQVKQIYKTPPIKDFGGFNFSQILPDPSKPSKRSFIEDLLFNKVTLADAGFIKQYGDCLGDIAARDLICAQKFNGLTVLPPLLTDEMIAQYTSALLAGTITSGWTFGAGAALQIPFAMQMAYRFNGIGVTQNVLYENQKLIANQFNSAIGKIQDSLSSTASALGKLQDVVNQNAQALNTLVKQLSSNFGCISSVLNDILSRLDKVEAEVQIDCLITGRLQSLQTYVTQQLIRAAEIRASANLAATKMSECVLGQSKRVDFCGKGYHLMSFPQSAPHGVVFLHVTYVPAQEKNFTTAPAICHDGKAHFPREGVFVSNGTHWFVTQRNFYEPQIITTDNTFVSGNCDVVIGIVNNTVYDPLQPELDS

SEQ ID NO: 3440 - protein, 1147 aa, Artificial Sequence
  SARS-CoV-2/Hong Kong/case85_VM20002868/2020__EPI_ISL_414519 spike protein (1-1147)(A972C_R995C)
MFVFLVLVPLVSSQCVNLTTRTQLPPAYTNSFTRGVYYPDKVFRSSVLHSTQDLFLPFFSNVTWFHAIHVSGTNGTKRFDNPVLPFNDGVYFASTEKSNIIRGWIFGTTLDSKTQSLLIVNNATNVVIKVCEFQFCNDPFLGVYYHKNNKSWMESEFRVYSSANNCTFEYVSQPFLMDLEGKQGNFKNLREFVFKNIDGYFKIYSKHTPINLVRDLPQGFSALEPLVDLPIGINITRFQTLLALHRSYLTPGDSSSGWTAGAAAYYVGYLQPRTFLLKYNENGTITDAVDCALDPLSETKCTLKSFTVEKGIYQTSNFRVQPTESIVRFPNITNLCPFGEVFNATRFASVYAWNRKRISNCVADYSVLYNSASFSTFKCYGVSPTKLNDLCFTNVYADSFVIRGDEVRQIAPGQTGKIADYNYKLPDDFTGCVIAWNSNNLDSKVGGNYNYLYRLFRKSNLKPFERDISTEIYQAGSTPCNGVEGFNCYFPLQSYGFQPTNGVGYQPYRVVVLSFELLHAPATVCGPKKSTNLVKNKCVNFNFNGLTGTGVLTESNKKFLPFQQFGRDIADTTDAVRDPQTLEILDITPCSFGGVSVITPGTNTSNQVAVLYQDVNCTEVPVAIHADQLTPTWRVYSTGSNVFQTRAGCLIGAEHVNNSYECDIPIGAGICASYQTQTNSPRRARSVASQSIIAYTMSLGAENSVAYSNNSIAIPTNFTISVTTEILPVSMTKTSVDCTMYICGDSTECSNLLLQYGSFCTQLNRALTGIAVEQDKNTQEVFAQVKQIYKTPPIKDFGGFNFSQILPDPSKPSKRSFIEDLLFNKVTLADAGFIKQYGDCLGDIAARDLICAQKFNGLTVLPPLLTDEMIAQYTSALLAGTITSGWTFGAGAALQIPFAMQMAYRFNGIGVTQNVLYENQKLIANQFNSAIGKIQDSLSSTASALGKLQDVVNQNAQALNTLVKQLSSNFGCISSVLNDILSRLDKVEAEVQIDCLITGRLQSLQTYVTQQLIRAAEIRASANLAATKMSECVLGQSKRVDFCGKGYHLMSFPQSAPHGVVFLHVTYVPAQEKNFTTAPAICHDGKAHFPREGVFVSNGTHWFVTQRNFYEPQIITTDNTFVSGNCDVVIGIVNNTVYDPLQPELDS

SEQ ID NO: 3441 - protein, 1147 aa, Artificial Sequence; identical to SEQ ID NO: 3431
  SARS-CoV-2/England/200990660/2020__EPI_ISL_414523 spike protein (1-1147)(A972C_R995C)

SEQ ID NO: 3442 - protein, 1147 aa, Artificial Sequence
  SARS-CoV-2/Australia/NSW09/2020__EPI_ISL_413595 spike protein (1-1147)(A972C_R995C)
MFVFLVLLPLVSSQCVNLTTRTQLPPAYTNSFTRGVYYPDKVFRSSVLHSTQDLFLPFFSNVTWFHAIHVSGTNGTKRFDNPVLPFNDGVYFASTEKSNIIRGWIFGTTLDSKTQSLLIVNNATNVVIKVCEFQFCNDPFLGVYYHKNNKSWMESEFRVYSSANNCTFEYVSQPFLMDLEGKQGNFKNLREFVFKNIDGYFKIYSKHTPINLVRDLPQGFSALEPLVDLPIGINITRFQTLLALHRSYLTPGDSSSGWTAGAAAYYVGYLQPRTFLLKYNENGTITDAVDCALDPLSETKCTLKSFTVEKGIYQTSNFRVQPTESIVRFPNITNLCPFGEVFNATRFASVYAWNRKRISNCVADYSVLYNSASFSTFKCYGVSPTKLNDLCFTNVYADSFVIRGDEVRQIAPGQTGKIADYNYKLPDDFTGCVIAWNSNNLDSKVGGNYNYLYRLFRKSNLKPFERDISTEIYQAGSTPCNGVEGFNCYFPLQSYGFQPTNGVGYQPYRVVVLSFELLHAPATVCGPKKSTNLVKNKCVNFNFNGLTGTGVLTESNKKFLPFQQFGRDIADTTDAVRDPQTLEILDITPCSFGGVSVITPGTNTSNQVAVLYQDVNCTEVPVAIHADQLTPTWRVYSTGSNVFQTRAGCLIGAEHVNNSYECDIPIGAGICASYQTQTNSPRRARSVASQSIIAYTMSLGAENSVAYSNNSIAIPTNFTISVTTEILPVSMTKTSVDCTMYICGDSTECSNLLLQYGSFCTQLNRALTGIAVEQDKNTQEVFAQVKQIYKTPPIKDFGGFNFSQILPDPSKPSKRSFIEDLLFNKVTLADAGFIKQYGDCLGDIAARDLICAQKFNGLTVLPPLLTDEMIAQYTSALLAGTITSGWTFGAGAALQIPFAMQMAYRFNGIGVTQNVLYENQKLIANQFNSAIGKIQDSLSFTASALGKLQDVVNQNAQALNTLVKQLSSNFGCISSVLNDILSRLDKVEAEVQIDCLITGRLQSLQTYVTQQLIRAAEIRASANLAATKMSECVLGQSKRVDFCGKGYHLMSFPQSAPHGVVFLHVTYVPAQEKNFTTAPAICHDGKAHFPREGVFVSNGTHWFVTQRNFYEPQIITTDNTFVSGNCDVVIGIVNNTVYDPLQPELDS

SEQ ID NO: 3443 - protein, 1147 aa, Artificial Sequence; identical to SEQ ID NO: 3423
  SARS-CoV-2/Australia/NSW10/2020__EPI_ISL_413596 spike protein (1-1147)(A972C_R995C)

SEQ ID NO: 3444 - protein, 1147 aa, Artificial Sequence
  SARS-CoV-2/Switzerland/1000477797/2020__EPI_ISL_413023 spike protein (1-1147)(A972C_R995C)
MFVFLVLLPLVSSQCVNLTTRTQLPPAYTNSFTRGVYYPDKVFRSSVLHSTQDLFLPFFSNVTWFHAIHVSGTNGTKRFDNPVLPFNDGVYFASTEKSNIIRGWIFGTTLDSKTQSLLIVNNATNVVIKVCEFQFCNDPFLGVYYHKNNKSWMESEFRVYSSANNCTFEYVSQPFLMDLEGKQGNFKNLREFVFKNIDGYFNIYSKHTPINLVRDLPQGFSALEPLVDLPIGINITRFQTLLALHRSYLTPGDSSSGWTAGAAAYYVGYLQPRTFLLKYNENGTITDAVDCALDPLSETKCTLKSFTVEKGIYQTSNFRVQPTESIVRFPNITNLCPFGEVFNATRFASVYAWNRKRISNCVADYSVLYNSASFSTFKCYGVSPTKLNDLCFTNVYADSFVIRGDEVRQIAPGQTGKIADYNYKLPDDFTGCVIAWNSNNLDSKVGGNYNYLYRLFRKSNLKPFERDISTEIYQAGSTPCNGVEGFNCYFPLQSYGFQPTNGVGYQPYRVVVLSFELLHAPATVCGPKKSTNLVKNKCVNFNFNGLTGTGVLTESNKKFLPFQQFGRDIADTTDAVRDPQTLEILDITPCSFGGVSVITPGTNTSNQVAVLYQGVNCTEVPVAIHADQLTPTWRVYSTGSNVFQTRAGCLIGAEHVNNSYECDIPIGAGICASYQTQTNSPRRARSVASQSIIAYTMSLGAENSVAYSNNSIAIPTNFTISVTTEILPVSMTKTSVDCTMYICGDSTECSNLLLQYGSFCTQLNRALTGIAVEQDKNTQEVFAQVKQIYKTPPIKDFGGFNFSQILPDPSKPSKRSFIEDLLFNKVTLADAGFIKQYGDCLGDIAARDLICAQKFNGLTVLPPLLTDEMIAQYTSALLAGTITSGWTFGAGAALQIPFAMQMAYRFNGIGVTQNVLYENQKLIANQFNSAIGKIQDSLSSTASALGKLQDVVNQNAQALNTLVKQLSSNFGCISSVLNDILSRLDKVEAEVQIDCLITGRLQSLQTYVTQQLIRAAEIRASANLAATKMSECVLGQSKRVDFCGKGYHLMSFPQSAPHGVVFLHVTYVPAQEKNFTTAPAICHDGKAHFPREGVFVSNGTHWFVTQRNFYEPQIITTDNTFVSGNCDVVIGIVNNTVYDPLQPELDS

SEQ ID NO: 3445 - protein, 1147 aa, Artificial Sequence
  SARS-CoV-2/Belgium/BA-02291/2020__EPI_ISL_415159 spike protein (1-1147)(A972C_R995C)
MFVFLVLLPLVSSQCVNLTTRTQLPPAYTNSFTRGVYYPDKVFRSSVLHSTQDLFLPFFSNVTWFHAIHVSGTNGTKRFDNPVLPFNDGVYFASTEKSNIIRGWIFGTTLDSKTQSLLIVNNATNVVIKVCEFQFCNDPFLGVYYHKNNKSWMESEFRVYSSANNCTFEYVSQPFLMDLEGKQGNFKNLREFVFKNIDGYFKIYSKHTPINLVRDLPQGFSALEPLVDLPIGINITRFQTLLALHRSYLTPGDSSSGWTAGAAAYYVGYLQPRTFLLKYNENGTITDAVDCALDPLSETKCTLKSFTVEKGIYQTSNFRVQPTESIVRFPNITNLCPFGEVFNATRFASVYAWNRKRISNCVADYSVLYNSASFSTFKCYGVSPTKLNDLCFTNVYADSFVIRGDEVRQIAPGQTGKIADYNYKLPDDFTGCVIAWNSNNLDSKVGGNYNYLYRLFRRSNLKPFERDISTEIYQAGSTPCNGVEGFNCYFPLQSYGFQPTNGVGYQPYRVVVLSFELLPAPATVCGPKKSTNLVKNKCVNFNFNGLTGTGVLTESNKKFLPFQQFGRDIADTTDAVRDPQTLEILDITPCSFGGVSVITPGTNTSNQVAVLYQGVNCTEVPVAIHADQLTPTWRVYSTGSNVFQTRAGCLIGAEHVNNSYECDIPIGAGICASYQTQTNSPRRARSVASQSIIAYTMSLGAENSVAYSNNSIAIPTNFTISVTTEILPVSMTKTSVDCTMYICGDSTECSNLLLQYGSFCTQLNRALTGIAVEQDKNTQEVFAQVKQIYKTPPIKDFGGFNFSQILPDPSKPSKRSFIEDLLFNKVTLADAGFIKQYGDCLGDIAARDLICAQKFNGLTVLPPLLTDEMIAQYTSALLAGTITSGWTFGAGAALQIPFAMQMAYRFNGIGVTQNVLYENQKLIANQFNSAIGKIQDSLSSAAPALGKLQDVVNQNAQALNTLVKQLSSNFGCISSVLNDILSRLDKVEAEVQIDCLITGRLQSLQTYVTQQLIRAAEIRASANLAATKMSECVLGQSKRVDFCGKGYHLMSFPQSAPHGVVFLHVTYVPAQEKNFTTAPAICHDGKAHFPREGVFVSNGTHWFVTQRNFYEPQIITTDNTFVSGNCDVVIGIVNNTVYDPLQPELDS

SEQ ID NO: 3446 - protein, 1147 aa, Artificial Sequence
  SARS-CoV-2/USA/WA8-UW5/2020__EPI_ISL_413486 spike protein (1-1147)(A972C_R995C)
MFVFLVLLPLVSSQCVNLTTRTQLPPAYTNSFTRGVYYPDKVFRSSVLHSTQDLFLPFFSNVTWFHAIHVSGTNGTKRFDNPVLPFNDGVYFASTEKSNIIRGWIFGTTLDSKTQSLLIVNNATNVVIKVCEFQFCNDPFLGVYYHKNNKSWMESEFRVYSSANNCTFEYVSQPFLMDLEGKQGNFKNLREFVFKNIDGYFKIYSKHTPINLVRDLPQGFSALEPLVDLPIGINITRFQTLLALHRSYLTPGDSSSGWTAGAAAYYVGYLQPRTFLLKYNENGTITDAVDCALDPLSETKCTLKSFTVEKGIYQTSNFRVQPTESIVRFPNITNLCPFGEVFNATRFASVYAWNRKRISNCVADYSVLYNSASFSTFKCYGVSPTKLNDLCFTNVYADSFVIRGDEVRQIAPGQTGKIADYNYKLPDDFTGCVIAWNSNNLDSKVGGNYNYLYRLFRKSNLKPFERDISTEIYQAGSTPCNGVEGFNCYFPLQSYGFQPTNGVGYQPYRVVVLSFELLHAPATVCGPKKSTNLVKNKCVNFNFNGLTGTGVLTESNKKFLPFQQFGRDIADTTDAVRDPQTLEILDITPCSFGGVSVITPGTNTSNQVAVLYQDVNCTEVPVAIHADQLTPTWRVYSTGSNVFQTRAGCLIGAEYVNNSYECDIPIGAGICASYQTQTNSPRRARSVASQSIIAYTMSLGAENSVAYSNNSIAIPTNFTISVTTEILPVSMTKTSVDCTMYICGDSTECSNLLLQYGSFCTQLNRALTGIAVEQDKNTQEVFAQVKQIYKTPPIKDFGGFNFSQILPDPSKPSKRSFIEDLLFNKVTLADAGFIKQYGDCLGDIAARDLICAQKFNGLTVLPPLLTDEMIAQYTSALLAGTITSGWTFGAGAALQIPFAMQMAYRFNGIGVTQNVLYENQKLIANQFNSAIGKIQDSLSSTASALGKLQDVVNQNAQALNTLVKQLSSNFGCISSVLNDILSRLDKVEAEVQIDCLITGRLQSLQTYVTQQLIRAAEIRASANLAATKMSECVLGQSKRVDFCGKGYHLMSFPQSAPHGVVFLHVTYVPAQEKNFTTAPAICHDGKAHFPREGVFVSNGTHWFVTQRNFYEPQIITTDNTFVSGNCDVVIGIVNNTVYDPLQPELDS

SEQ ID NO: 3447 - protein, 1147 aa, Artificial Sequence
  SARS-CoV-2/England/20102000506/2020__EPI_ISL_415147 spike protein (1-1147)(A972C_R995C)
MFVFLVLLPLVSSQCVNLTTRTQLPPAYTNSFTRGVYYPDKVFRSSVLHSTQDLFLPFFSNVTWFHAIHVSGTNGTKRFDNPVLPFNDGVYFASTEKSNIIRGWIFGTTLDSKTQSLLIVNNATNVVIKVCEFQFCNDPFLGVYYHKNNKSWMESEFRVYSSANNCTFEYVSQPFLMDLEGKQGNFKNLREFVFKNIDGYFKIYSKHTPINLVRDLPQGFSALEPLVDLPIGINITRFQTLLALHRSYLTPGDSSSGWTAGAAAYYVGYLQPRTFLLKYNENGTITDAVDCALDPLSETKCTLKSFTVEKGIYQTSNFRVQPTESIVRFPNITNLCPFGEVFNATRFASVYAWNRKRISNCVADYSVLYNSASFSTFKCYGVSPTKLNDLCFTNVYADSFVIRGDEVRQIAPGQTGKIADYNYKLPDDFTGCVIAWNSNNLDSKVGGNYNYLYRLFRKSNLKPFERDISTEIYQAGSTPCNGVEGFNCYFPLQSYGFQPTNGVGYQPYRVVVLSFELLHAPATVCGPKKSTNLVKNKCVNFNFNGLTGTGVLTESNKKFLPFQQFGRDIADTTDAVRDPQTLEILDITPCSFGGVSVITPGTNTSNQVAVLYQGVNCTEVPVAIHADQLTPTWRVYSTGSNVFQTRAGCLIGAEHVNNSYECDIPIGAGICASYQTQTNSPRRARSVASQSIIAYTMSLGAENSVAYSNNSIAIPTNFTISVTTEILPVSMTKTSVDCTMYICGDSTECSNLLLQYGSFCTQLNRALTGIAVEQDKNTQEVFAQVKQIYKTPPIKDFGGFNFSQILPDPSKPSKRSFIEDLLFNKVTLADAGFIKQYGYCLGDIAARDLICAQKFNGLTVLPPLLTDEMIAQYTSALLAGTITSGWTFGAGAALQIPFAMQMAYRFNGIGVTQNVLYENQKLIANQFNSAIGKIQDSLSSTASALGKLQDVVNQNAQALNTLVKQLSSNFGCISSVLNDILSRLDKVEAEVQIDCLITGRLQSLQTYVTQQLIRAAEIRASANLAATKMSECVLGQSKRVDFCGKGYHLMSFPQSAPHGVVFLHVTYVPAQEKNFTTAPAICHDGKAHFPREGVFVSNGTHWFVTQRNFYEPQIITTDNTFVSGNCDVVIGIVNNTVYDPLQPELDS

SEQ ID NO: 3448 - protein, 1147 aa, Artificial Sequence
  SARS-CoV-2/Belgium/VAG-03013/2020__EPI_ISL_415155 spike protein (1-1147)(A972C_R995C)
MFVFLVLLPLVSSQCVNLTTRTQLPPAYTNSFTRGVYYPDKVFRSSVLHSTQDLFLPFFSNVTWFHAIHVSGTNGTKRFDNPVLPFNDGVYFASTEKSNIIRGWIFGTTLDSKTQSLLIVNNATNVVIKVCEFQFCNDPFLGVYYHKNNKSWMESEFRVYSSANNCTFEYVSQPFLMDLEGKQGNFKNLREFVFKNIDGYFKIYSKHTPINLVRDLPQGFSALEPLVDLPIGINITRFQTLLALHRSYLTPGDSSSGWTAGAAAYYVGYLQPRTFLLKYNENGTITDAVDCALDPLSETKCTLKSFTVEKGIYQTSNFRVQPTESIVRFPNITNLCPFGEVFNATRFASVYAWNRKRISNCVADYSVLYNSASFSTFKCYGVSPTKLNDLCFTNVYADSFVIRGDEVRQIAPGQTGKIADYNYKLPDDFTGCVIAWNSNNLDSKVGGNYNYLYRLFRKSNLKPFERDISTEIYQAGSTPCNGVEGFNCYFPLQSYGFQPTNGVGYQPYRVVVLSFELLHAPATVCGPKKSTNLVKNKCVNFNFNGLTGTGVLTESNKKFLPFQQFGRDIADTTDAVRDPQTLEILDITPCSFGGVSVITPGTNTSNQVAVLYQGVNCTEVPVAIHADQLTPTWRVYSTGSNVFQTRAGCLIGAEHVNNSYECDIPIGAGICASYQTQTNSPRRARSVASQSIIAYTMSLGAENSVAYSNNSIAIPTNFTISVTTEILPVSMTKTSVDCTMYICGDSTECSNLLLQYGSFCTQLNRALTGIAVEQDKNTQEVFAQVKQIYKTPPIKDFGGFNFSQILPDPSKPSKRSFIEDLLFNKVTLADAGFIKQYGDCLGDIAARDLICAQKFNGLTVLPPLLTDEMIAQYTSALLAGTITSGWTFGAGAALQIPFAMQMAYRFNGIGVTQNVLYENQKLIANQFNSAIGKIQDSLSSTATALGKLQDVVNQNAQALNTLVKQLSSNFGCISSVLNDILSRLDKVEAEVQIDCLITGRLQSLQTYVTQQLIRAAEIRASANLAATKMSECVLGQSKRVDFCGKGYHLMSFPQSAPHGVVFLHVTYVPAQEKNFTTAPAICHDGKAHFPREGVFVSNGTHWFVTQRNFYEPQIITTDNTFVSGNCDVVIGIVNNTVYDPLQPELDS

SEQ ID NO: 3449 - protein, 1147 aa, Artificial Sequence
  SARS-CoV-2/Belgium/BC-03016/2020__EPI_ISL_415157 spike protein (1-1147)(A972C_R995C)
MFVFLVLLPLVSSQCVNLTTRTQLPPAYTNSFTRGVYYPDKVFRSSVLHSTQDLFLPFFSNVTWFHAIHVSGTNGTKRFDNPVLPFNDGVYFASTEKSNIIRGWIFGTTLDSKTQSLLIVNNATNVVIKVCEFQFCNDPFLGVYYHKNNKSWMESEFRVYSSANNCTFEYVSQPFLMDLEGKQGNFKNLREFVFKNIDGYFKIYSKHTPINLVRDLPQGFSALEPLVDLPIGINITRFQTLLALHRSYLTPGDSSSGWTAGAAAYYVGYLQPRTFLLKYNENGTITDAVDCALDPLSETKCTLKSFTVEKGIYQTSNFRVQPTESIVRFPNITNLCPFGEVFNATRFASVYAWNRKRISNCVADYSVLYNSASFSTFKCYGVSPTKLNDLCFTNVYADSFVIRGDEVRQIAPGQTGKIADYNYKLPDDFTGCVIAWNSNNLDSKVGGNYNYLYRLFRKSNLKPFERDISTEIYQAGSTPCNGVEGFNCYFPLQSYGFQPTNGVGYQPYRVVVLSFELLHAPATVCGPKKSTNLVKNKCVNFNFNGLTGTGVLTESNKKFLPFQQFGRDIADTTDAVRDPQTLEILDITPCSFGGVSVITPGTNTSNQVAVLYQGVNCTEVPVAIHADQLTPTWRVYSTGSNVFQTRAGCLIGAEHVNNSYECDIPIGAGICASYQTQTNSPRRARSVASQSIIAYTMSLGAENSVAYSNNSIAIPTNFTISVTTEILPVSMTKTSVDCTMYICGDSTECSNLLLQYGSFCTQLNRALTGIAVEQDKNTQEVFAQVKQIYKTPPIKDFGGFNFSQILPDPSKPSKRSFIEDLLFNKVTLADAGFIKQYGDCLGDIAARDLICAQKFNGLTVLPPLLTDEMIAQYTSALLAGTITSGWTFGAGAALQIPFAMQMAYRFNGIGVTQNVLYENQKLIANQFNSAIGKIQDSLSSTAPALGKLQDVVNQNAQALNTLVKQLSSNFGCISSVLNDILSRLDKVEAEVQIDCLITGRLQSLQTYVTQQLIRAAEIRASANLAATKMSECVLGQSKRVDFCGKGYHLMSFPQSAPHGVVFLHVTYVPAQEKNFTTAPAICHDGKAHFPREGVFVSNGTHWFVTQRNFYEPQIITTDNTFVSGNCDVVIGIVNNTVYDPLQPELDS

SEQ ID NO: 3450 - protein, 1147 aa, Artificial Sequence
  SARS-CoV-2/Germany/BavPat3/2020__EPI_ISL_414521 spike protein (1-1147)(A972C_R995C)
MFVFLVLLPLVSSQCVNLTTRTQLPPAYTNSFTRGVYYPDKVFRSSVLHSTQDLFLPFFSNVTWFHAIHVSGTNGTKRFDNPVLPFNDGVYFASTEKSNIIRGWIFGTTLDSKTQSLLIVNNATNVVIKVCEFQFCNDPFLGVYYHKNNKSWMESEFRVYSSANNCTFEYVSQPFLMDLEGKQGNFKNLREFVFKNIDGYFKIYSKHTPINLVRDLPQGFSALEPLVDLPIGINITRFQTLLALHRSYLTPGDSSSGWTAGAAAYYVGYLQPRTFLLKYNENGTITDAVDCALDPLSETKCTLKSFTVEKGIYQTSNFRVQPTESIVRFPNITNLCPFGEVFNATRFASVYAWNRKRISNCVADYSVLYNSASFSTFKCYGVSPTKLNDLCFTNVYADSFVIRGDEVRQIAPGQTGKIADYNYKLPDDFTGCVIAWNSNNLDSKVGGNYNYLYRLFRKSNLKPFERDISTEIYQAGSTPCNGVEGFNCYFPLQSYGFQPTNGVGYQPYRVVVLSFELLHAPATVCGPKKSTNLVKNKCVNFNFNGLTGTGVLTESNKKFLPFQQFGRDIADTTDAVRDPQTLEILDITPCSFGGVSVITPGTNTSNQVAVLYQDVNCTEVPVAIHADQLTPTWRVYSTGSNVFQTRAGCLIGAEHVNNSYECDIPIGAGICASYQTQTNSPRRARSVASQSIIAYTMSLGAENSVAYSNNSIAIPTNFTISVTTEILPVSMTKTSVDCTMYICGDSTECSNLLLQYGSFCTQLNRALTGIAVEQDKNTQQVFAQVKQIYKTPPIKDFGGFNFSQILPDPSKPSKRSFIEDLLFNKVTLADAGFIKQYGDCLGDIAARDLICAQKFNGLTVLPPLLTDEMIAQYTSALLAGTITSGWTFGAGAALQIPFAMQMAYRFNGIGVTQNVLYENQKLIANQFNSAIGKIQDSLSSTASALGKLQDVVNQNAQALNTLVKQLSSNFGCISSVLNDILSRLDKVEAEVQIDCLITGRLQSLQTYVTQQLIRAAEIRASANLAATKMSECVLGQSKRVDFCGKGYHLMSFPQSAPHGVVFLHVTYVPAQEKNFTTAPAICHDGKAHFPREGVFVSNGTHWFVTQRNFYEPQIITTDNTFVSGNCDVVIGIVNNTVYDPLQPELDS

SEQ ID NO: 3451 - protein, 1147 aa, Artificial Sequence
  SARS-CoV-2/France/HF1805/2020__EPI_ISL_414628 spike protein (1-1147)(A972C_R995C)
MFVFLVLLPLVSSQCVNLTTRTQLPPAYTNSFTRGVYYPDKVFRSSVLHSTQDLFLPFFSNVTWFHAIHVSGTNGTKRFDNPVLPFNDGVYFASTEKSNIIRGWIFGTTLDSKTQSLLIVNNATNVVIKVCEFQFCNDPFLGVYYHKNNKSWMESEFRVYSSANNCTFEYVSQPFLMDLEGKQGNFKNLREFVFKNIDGYFKIYSKHTPINLVRDLPQGFSALEPLVDLPIGINITRFQTLLALHRSYLTPGDSSSGWTAGAAAYYVGYLQPRTFLLKYNENGTITDAVDCALDPLSETKCTLKSFTVEKGIYQTSNFRVQPTESIVRFPNITNLCPFGEVFNATRFASVYAWNRKRISNCVADYSVLYNSASFSTFKCYGVSPTKLNDLCFTNVYADSFVIRGDEVRQIAPGQTGKIADYNYKLPDDFTGCVIAWNSNNLDSKVGGNYNYLYRLFRKSNLKPFERDISTEIYQAGSTPCNGVEGFNCYFPLQSYGFQPTNGVGYQPYRVVVLSFELLHAPATVCGPKKSTNLVKNKCVNFNFNGLTGTGVLTESNKKFLPFQQFGRDIADTTDAVRDPQTLEILDITPCSFGGVSVITPGTNTSNQVAVLYQGVNCTEVPVAIHADQLTPTWRVYSTGSNVFQTRAGCLIGAEHVNNSYECDIPIGAGICASYQTQTNSPRRARSVASQSIIAYTMSLGAENSVAYSNNSIAIPTNFTISVTTEILPVSMTKTSVDCTMYICGDSTECSNLLLQYGSFCTQLNRALTGIAVEQDKNTQEVFAQVKQIYKTPPIKDFGGFNFSQILPDPSKPSKRSFIEDLLFNKVTLADAGFIKQYGDCLGDIAARDLICAQKFNGLTVLPPLLTDEMIAQYTSALLAGTITSGWTFGAGAALQIPFAMQMAYRFNGIGVTQNVLYENQKLIANQFNSAIGKIQDSLSSTASALGKLQDVVNQNAQALNTLVKQLSSNFGCISSVLNDILSRLDKVEAEVQIDCLITGRLQSLQTYVTQQLIRAAEIRASANLAATKMSECVLGQSKRVDFCGKGYHLMSFPQSAPHGVVFLHVTYVPAQEKNFTTAPAICHDGKAHFPREGVFVSNGTHWFVTQRNFYEPQIITTDNTFVSGNCDVVIGVVNNTVYDPLQPELDS

SEQ ID NO: 3452 - protein, 1147 aa, Artificial Sequence
  SARS-CoV-2/Netherlands/ZuidHolland_9/2020__EPI_ISL_414445 spike protein (1-1147)(A972C_R995C)
MFVFLVLLPLVSSQCVNLTTRTQLPPAYTNSFTRGVYYPDKVFRSSVLHSTQDLFLPFFSNVTWFHAIHVSGTNGTKRFDNPVLPFNDGVYFASTEKSNIIRGWIFGTTLDSKTQSLLIVNNATNVVIKVCEFQFCNDPFLGVYYHKNNKSWMESEFRVYSSANNCTFEYVSQPFLMDLEGKQGNFKNLREFVFKNIDGYFKIYSKHTPINLVRDLPQGFSALEPLVDLPIGINITRFQTLLALHRSYLTPGDSSSGWTAGAAAYYVGYLQPRTFLLKYNENGTITDAVDCALDPLSETKCTLKSFTVEKGIYQTSNFRVQPTESIVRFPNITNLCPFGEVFNATRFASVYAWNRKRISNCVADYSVLYNSASFSTFKCYGVSPTKLNDLCFTNVYADSFVIRGDEVRQIAPGQTGKIADYNYKLPDDFTGCVIAWNSNNLDSKVGGNYNYLYRLFRKSNLKPFERDISTEIYQAGSTPCNGVEGFNCYFPLQSYGFQPTNGVGYQPYRVVVLSFELLHAPATVCGPKKSTNLVKNKCVNFNFNGLTGTGVLTESNKKFLPFQQFGRDIADTTDAVRDPQTLEILDITPCSFGGVSVITPGTNTSNQVAVLYQGVNCTEVPVAIHADQLTPTWRVYSTGSNVFQTRAGCLIGAEHVNNSYECDIPIGAGICASYQTQTNSPRRARSVASQSIIAYTMSLGAENSVAYSNNSIAIPTNFTISVTTEILPVSMTKTSVDCTMYICGDSTECSNLLLQYGSFCTQLNRALTGIAVEQDKNTQEVFAQVKQIYKTPPIKDFGGFNFSQILPDPSKPSKRSFIEDLLFNKVTLADAGFIKQYGDCLGDIAARDLICVQKFNGLTVLPPLLTDEMIAQYTSALLAGTITSGWTFGAGAALQIPFAMQMAYRFNGIGVTQNVLYENQKLIANQFNSAIGKIQDSLSSTASALGKLQDVVNQNAQALNTLVKQLSSNFGCISSVLNDILSRLDKVEAEVQIDCLITGRLQSLQTYVTQQLIRAAEIRASANLAATKMSECVLGQSKRVDFCGKGYHLMSFPQSAPHGVVFLHVTYVPAQEKNFTTAPAICHDGKAHFPREGVFVSNGTHWFVTQRNFYEPQIITTDNTFVSGNCDVVIGIVNNTVYDPLQPELDS

SEQ ID NO: 3453 - protein, 1147 aa, Artificial Sequence
  SARS-CoV-2/Finland/FIN03032020A/2020__EPI_ISL_413602 spike protein (1-1147)(A972C_R995C)
MFVFLVLLPLVSSQCVNLTTRTQLPPAYTNSFTRGVYYPDKVFRSSVLHSTQDLFLPFFSNVTWFHAIHVSGTNGTKRFDNPVLPFNDGVYFASTEKSNIIRGWIFGTTLDSKTQSLLIVNNATNVVIKVCEFQFCNDPFLGVYYHKNNKSWMESEFRVYSSANNCTFEYVSQPFLMDLEGKQGNFKNLREFVFKNIDGYFKIYSKHTPINLVRDLPQGFSALEPLVDLPIGINITRFQTLLALHRSYLTPGDSSSGWTAGAAAYYVGYLQPRTFLLKYNENGTITDAVDCALDPLSETKCTLKSFTVEKGIYQTSNFRVQPTESIVRFPNITNLCPFGEVFNATRFASVYAWNRKRISNCVADYSVLYNSASFSTFKCYGVSPTKLNDLCFTNVYADSFVIRGDEVRQIAPGQTGKIADYNYKLPDDFTGCVISWNSNNLDSKVGGNYNYLYRLFRKSNLKPFERDISTEIYQAGSTPCNGVEGFNCYFPLQSYGFQPTNGVGYQPYRVVVLSFELLHAPATVCGPKKSTNLVKNKCVNFNFNGLTGTGVLTESNKKFLPFQQFGRDIADTTDAVRDPQTLEILDITPCSFGGVSVITPGTNTSNQVAVLYQGVNCTEVPVAIHADQLTPTWRVYSTGSNVFQTRAGCLIGAEHVNNSYECDIPIGAGICASYQTQTNSPRRARSVASQSIIAYTMSLGAENSVAYSNNSIAIPTNFTISVTTEILPVSMTKTSVDCTMYICGDSTECSNLLLQYGSFCTQLNRALTGIAVEQDKNTQEVFAQVKQIYKTPPIKDFGGFNFSQILPDPSKPSKRSFIEDLLFNKVTLADAGFIKQYGDCLGDIAARDLICAQKFNGLTVLPPLLTDEMIAQYTSALLAGTITSGWTFGAGAALQIPFAMQMAYRFNGIGVTQNVLYENQKLIANQFNSAIGKIQDSLSSTASALGKLQDVVNQNAQALNTLVKQLSSNFGCISSVLNDILSRLDKVEAEVQIDCLITGRLQSLQTYVTQQLIRAAEIRASANLAATKMSECVLGQSKRVDFCGKGYHLMSFPQSAPHGVVFLHVTYVPAQEKNFTTAPAICHDGKAHFPREGVFVSNGTHWFVTQRNFYEPQIITTDNTFVSGNCDVVIGIVNNTVYDPLQPELDS

SEQ ID NO: 3454 - protein, 1147 aa, Artificial Sequence
  SARS-CoV-2/France/GE1977/2020__EPI_ISL_414632 spike protein (1-1147)(A972C_R995C)
MFVFLVLLPLVSSQCVNLTTRTQLPPAYTNSFTRGVYYPDKVFRSSVLHSTQDLFLPFFSNVTWFHAIHVSGTNGTKRFDNPVLPFNDGVYFASTEKSNIIRGWIFGTTLDSKTQSLLIVNNATNVVIKVCEFQFCNDPFLGVYYHKNNKSWMESEFRVYSSANNCTFEYVSQPFLMDLEGKQGNFKNLREFVFKNIDGYFKIYSKHTPINLVRDLPQGFSALEPLVDLPIGINITRFQTLLALHRSYLTPGDSSSGWTAGAAAYYVGYLQPRTFLLKYNENGTITDAVDCALDPLSETKCTLKSFTVEKGIYQTSNFRVQPTESIVRFPNITNLCPFGEVFNATRFASVYAWNRKRISNCVADYSVLYNSASFSTFKCYGVSPTKLNDLCFTNVYADSFVIRGDEVRQIAPGQTGKIADYNYKLPDDFTGCVIAWNSNNLDSKVGGNYNYLYRLFRKSNLKPFERDISTEIYQAGSTPCNGVEGFNCYFPLQSYGFQPTNGVGYQPYRVVVLSFELLHAPATVCGPKKSTNLVKNKCVNFNFNGLTGTGVLTESNKKFLPFQQFGRDIADTTDAVRDPQTLEILDITPCSFGGVSVITPGTNTSNQVAVLYQGVNCTEVPVAIHADQLTPTWRVYSTGSNVFQTRAGCLIGAEHVNNSYECDIPIGAGICASYQTQTNSPRRARSVASQSIIAYTMSLGAENSVAYSNNSIAIPTNFTISVTTEILPVSMTKTSVDCTMYICGDSTECSNLLLQYGSFCTQLNRALTGIAVEQDKNTQEVFAQVKQIYKTPPIKDFGGFNFSQILPDPSKPSKRSFIEDLLFNKVTLADAGFIKQYGDCLGDIAARDLICAQKFNGLTVLPPLLTDEMIAQYTSALLAGTITSGWTFGAGAALQIPFAMQMAYRFNGIGVTQNVLYENQKLIANQFNSAIGKIQDSLFSTASALGKLQDVVNQNAQALNTLVKQLSSNFGCISSVLNDILSRLDKVEAEVQIDCLITGRLQSLQTYVTQQLIRAAEIRASANLAATKMSECVLGQSKRVDFCGKGYHLMSFPQSAPHGVVFLHVTYVPAQEKNFTTAPAICHDGKAHFPREGVFVSNGTHWFVTQRNFYEPQIITTDNTFVSGNCDVVIGIVNNTVYDPLQPELDS

SEQ ID NO: 3455 - protein, 1147 aa, Artificial Sequence
  SARS-CoV-2/Finland/FIN-313/2020__EPI_ISL_414641 spike protein (1-1147)(A972C_R995C)
MFVFLVLLPLVSSQCVNLTTRTQLPPAYTNSFTRGVYYPDKVFRSSVLHSTQDLFLPFFSNVTWFHAIHVSGTNGTKRFDNPVLPFNDGVYFASTEKSNIIRGWIFGTTLDSKTQSLLIVNNATNVVIKVCEFQFCNDPFLGVYYHKNNKSWMESEFRVYSSANNCTFEYVSQPFLMDLEGKQGNFKNLREFVFKNIDGYFKIYSKHTPINLVRDLPQGFSALEPLVDLPIGINITRFKTLLALHRSYLTPGDSSSGWTAGAAAYYVGYLQPRTFLLKYNENGTITDAVDCALDPLSETKCTLKSFTVEKGIYQTSNFRVQPTESIVRFPNITNLCPFGEVFNATRFASVYAWNRKRISNCVADYSVLYNSASFSTFKCYGVSPTKLNDLCFTNVYADSFVIRGDEVRQIAPGQTGKIADYNYKLPDDFTGCVIAWNSNNLDSKVGGNYNYLYRLFRKSNLKPFERDISTEIYQAGSTPCNGVEGFNCYFPLQSYGFQPTNGVGYQPYRVVVLSFELLHAPATVCGPKKSTNLVKNKCVNFNFNGLTGTGVLTESNKKFLPFQQFGRDIADTTDAVRDPQTLEILDITPCSFGGVSVITPGTNTSNQVAVLYQGVNCTEVPVAIHADQLTPTWRVYSTGSNVFQTRAGCLIGAEHVNNSYECDIPIGAGICASYQTQTNSPRRARSVASQSIIAYTMSLGAENSVAYSNNSIAIPTNFTISVTTEILPVSMTKTSVDCTMYICGDSTECSNLLLQYGSFCTQLNRALTGIAVEQDKNTQEVFAQVKQIYKTPPIKDFGGFNFSQILPDPSKPSKRSFIEDLLFNKVTLADAGFIKQYGDCLGDIAARDLICAQKFNGLTVLPPLLTDEMIAQYTSALLAGTITSGWTFGAGAALQIPFAMQMAYRFNGIGVTQNVLYENQKLIANQFNSAIGKIQDSLSSTASALGKLQDVVNQNAQALNTLVKQLSSNFGCISSVLNDILSRLDKVEAEVQIDCLITGRLQSLQTYVTQQLIRAAEIRASANLAATKMSECVLGQSKRVDFCGKGYHLMSFPQSAPHGVVFLHVTYVPAQEKNFTTAPAICHDGKAHFPREGVFVSNGTHWFVTQRNFYEPQIITTDNTFVSGNCDVVIGIVNNTVYDPLQPELDS

SEQ ID NO: 3456 - protein, 1147 aa, Artificial Sequence
  SARS-CoV-2/Netherlands/ZuidHolland_2/2020__EPI_ISL_414556 spike protein (1-1147)(A972C_R995C)
MFVFLVLLPLVSSQCVNLTTRTQLPPAYTNSFTRGVYYPDKVFRSSVLHSTQDLFLPFFSNVTWFHAIHVSGTNGTKRFDNPVLPFNDGVYFASTEKSNIIRGWIFGTTLDSKTQSLLIVNNATNVVIKVCEFQFCNDPFLGVYYHKNNKSWMESEFRVYSSANNCTFEYVSQPFLMDLEGKQGNFKNLREFVFKNIDGYFKIYSKHTPINLVRDLPQGFSALEPLVDLPIGINITRFQTLLALHRSYLTPGDSSSGWTAGAAAYYVGYLQPRTFLLKYNENGTITDAVDCALDPLSETKCTLKSFTVEKGIYQTSNFRVQPTESIVRFPNITNLCPFGEVFNATRFASVYAWNRKRISNCVADYSVLYNSASFSTFKCYGVSPTKLNDLCFTNVYADSFVIRGDEVRQIAPGQTGKIADYNYKLPDDFTGCVIAWNSNNLDSKVGGNYNYLYRLFRKSNLKPFERDISTEIYQAGSTPCNGVEGFNCYFPLQSYGFQPTNGVGYQPYRVVVLSFELLHAPATVCGPKKSTNLVKNKCVNFNFNGLTGTGVLTESNKKFLPFQQFGRDIADTTDAVRDPQTLEILDITPCSFGGVSVITPGTNTSNQVAVLYQGVNCTEVPVAIHADQLTPTWRVYSTGSNVFQTRAGCLIGAEHVNNSYECDIPIGAGICASYQTQTNSPRRARSVASQSIIAYTMSLGAENSVAYSNNSIAIPTNFTISVTTEILPVSMTKTSVDCTMYICGDSTECSNLLLQYGSFCTQLNRALTGIALEQDKNTQEVFAQVKQIYKTPPIKDFGGFNFSQILPDPSKPSKRSFIEDLLFNKVTLADAGFIKQYGDCLGDIAARDLICAQKFNGLTVLPPLLTDEMIAQYTSALLAGTITSGWTFGAGAALQIPFAMQMAYRFNGIGVTQNVLYENQKLIANQFNSAIGKIQDSLSSTASALGKLQDVVNQNAQALNTLVKQLSSNFGCISSVLNDILSRLDKVEAEVQIDCLITGRLQSLQTYVTQQLIRAAEIRASANLAATKMSECVLGQSKRVDFCGKGYHLMSFPQSAPHGVVFLHVTYVPAQEKNFTTAPAICHDGKAHFPREGVFVSNGTHWFVTQRNFYEPQIITTDNTFVSGNCDVVIGIVNNTVYDPLQPELDS

SEQ ID NO: 3457 - protein, 1147 aa, Artificial Sequence
  SARS-CoV-2/USA/WA-UW31/2020__EPI_ISL_414618 spike protein (1-1147)(A972C_R995C)
MFVFLVLLPLVSSQCVNLTTRTQLPPAYTNSFTRGVYYPDKVFRSSVLHSTQDLFLPFFSNVTWFHAIHVSGTNGTKRFDNPVLPFNDGVYFASTEKSNIIRGWIFGTTLDSKTQSLLIVNNATNVVIKVCEFQFCNDPFLGVYYHKNNKSWMESEFRVYSSANNCTFEYVSQPFLMDLEGKQGNFKNLREFVFKNIDGYFKIYSKHTPINLVRDLPQGFSALEPLVDLPIGINITRFQTLLALHRSYLTPGDSSSGWTAGAAAYYVGYLQPRTFLLKYNENGTITDAVDCALDPLSETKCTLKSFTVEKGIYQTSNFRVQPTESIVRFPNITNLCPFGEVFNATRFASVYAWNRKRISNCVADYSVLYNSASFSTFKCYGVSPTKLNDLCFTNVYADSFVIRGDEVRQIAPGQTGKIADYNYKLPDDFTGCVIAWNSNNLDSKVGGNYNYLYRLFRKSNLKPFERDISTEIYQAGSTPCNGAEGFNCYFPLQSYGFQPTNGVGYQPYRVVVLSFELLHAPATVCGPKKSTNLVKNKCVNFNFNGLTGTGVLTESNKKFLPFQQFGRDIADTTDAVRDPQTLEILDITPCSFGGVSVITPGTNTSNQVAVLYQDVNCTEVPVAIHADQLTPTWRVYSTGSNVFQTRAGCLIGAEHVNNSYECDIPIGAGICASYQTQTNSPRRARSVASQSIIAYTMSLGAENSVAYSNNSIAIPTNFTISVTTEILPVSMTKTSVDCTMYICGDSTECSNLLLQYGSFCTQLNRALTGIAVEQDKNTQEVFAQVKQIYKTPPIKDFGGFNFSQILPDPSKPSKRSFIEDLLFNKVTLADAGFIKQYGDCLGDIAARDLICAQKFNGLTVLPPLLTDEMIAQYTSALLAGTITSGWTFGAGAALQIPFAMQMAYRFNGIGVTQNVLYENQKLIANQFNSAIGKIQDSLSSTASALGKLQDVVNQNAQALNTLVKQLSSNFGCISSVLNDILSRLDKVEAEVQIDCLITGRLQSLQTYVTQQLIRAAEIRASANLAATKMSECVLGQSKRVDFCGKGYHLMSFPQSAPHGVVFLHVTYVPAQEKNFTTAPAICHDGKAHFPREGVFVSNGTHWFVTQRNFYEPQIITTDNTFVSGNCDVVIGIVNNTVYDPLQPELDS

SEQ ID NO: 3458 - protein, 1147 aa, Artificial Sequence
  SARS-CoV-2/South Korea/SNU01/2020__EPI_ISL_411929 spike protein (1-1147)(A972C_R995C)
MFVFLVLLPLVSSQCVNLTTRTQLPPAYTNSFTRGVYYPDKVFRSSVLHSTQDLFLPFFSNVTWFHAIHVSGTNGTKRFDNPVLPFNDGVYFASTEKSNIIRGWIFGTTLDSKTQSLLIVNNATNVVIKVCEFQFCNDPFLGVYYHKNNKSWMESEFRVYSSANNCTFEYVSQPFLMDLEGKQGNFKNLREFVFKNIDGYFKIYSKHTPINLVRDLPQGFWALEPLVDLPIGINITRFQTLLALHRSYLTPGDSSSGWTAGAAAYYVGYLQPRTFLLKYNENGTITDAVDCALDPLSETKCTLKSFTVEKGIYQTSNFRVQPTESIVRFPNITNLCPFGEVFNATRFASVYAWNRKRISNCVADYSVLYNSASFSTFKCYGVSPTKLNDLCFTNVYADSFVIRGDEVRQIAPGQTGKIADYNYKLPDDFTGCVIAWNSNNLDSKVGGNYNYLYRLFRKSNLKPFERDISTEIYQAGSTPCNGVEGFNCYFPLQSYGFQPTNGVGYQPYRVVVLSFELLHAPATVCGPKKSTNLVKNKCVNFNFNGLTGTGVLTESNKKFLPFQQFGRDIADTTDAVRDPQTLEILDITPCSFGGVSVITPGTNTSNQVAVLYQDVNCTEVPVAIHADQLTPTWRVYSTGSNVFQTRAGCLIGAEHVNNSYECDIPIGAGICASYQTQTNSPRRARSVASQSIIAYTMSLGAENSVAYSNNSIAIPTNFTISVTTEILPVSMTKTSVDCTMYICGDSTECSNLLLQYGSFCTQLNRALTGIAVEQDKNTQEVFAQVKQIYKTPPIKDFGGFNFSQILPDPSKPSKRSFIEDLLFNKVTLADAGFIKQYGDCLGDIAARDLICAQKFNGLTVLPPLLTDEMIAQYTSALLAGTITSGWTFGAGAALQIPFAMQMAYRFNGIGVTQNVLYENQKLIANQFNSAIGKIQDSLSSTASALGKLQDVVNQNAQALNTLVKQLSSNFGCISSVLNDILSRLDKVEAEVQIDCLITGRLQSLQTYVTQQLIRAAEIRASANLAATKMSECVLGQSKRVDFCGKGYHLMSFPQSAPHGVVFLHVTYVPAQEKNFTTAPAICHDGKAHFPREGVFVSNGTHWFVTQRNFYEPQIITTDNTFVSGNCDVVIGIVNNTVYDPLQPELDS

SEQ ID NO: 3459 - protein, 1147 aa, Artificial Sequence
  SARS-CoV-2/China/WF0004/2020__EPI_ISL_413694 spike protein (1-1147)(A972C_R995C)
MFVFLVLLPLVSSQCVNLTTRTQLPPAYTNSFTRGVYYPDKVFRSSVLHSTQDLFLPFFSNVTWFHAIHVSGTNGTKRFDNPVLPFNDGVYFASTEKSNIIRGWIFGTTLDSKTQSLLIVNNATNVVIKVCEFQFCNDPFLGVYYHKNNKSWTESEFRVYSSANNCTFEYVSQPFLMDLEGKQGNFKNLREFVFKNIDGYFKIYSKHTPINLVRDLPQGFSALEPLVDLPIGINITRFQTLLALHRSYLTPGDSSSGWTAGAAAYYVGYLQPRTFLLKYNENGTITDAVDCALDPLSETKCTLKSFTVEKGIYQTSNFRVQPTESIVRFPNITNLCPFGEVFNATRFASVYAWNRKRISNCVADYSVLYNSASFSTFKCYGVSPTKLNDLCFTNVYADSFVIRGDEVRQIAPGQTGKIADYNYKLPDDFTGCVIAWNSNNLDSKVGGNYNYLYRLFRKSNLKPFERDISTEIYQAGSTPCNGVEGFNCYFPLQSYGFQPTNGVGYQPYRVVVLSFELLHAPATVCGPKKSTNLVKNKCVNFNFNGLTGTGVLTESNKKFLPFQQFGRDIADTTDAVRDPQTLEILDITPCSFGGVSVITPGTNTSNQVAVLYQDVNCTEVPVAIHADQLTPTWRVYSTGSNVFQTRAGCLIGAEHVNNSYECDIPIGAGICASYQTQTNSPRRARSVASQSIIAYTMSLGAENSVAYSNNSIAIPTNFTISVTTEILPVSMTKTSVDCTMYICGDSTECSNLLLQYGSFCTQLNRALTGIAVEQDKNTQEVFAQVKQIYKTPPIKDFGGFNFSQILPDPSKPSKRSFIEDLLFNKVTLADAGFIKQYGDCLGDIAARDLICAQKFNGLTVLPPLLTDEMIAQYTSALLAGTITSGWTFGAGAALQIPFAMQMAYRFNGIGVTQNVLYENQKLIANQFNSAIGKIQDSLSSTASALGKLQDVVNQNAQALNTLVKQLSSNFGCISSVLNDILSRLDKVEAEVQIDCLITGRLQSLQTYVTQQLIRAAEIRASANLAATKMSECVLGQSKRFDFCGKGYHLMSFPQSAPHGVVFLHVTYVPAQEKNFTTAPAICHDGKAHFPREGVFVSNGTHWFVTQRNFYEPQIITTDNTFVSGNCDVVIGIVNNTVYDPLQPELDS

SEQ ID NO: 3460 - protein, 1147 aa, Artificial Sequence
  SARS-CoV-2/China/WF0028/2020__EPI_ISL_413791 spike protein (1-1147)(A972C_R995C)
MFVFLVLLPLVSSQCVNLTTRTQLPPAYTNSFTRGVYYPDKVFRSSVLHSTQDLFLPFFSNVTWFHAIHVSGTNGTKRFDNPVLPFNDGVYFASTEKSNIIRGWIFGTTLDSKTQSLLIVNNATNVVIKVCEFQFCNDPFLGVYYHKNNKSWMESEFRVYSSANNCTFEYVSQPFLMDLEGKQGNFKNLREFVFKNIDGYFKIYSKHTPINLVRDLPQGFSALEPLVDLPIGINITRFQTLLALHRSYLTPGDSSSGWTAGAAAYYVGYLQPRTFLLKYNENGTITDAVDCALDPLSETKCTLKSFTVEKGIYQTSNFRVQPTESIVRFPNITNLCPFGEVFNATRFASVYAWNRKRISNCVADYSVLYNSASFSTFKCYGVSPTKLNDLCFTNVYADSFVIRGDEVRQIAPGQTGKIADYNYKLPDDFTGCVIAWNSNNLDSKVGGNYNYLYRLFRKSNLKPFERDISTEIYQAGSTPCNGVEGFNCYFPLQSYGFQPTNGVGYQPYRVVVLSFELLHAPATVCGPKKSTNLVKNKCVNFNFNGLTGTGVLTESNKKFLPFQQFGRDIADTTDAVRDPQTLEILDITPCSFGGVSVITPGTNTSNQVAVLYQDVNCTEVPVAIHADQLTPTWRVYSTGSNVFQTRAGCLIGAEHVNNSYECDIPIGAGICASYQTQTNSPRRARSVASQSIIAYTMSLGAENSVAYSNNSIAIPTNFTISVTTEILPVSMTKTSVDCTMYICGDSTECSNLLLQYGSFCTQLNRALTGIAVEQDKNTQEVFAQVKQIYKTPPIKDFGGFNFSQILPDPSKPSKRSFIEDLLFNKVTLADAGFIKQYGDCLGDIAARDLICAQKFNGLTVLPPLLTDEMIAQYTSALLAGTITSGWTFGAGAALQIPFAMQMAYRFNGIGVTQNVLYENQKLIANQFNSAIGKIQDSLSSTASALGKLQDVVNQNAQALNTLVKQLSSNFGCISSVLNDILSRLDKVEAEVQIDCLITGRLQSLQTYVTQQLIRAAEIRASANLAATKMSECVLGQSKRVDFCGKGYHLMSFPQSAPHGVVFLHVTYVPAQEKNFTTAPAICHDGKAHFPREGVFVSNGTHWFVTQRNFYEPQIITTDNTFVSGNCDVVIGIVNNTVYDPLQPELES

SEQ ID NO: 3461 - protein, 1147 aa, Artificial Sequence
  SARS-CoV-2/2019-nCoV/USA-CruiseA-18/2020__MT159716.1 spike protein (1-1147)(A972C_R995C)
MFVFLVLLPLVSSQCVNLTTRTQLPPAYTNSFTRGVYYPDKVFRSSVLHSTQDLFLPFFSNVTWFHAIHVSGTNGTKRFDNPVLPFNDGVYFASTEKSNIIRGWIFGTTLDSKTQSLLIVNNATNVVIKVCEFQFCNDPFLGVYYHKNNKSWMESELRVYSSANNCTFEYVSQPFLMDLEGKQGNFKNLREFVFKNIDGYFKIYSKHTPINLVRDLPQGFSALEPLVDLPIGINITRFQTLLALHRSYLTPGDSSSGWTAGAAAYYVGYLQPRTFLLKYNENGTITDAVDCALDPLSETKCTLKSFTVEKGIYQTSNFRVQPTESIVRFPNITNLCPFGEVFNATRFASVYAWNRKRISNCVADYSVLYNSASFSTFKCYGVSPTKLNDLCFTNVYADSFVIRGDEVRQIAPGQTGKIADYNYKLPDDFTGCVIAWNSNNLDSKVGGNYNYLYRLFRKSNLKPFERDISTEIYQAGSTPCNGVEGFNCYFPLQSYGFQPTNGVGYQPYRVVVLSFELLHAPATVCGPKKSTNLVKNKCVNFNFNGLTGTGVLTESNKKFLPFQQFGRDIADTTDAVRDPQTLEILDITPCSFGGVSVITPGTNTSNQVAVLYQDVNCTEVPVAIHADQLTPTWRVYSTGSNVFQTRAGCLIGAEHVNNSYECDIPIGAGICASYQTQTNSPRRARSVASQSIIAYTMSLGAENSVAYSNNSIAIPTNFTISVTTEILPVSMTKTSVDCTMYICGDSTECSNLLLQYGSFCTQLNRALTGIAVEQDKNTQEVFAQVKQIYKTPPIKDFGGFNFSQILPDPSKPSKRSFIEDLLFNKVTLADAGFIKQYGDCLGDIAARDLICAQKFNGLTVLPPLLTDEMIAQYTSALLAGTITSGWTFGAGAALQIPFAMQMAYRFNGIGVTQNVLYENQKLIANQFNSAIGKIQDSLSSTASALGKLQDVVNQNAQALNTLVKQLSSNFGCISSVLNDILSRLDKVEAEVQIDCLITGRLQSLQTYVTQQLIRAAEIRASANLAATKMSECVLGQSKRVDFCGKGYHLMSFPQSAPHGVVFLHVTYVPAQEKNFTTAPAICHDGKAHFPREGVFVSNGTHWFVTQRNFYEPQIITTDNTFVSGNCDVVIGIVNNTVYDPLQPELDS

SEQ ID NO: 3462 - protein, 1147 aa, Artificial Sequence
  SARS-CoV-2/SARS-CoV-2/Yunnan-01/human/2020/CHN__MT049951.1 spike protein (1-1147)(A972C_R995C)
MFVFLVLLPLVSSQCVNLTTRTQLPPANTNSFTRGVYYPDKVFRSSVLHSTQDLFLPFFSNVTWFHAIHVSGTNGTKRFDNPVLPFNDGVYFASTEKSNIIRGWIFGTTLDSKTQSLLIVNNATNVVIKVCEFQFCNDPFLGVYYHKNNKSWMESEFRVYSSANNCTFEYVSQPFLMDLEGKQGNFKNLREFVFKNIDGYFKIYSKHTPINLVRDLPQGFSALEPLVDLPIGINITRFQTLLALHRSYLTPGDSSSGWTAGAAAYYVGYLQPRTFLLKYNENGTITDAVDCALDPLSETKCTLKSFTVEKGIYQTSNFRVQPTESIVRFPNITNLCPFGEVFNATRFASVYAWNRKRISNCVADYSVLYNSASFSTFKCYGVSPTKLNDLCFTNVYADSFVIRGDEVRQIAPGQTGKIADYNYKLPDDFTGCVIAWNSNNLDSKVGGNYNYLYRLFRKSNLKPFERDISTEIYQAGSTPCNGVEGFNCYFPLQSYGFQPTNGVGYQPYRVVVLSFELLHAPATVCGPKKSTNLVKNKCVNFNFNGLTGTGVLTESNKKFLPFQQFGRDIADTTDAVRDPQTLEILDITPCSFGGVSVITPGTNTSNQVAVLYQDVNCTEVPVAIHADQLTPTWRVYSTGSNVFQTRAGCLIGAEHVNNSYECDIPIGAGICASYQTQTNSPRRARSVASQSIIAYTMSLGAENSVAYSNNSIAIPTNFTISVTTEILPVSMTKTSVDCTMYICGDSTECSNLLLQYGSFCTQLNRALTGIAVEQDKNTQEVFAQVKQIYKTPPIKDFGGFNFSQILPDPSKPSKRSFIEDLLFNKVTLADAGFIKQYGDCLGDIAARDLICAQKFNGLTVLPPLLTDEMIAQYTSALLAGTITSGWTFGAGAALQIPFAMQMAYRFNGIGVTQNVLYENQKLIANQFNSAIGKIQDSLSSTASALGKLQDVVNQNAQALNTLVKQLSSNFGCISSVLNDILSRLDKVEAEVQIDCLITGRLQSLQTYVTQQLIRAAEIRASANLAATKMSECVLGQSKRVDFCGKGYHLMSFPQSAPHGVVFLHVTYVPAQEKNFTTAPAICHDGKAHFPREGVFVSNGTHWFVTQRNFYEPQIITTDNTFVSGNCDVVIGIVNNTVYDPLQPELDS

SEQ ID NO: 3463 - protein, 1147 aa, Artificial Sequence
  SARS-CoV-2/USA/WA-UW292/2020__EPI_ISL_418077 spike protein (1-1147)(A972C_R995C)
MFVFLVLLPLVSSQCVNLTTRTQLPPAYTNSFTRGVYYPDKVFRSSVLHSTQDLFLPFFSNVTWFHAIHVSGTNGTKRFDNPVLPFNDGVYFASTEKSNIIRGWIFGTTLDSKTQSLLIVNNATNVVIKVCEFQFCNDPFLGVYYHKNNKSWMESEFRVYSSANNCTFEYVSQPFLMDLEGKQGNFKNLREFVFKNIDGYFKIYSKHTPINLVRDLPQGFSALEPLVDLPIGINITRFQTLLALHRSYLTPGDSSSGWTAGAAAYYVGYLQPRTFLLKYNENGTITDAVDCALDPLSETKCTLKSFTVEKGIYQTSNFRVQPTESIVRFPNITNLCPFGEVFNATRFASVYAWNRKRISNCVADYSVLYNSASFSTFKCYGVSPTKLNDLCFTNVYADSFVIRGDEVRQIAPGQTGKIADYNYKLPDDFTGCVIAWNSNNLDSKVGGNYNYLYRLFRKSNLKPFERDISTEIYQASSTPCNGVEGFNCYFPLQSYGFQPTNGVGYQPYRVVVLSFELLHAPATVCGPKKSTNLVKNKCVNFNFNGLTGTGVLTESNKKFLPFQQFGRDIADTTDAVRDPQTLEILDITPCSFGGVSVITPGTNTSNQVAVLYQDVNCTEVPVAIHADQLTPTWRVYSTGSNVFQTRAGCLIGAEHVNNSYECDIPIGAGICASYQTQTNSPRRARSVASQSIIAYTMSLGAENSVAYSNNSIAIPTNFTISVTTEILPVSMTKTSVDCTMYICGDSTECSNLLLQYGSFCTQLNRALTGIAVEQDKNTQEVFAQVKQIYKTPPIKDFGGFNFSQILPDPSKPSKRSFIEDLLFNKVTLADAGFIKQYGDCLGDIAARDLICAQKFNGLTVLPPLLTDEMIAQYTSALLAGTITSGWTFGAGAALQIPFAMQMAYRFNGIGVTQNVLYENQKLIANQFNSAIGKIQDSLSSTASALGKLQDVVNQNAQALNTLVKQLSSNFGCISSVLNDILSRLDKVEAEVQIDCLITGRLQSLQTYVTQQLIRAAEIRASANLAATKMSECVLGQSKRVDFCGKGYHLMSFPQSAPHGVVFLHVTYVPAQEKNFTTAPAICHDGKAHFPREGVFVSNGTHWFVTQRNFYEPQIITTDNTFVSGNCDVVIGIVNNTVYDPLQPELDS

SEQ ID NO: 3464 - protein, 1147 aa, Artificial Sequence
  SARS-CoV-2/Iceland/192/2020__EPI_ISL_417819 spike protein (1-1147)(A972C_R995C)
MFVFFVLLPLVSSQCVNLTTRTQLPPAYTNSFTRGVYYPDKVFRSSVLHSTQDLFLPFFSNVTWFHAIHVSGTNGTKRFDNPVLPFNDGVYFASTEKSNIIRGWIFGTTLDSKTQSLLIVNNATNVVIKVCEFQFCNDPFLGVYYHKNNKSWMESEFRVYSSANNCTFEYVSQPFLMDLEGKQGNFKNLREFVFKNIDGYFKIYSKHTPINLVRDLPQGFSALEPLVDLPIGINITRFQTLLALHRSYLTPGDSSSGWTAGAAAYYVGYLQPRTFLLKYNENGTITDAVDCALDPLSETKCTLKSFTVEKGIYQTSNFRVQPTESIVRFPNITNLCPFGEVFNATRFASVYAWNRKRISNCVADYSVLYNSASFSTFKCYGVSPTKLNDLCFTNVYADSFVIRGDEVRQIAPGQTGKIADYNYKLPDDFTGCVIAWNSNNLDSKVGGNYNYLYRLFRKSNLKPFERDISTEIYQAGSTPCNGVEGFNCYFPLQSYGFQPTNGVGYQPYRVVVLSFELLHAPATVCGPKKSTNLVKNKCVNFNFNGLTGTGVLTESNKKFLPFQQFGRDIADTTDAVRDPQTLEILDITPCSFGGVSVITPGTNTSNQVAVLYQGVNCTEVPVAIHADQLTPTWRVYSTGSNVFQTRAGCLIGAEHVNNSYECDIPIGAGICASYQTQTNSPRRARSVASQSIIAYTMSLGAENSVAYSNNSIAIPTNFTISVTTEILPVSMTKTSVDCTMYICGDSTECSNLLLQYGSFCTQLNRALTGIAVEQDKNTQEVFAQVKQIYKTPPIKDFGGFNFSQILPDPSKPSKRSFIEDLLFNKVTLADAGFIKQYGDCLGDIAARDLICAQKFNGLTVLPPLLTDEMIAQYTSALLAGTITSGWTFGAGAALQIPFAMQMAYRFNGIGVTQNVLYENQKLIANQFNSAIGKIQDSLSSTASALGKLQDVVNQNAQALNTLVKQLSSNFGCISSVLNDILSRLDKVEAEVQIDCLITGRLQSLQTYVTQQLIRAAEIRASANLAATKMSECVLGQSKRVDFCGKGYHLMSFPQSAPHGVVFLHVTYVPAQEKNFTTAPAICHDGKAHFPREGVFVSNGTHWFVTQRNFYEPQIITTDNTFVSGNCDVVIGIVNNTVYDPLQPELDS

SEQ ID NO: 3465 - protein, 1147 aa, Artificial Sequence
  SARS-CoV-2/Belgium/ULG-6939/2020__EPI_ISL_417020 spike protein (1-1147)(A972C_R995C)
MFVFLVLLPLVSSQCVNLTTRTQLPPAYTNSFTRGVYYPDKVFRSSVLHSTQDLFLPFFSNVTWFHAIHVSGTNGTKRFDNPVLPFNDGVYFASTEKSNIIRGWIFGTTLDSKTQSLLIVNNATNVVIKVCEFQFCNDPFLGVYYHKNNKSWMESEFRVYSSANNCTFEYVSQPFLMDLEGKQGNFKNLREFVFKNIDGYFKIYSKHTPINLVRDLPQGFSALEPLVDLPIGINITRFQTLLALHRSYLTPGDSSSGWTAGAAAYYVGYLQPRTFLLKYNENGTITDAVDCALDPLSETKCTLKSFTVEKGIYQTSNFRVQPTESIVRFPNITNLCPFGEVFNATRFASVYAWNRKRISNCVADYSVLYNSASFSTFKCYGVSPTKLNDLCFTNVYADSFVIRGDEVRQIAPGQTGKIADYNYKLPDDFTGCVIAWNSNNLDSKVGGNYNYLYRLFRKSNLKPFERDISTEIYQAGSTPCNGVEGFNCYFPLQSYGFQPTNGVGYQPYRVVVLSFELLHAPATVCGPKKSTNLVKNKCVNFNFNGLTGTGVLTESNKKFLPFQQFGRDIADTTDAVRDPQTLEILDITPCSFGGVSVITPGTNTSNQVAVLYQGVNCTEVPVAIHADQLTPTWRVYSTGSNVFQTRAGCLIGAEHVNNSYECDIPIGAGICASYQTQTNSPRRARSVASQSIIAYTMSLGAENSVVYSNNSIAIPTNFTISVTTEILPVSMTKTSVDCTMYICGDSTECSNLLLQYGSFCTQLNRALTGIAVEQDKNTQEVFAQVKQIYKTPPIKDFGGFNFSQILPDPSKPSKRSFIEDLLFNKVTLADAGFIKQYGDCLGDIAARDLICAQKFNGLTVLPPLLTDEMIAQYTSALLAGTITSGWTFGAGAALQIPFAMQMAYRFNGIGVTQNVLYENQKLIANQFNSAIGKIQDSLSSTASALGKLQDVVNQNAQALNTLVKQLSSNFGCISSVLNDILSRLDKVEAEVQIDCLITGRLQSLQTYVTQQLIRAAEIRASANLAATKMSECVLGQSKRVDFCGKGYHLMSFPQSAPHGVVFLHVTYVPAQEKNFTTAPAICHDGKAHFPREGVFVSNGTHWFVTQRNFYEPQIITTDNTFVSGNCDVVIGIVNNTVYDPLQPELDS

SEQ ID NO: 3466 - protein, 1147 aa, Artificial Sequence
  SARS-CoV-2/France/HF2496/2020__EPI_ISL_418231 spike protein (1-1147)(A972C_R995C)
MFVFLVLLPLVSSQCVNLTTRTQLPPAYTNSFTRGVYYPDKVFRSSVLHSTQDLFLPFFSNVTWFHAIHVSGTNGTKRFDNPVLPFNDGVYFASTEKSNIIRGWIFGTTLDSKTQSLLIVNNATNVVIKVCEFQFCNDPFLGVYYHKNNKSWMESEFRVYSSANNCTFEYVSQPFLMDLEGKQGNFKNLREFVFKNIDGYFKIYSKHTPINLVRDLPQGFSALEPLVDLPIGINITRFQTLLALHRSYLTPGDSSSGWTAGAAAYYVGYLQPRTFLLKYNENGTITDAVDCALDPLSETKCTLKSFTVEKGIYQTSNFRVQPTESIVRFPNITNLCPFGEVFNATRFASVYAWNRKRISNCVADYSVLYNSASFSTFKCYGVSPTKLNDLCFTNVYADSFVIRGDEVRQIAPGQTGKIADYNYKLPDDFTGCVIAWNSNNLDSKVGGNYNYLYRLFRKSNLKPFERDISTEIYQAGSTPCNGVEGFNCYFPLQSYGFQPTNGVGYQPYRVVVLSFELLHAPATVCGPKKSTNLVKNKCVNFNFNGLTGTGVLTESNKKFLPFQQFGRDIADTTDAVRDPQTLEILDITPCSFGGVSVITPGTNTSNQVAVLYQGVNCTEVPVAIHADQLTPTWRVYSTGSNVFQTRAGCLIGAEHVNNSYECDIPIGAGICASYQTQTNSPRRARSVASQSIIAYTMSLGAENSVAYSNNSIAIPTNFTISVTTEILPVSMTKTSVDCTMYICGDSTECSNLLLQYGSFCTQLNRALTGIAVEQDKNTQEVFAQVKQIYKTPPIKDFGGFNFSQILPDPSKPSKRSFIEDLLFNKVTLADAGFIKQYGDCLGDIVARDLICAQKFNGLTVLPPLLTDEMIAQYTSALLAGTITSGWTFGAGAALQIPFAMQMAYRFNGIGVTQNVLYENQKLIANQFNSAIGKIQDSLSSTASALGKLQDVVNQNAQALNTLVKQLSSNFGCISSVLNDILSRLDKVEAEVQIDCLITGRLQSLQTYVTQQLIRAAEIRASANLAATKMSECVLGQSKRVDFCGKGYHLMSFPQSAPHGVVFLHVTYVPAQEKNFTTAPAICHDGKAHFPREGVFVSNGTHWFVTQRNFYEPQIITTDNTFVSGNCDVVIGIVNNTVYDPLQPELDS

SEQ ID NO: 3467 - protein, 1147 aa, Artificial Sequence
  SARS-CoV-2/USA/WA-UW291/2020__EPI_ISL_418076 spike protein (1-1147)(A972C_R995C)
MFVFLVLLPLVSSQCVNLTTRTQLPPAYTNSFTRGVYYPDKVFRSSVLHSTQDLFLPFFSNVTWFHAIHVSGTNGTKRFDNPVLPFNDGVYFASTEKSNIIRGWIFGTTLDSKTQSLLIVNNATNVVIKVCEFQFCNDPFLGVYYHKNNKSWMESEFRVYSSANNCTFEYVSQPFLMDLEGKQGNFKNLREFVFKNIDGYFKIYSKHTPINLVRDLPQGFSALEPLVDLPIGINITRFQTLLALHRSYLTPGDSSSGWTAGAAAYYVGYLQPRTFLLKYNENGTITDAVDCALDPLSETKCTLKSFTVEKGIYQTSNFRVQPTESIVRFPNITNLCPFGEVFNATRFASVYAWNRKRISNCVADYSVLYNSASFSTFKCYGVSPTKLNDLCFTNVYADSFVIRGDEVRQIAPGQTGKIADYNYKLPDDFTGCVIAWNSNNLDSKVGGNYNYLYRLFRKSNLKPFERDISTEIYQAGSTPCNGVEGFNCYFPLQSYGFQPTNGVGYQPYRVVVLSFELLHAPATVCGPKKSTNLVKNKCVNFNFNGLTGTGVLTESNKKFLPFQQFGRDIADTTDAVRDPQTLEILDITPCSFGGVSVITPGTNTSNQVAVLYQGVNCTEVPVAIHADQLTPTWRVYSTGSNVFQTRAGCLIGAEHVNNSYECDIPIGAGICASYQTQTNSPRRARSVASQSIIAYTMSLGAENSVAYSNNSIAIPTNFTISVTTEILPVSMTKTSVDCTMYICGDSTECSNLLLQYGSFCTQLNRALTGIAVEQDKNTQEVFAQVKQIYKTPPIKDFGGFNFSQILPDPSKPSKRSFIEDLLFNKVTLADAGFIKQYGDCLGDIAARDLICAQKFNGLTVLPPLLTDEMIAQYTSALLAGTITSGWTFGAGAALQIPFAMQMAYRFNGIGVTQNVLYENQKLIANQFNSAIGKIQYSLSSTASALGKLQDVVNQNAQALNTLVKQLSSNFGCISSVLNDILSRLDKVEAEVQIDCLITGRLQSLQTYVTQQLIRAAEIRASANLAATKMSECVLGQSKRVDFCGKGYHLMSFPQSAPHGVVFLHVTYVPAQEKNFTTAPAICHDGKAHFPREGVFVSNGTHWFVTQRNFYEPQIITTDNTFVSGNCDVVIGIVNNTVYDPLQPELDS

SEQ ID NO: 3468 - protein, 1147 aa, Artificial Sequence; identical to SEQ ID NO: 3431
  SARS-CoV-2/Portugal/PT0034/2020__EPI_ISL_418019 spike protein (1-1147)(A972C_R995C)

SEQ ID NO: 3469 - protein, 1147 aa, Artificial Sequence; identical to SEQ ID NO: 3423
  SARS-CoV-2/Iceland/202/2020__EPI_ISL_417750 spike protein (1-1147)(A972C_R995C)

SEQ ID NO: 3470 - protein, 1147 aa, Artificial Sequence
  SARS-CoV-2/USA/WA-UW261/2020__EPI_ISL_418046 spike protein (1-1147)(A972C_R995C)
MFVFLVLLPLVSSQCVNLTTRTQLPPAYTNSFTRGVYYPDKVFRSSVLHSTQDLFLPFFSNVTWFHAIHVSGTNGTKRFDNPVLPFNDGVYFASTEKSNIIRGWIFGTTLDSKTQSLLIVNNATNVVIKVCEFQFCNDPFLGVYYHKNNKSWMESEFRVYSSANNCTFEYVSQPFLMDLEGKQGNFKNLREFVFKNIDGYFKIYSKHTPINLVRDLPQGFSALEPLVDLPIGINITRFQTLLALHRSYLTPGDSSSGWTAGAAAYYVGYLQPRTFLLKYNENGTITDAVDCALDPLSETKCTLKSFTVEKGIYQTSNFRVQPTESIVRFPNITNLCPFGEVFNATRFTSVYAWNRKRISNCVADYSVLYNSASFSTFKCYGVSPTKLNDLCFTNVYADSFVIRGDEVRQIAPGQTGKIADYNYKLPDDFTGCVIAWNSNNLDSKVGGNYNYLYRLFRKSNLKPFERDISTEIYQAGSTPCNGVEGFNCYFPLQSYGFQPTNGVGYQPYRVVVLSFELLHAPATVCGPKKSTNLVKNKCVNFNFNGLTGTGVLTESNKKFLPFQQFGRDIADTTDAVRDPQTLEILDITPCSFGGVSVITPGTNTSNQVAVLYQDVNCTEVPVAIHADQLTPTWRVYSTGSNVFQTRAGCLIGAEHVNNSYECDIPIGAGICASYQTQTNSPRRARSVASQSIIAYTMSLGAENSVAYSNNSIAIPTNFTISVTTEILPVSMTKTSVDCTMYICGDSTECSNLLLQYGSFCTQLNRALTGIAVEQDKNTQEVFAQVKQIYKTPPIKDFGGFNFSQILPDPSKPSKRSFIEDLLFNKVTLADAGFIKQYGDCLGDIAARDLICAQKFNGLTVLPPLLTDEMIAQYTSALLAGTITSGWTFGAGAALQIPFAMQMAYRFNGIGVTQNVLYENQKLIANQFNSAIGKIQDSLSSTASALGKLQDVVNQNAQALNTLVKQLSSNFGCISSVLNDILSRLDKVEAEVQIDCLITGRLQSLQTYVTQQLIRAAEIRASANLAATKMSECVLGQSKRVDFCGKGYHLMSFPQSAPHGVVFLHVTYVPAQEKNFTTAPAICHDGKAHFPREGVFVSNGTHWFVTQRNFYEPQIITTDNTFVSGNCDVVIGIVNNTVYDPLQPELDS

SEQ ID NO: 3471 - protein, 1147 aa, Artificial Sequence
  SARS-CoV-2/Portugal/PT0035/2020__EPI_ISL_418020 spike protein (1-1147)(A972C_R995C)
MFVFLVLLPLVSSQCVNLTTRTQLPPAYTNSFTRGVYYPDKVFRSSVLHSTQDLFLPFFSNVTWFHAIHVSGTNGTKRFDNPVLPFNDGVYFASTEKSNIIRGWIFGTTLDSKTQSLLIVNNATNVVIKVCEFQFCNDPFLGVYYHKNNKSWMESEFRVYSSANNCTFEYVSQPFLMDLEGKQGNFKNLREFVFKNIDGYFKIYSKHTPINLVRDLPQGFSALEPLVDLPIGINITRFQTLLALHRSYLTPGDSSSGWTAGAAAYYVGYLQPRTFLLKYNENGTITDAVDCALDPLSETKCTLKSFTVEKGIYQTSNFRVQPTESIVRFPNITNLCPFGEVFNATRFASVYAWNRKRISNCVADYSVLYNSASFSTFKCYGVSPTKLNDLCFTNVYADSFVIRGDEVRQIAPGQTGKIADYNYKLPDDFTGCVIAWNSNNLDSKVGGNYNYLYRLFRKSNLKPFERDISTEIYQAGSTPCNGVEGFNCYFPLQSYGFQPTNGVGYQPYRVVVLSFELLHAPATVCGPKKSTNLVKNKCVNFNFNGLTGTGVLTESNKKFLPFQQFGRDIADTTDAVRDPQTLEILDITPCSFGGVSVITPGTNTSNQVAVLYQDVNCTEVPVAIHADQLTPTWRVYSTGSNVFQTRAGCLIGAEHVNNSYECDIPIGAGICASYQTQTNSPRRARSVASQSIIAYTMSLGAENSVAYSNNSIAIPTNFTISVTTEILPVSMTKTSVDCTMYICGDSTECSNLLLQYGSFCTQLNRALTGIAVEQDKNTQEVFAQVKQIYKTPPIKDFGGFNFSQILPDPSKPSKRSFIEDLLFNKVTLADAGFIKQYGDCLGDISARDLICAQKFNGLTVLPPLLTDEMIAQYTSALLAGTITSGWTFGAGAALQIPFAMQMAYRFNGIGVTQNVLYENQKLIANQFNSAIGKIQDSLSSTASALGKLQDVVNQNAQALNTLVKQLSSNFGCISSVLNDILSRLDKVEAEVQIDCLITGRLQSLQTYVTQQLIRAAEIRASANLAATKMSECVLGQSKRVDFCGKGYHLMSFPQSAPHGVVFLHVTYVPAQEKNFTTAPAICHDGKAHFPREGVFVSNGTHWFVTQRNFYEPQIITTDNTFVSGNCDVVIGIVNNTVYDPLQPELDS

SEQ ID NO: 3472 - protein, 1147 aa, Artificial Sequence
  SARS-CoV-2/USA/NY-NYUMC7/2020__EPI_ISL_418192 spike protein (1-1147)(A972C_R995C)
MFVFLVLLPLVSSQCVNLTTRTQLPPAYTNSFTRGVYYPDKVFRSSVLHSTQDLFLPFFSNVTWFHAIHVSGTNGTKRFDNPVLPFNDGVYFASTEKSNIIRGWIFGTTLDSKTQSLLIVNNATNVVIKVCEFQFCNDPFLGVYHHKNNKSWMESEFRVYSSANNCTFEYVSQPFLMDLEGKQGNFKNLREFVFKNIDGYFKIYSKHTPINLVRDLPQGFSALEPLVDLPIGINITRFQTLLALHRSYLTPGDSSSGWTAGAAAYYVGYLQPRTFLLKYNENGTITDAVDCALDPLSETKCTLKSFTVEKGIYQTSNFRVQPTESIVRFPNITNLCPFGEVFNATRFASVYAWNRKRISNCVADYSVLYNSASFSTFKCYGVSPTKLNDLCFTNVYADSFVIRGDEVRQIAPGQTGKIADYNYKLPDDFTGCVIAWNSNNLDSKVGGNYNYLYRLFRKSNLKPFERDISTEIYQAGSTPCNGVEGFNCYFPLQSYGFQPTNGVGYQPYRVVVLSFELLHAPATVCGPKKSTNLVKNKCVNFNFNGLTGTGVLTESNKKFLPFQQFGRDIADTTDAVRDPQTLEILDITPCSFGGVSVITPGTNTSNQVAVLYQGVNCTEVPVAIHADQLTPTWRVYSTGSNVFQTRAGCLIGAEHVNNSYECDIPIGAGICASYQTQTNSPRRARSVASQSIIAYTMSLGAENSVAYSNNSIAIPTNFTISVTTEILPVSMTKTSVDCTMYICGDSTECSNLLLQYGSFCTQLNRALTGIAVEQDKNTQEVFAQVKQIYKTPPIKDFGGFNFSQILPDPSKPSKRSFIEDLLFNKVTLADAGFIKQYGDCLGDIAARDLICAQKFNGLTVLPPLLTDEMIAQYTSALLAGTITSGWTFGAGAALQIPFAMQMAYRFNGIGVTQNVLYENQKLIANQFNSAIGKIQDSLSSTASALGKLQDVVNQNAQALNTLVKQLSSNFGCISSVLNDILSRLDKVEAEVQIDCLITGRLQSLQTYVTQQLIRAAEIRASANLAATKMSECVLGQSKRVDFCGKGYHLMSFPQSAPHGVVFLHVTYVPAQEKNFTTAPAICHDGKAHFPREGVFVSNGTHWFVTQRNFYEPQIITTDNTFVSGNCDVVIGIVNNTVYDPLQPELDS

SEQ ID NO: 3473 - protein, 1147 aa, Artificial Sequence
  SARS-CoV-2/Iceland/189/2020__EPI_ISL_417709 spike protein (1-1147)(A972C_R995C)
MFVFLVLLPLVSSQCVNLTTRTQLPPAYTNSFTRGVYYPDKVFRSSVLHSTQDLFLPFFSNVTWFHAIHVSGTNGTKRFDNPVLPFNDGVYFASTEKSNIIRGWIFGTTLDSKTQSLLIVNNATNVVIKVCEFQFCNDPFLGVYYHKNNKSWMESEFRVYSSANNCTFEYVSQPFLMDLEGKQGNFKNLREFVFKNIDGYFKIYSKHTPINLVRDLPQGFSALEPLVDLPIGINITRFQTLLALHRSYLTPGDSSSGWTAGAAAYYVGYLQPRTFLLKYNENGTITDAVDCALDPLSETKCTLKSFTVEKGIYQTSNFRVQPTESIVRFPNITNLCPFGEVFNATRFASVYAWNRKRISNCVADYSVLYNSASFSTFKCYGVSPTKLNDLCFTNVYADSFVIRGDEVRQIAPGQTGKIADYNYKLPDDFTGCVIAWNSNNLDSKVGGNYNYLYRLFRKSNLKPFERDISTEIYQAGSTPCNGVEGFNCYFPLQSYGFQPTNGVGYQPYRVVVLSFELLHAPATVCGPKKSTNLVKNKCVNFNFNGLTGTGVLTESNKKFLPFQQFGRDIADTTDAVRDPQTLEILDITPCSFGGVSVITPGTNTSNQVAVLYQGVNCTEVPVAIHADQLTPTWRVYSTGSNVFQTRAGCLIGAEHVNNSYECDIPIGAGICASYQTQTNSPRRARSVASQSIIAYTMSLGAENSVAYSNNSIAIPTNFTISVTTEILPVSMTKTSVDCTMYICGDSTECSNLLLQYGSFCTQLNRALTGIAVEQDKNTQEVFAQVKQIYKTPPIKDFGGFNFSQILPDPSKPSKRSFIEDLLFNKVTLADAGFTKQYGDCLGDIAARDLICAQKFNGLTVLPPLLTDEMIAQYTSALLAGTITSGWTFGAGAALQIPFAMQMAYRFNGIGVTQNVLYENQKLIANQFNSAIGKIQDSLSSTASALGKLQDVVNQNAQALNTLVKQLSSNFGCISSVLNDILSRLDKVEAEVQIDCLITGRLQSLQTYVTQQLIRAAEIRASANLAATKMSECVLGQSKRVDFCGKGYHLMSFPQSAPHGVVFLHVTYVPAQEKNFTTAPAICHDGKAHFPREGVFVSNGTHWFVTQRNFYEPQIITTDNTFVSGNCDVVIGIVNNTVYDPLQPELDS

SEQ ID NO: 3474 - protein, 1147 aa, Artificial Sequence
  SARS-CoV-2/Australia/NSW56/2020__EPI_ISL_417408 spike protein (1-1147)(A972C_R995C)
MFVFLVLLPLVSSQCVNLTTRTQLPPAYTNSFTRGVYYPDKVFRSSVLHSTQDLFLPFFSNVTWFHAIHVSGTNGTKRFDNPVLPFNDGVYFASTEKSNIIRGWIFGTTLDSKTQSLLIVNNATNVVIKVCEFQFCNDPFLGVYYHKNNKSWMESEFRVYSSANNCTFEYVSQPFLMDLEGKQGNFKNLREFVFKNIDGYFKIYSKHTPINLVRDLPQGFSALEPLVDLPIGINITRFQTLLALHRSYLTPGDSSSGWTAGAAAYYVGYLQPRTFLLKYNENGTITDAVDCALDPLSETKCTLKSFTVEKGIYQTSNFRVQPTESIVRFPNITNLCPFGEVFNATRFASVYAWNRKRISNCVADYSVLYNSASFSTFKCYGVSPTKLNDLCFTNVYADSFVIRGDEVRQIAPGQTGKIADYNYKLPDDFTGCVIAWNSNNLDSKVGGNYNYLYRLFRKSNLKPFERDISTEIYQAGSTPCNGVEGFNCYFPLQSYGFQPTNGVGYQPYRVVVLSFELLHAPATVCGPKKSTNLVKNKCVNFNFNGLTGTGVLTESNKKFLPFQQFGRDIADTTDAVRDPQTLEILDITPCSFGGVSVITPGTNTSNQVAVLYQDVNCTEVPVAIHADQLTPTWRVYSTGSNVFQTRAGCLIGAEHVNNSYECDIPIGAGICASYQTQTNSPRRARSVASQSIIAYTMSLGAENSVAYSNNSIAIPTNFTISVTTEILPVSMTKTSVDCTMYICGDSTECSNLLLQYGSFCTQLNRALTGIAVEQDKNTQEVFAQVKQIYKTPPIKDFGGFNFSQILPDSSKPSKRSFIEDLLFNKVTLADAGFIKQYGDCLGDIAARDLICAQKFNGLTVLPPLLTDEMIAQYTSALLAGTITSGWTFGAGAALQIPFAMQMAYRFNGIGVTQNVLYENQKLIANQFNSAIGKIQDSLSSTASALGKLQDVVNQNAQALNTLVKQLSSNFGCISSVLNDILSRLDKVEAEVQIDCLITGRLQSLQTYVTQQLIRAAEIRASANLAATKMSECVLGQSKRVDFCGKGYHLMSFPQSAPHGVVFLHVTYVPAQEKNFTTAPAICHDGKAHFPREGVFVSNGTHWFVTQRNFYEPQIITTDNTFVSGNCDVVIGIVNNTVYDPLQPELDS

SEQ ID NO: 3475 - protein, 1147 aa, Artificial Sequence
  SARS-CoV-2/Iceland/280/2020__EPI_ISL_417608 spike protein (1-1147)(A972C_R995C)
MFVFLVLLPLVSSQCVNLTTRTQLPPAYTNSFTRGVYYPDKVFRSSVLHSTQDLFLPFFSNVTWFHAIHVSGTNGTKRFDNPVLPFNDGVYFASTEKSNIIRGWIFGTTLDSKTQSLLIVNNATNVVIKVCEFQFCNDPFLGVYYHKNNKSWMESEFRVYSSANNCTFEYVSQPFLMDLEGKQGNFKNLREFVFKNIDGYFKIYSKHTPINLVRDLPQGFSALEPLVDLPIGINITRFQTLLALHRSYLTPGDSSSGWTAGAAAYYVGYLQPRTFLLKYNENGTITDAVDCALDPLSETKCTLKSFTVEKGIYQTSNFRVQPTESIVRFPNITNLCPFGEVFNATRFASVYAWNRKRISNCVADYSVLYNSASFSTFKCYGVSPTKLNDLCFTNVYADSFVIRGDEVRQIAPGQTGKIADYNYKLPDDFTGCVIAWNSNNLDSKVGGNYNYLYRLFRKSNLKPFERDISTEIYQAGSTPCNGVEGFNCYFPLQSYGFQPTNGVGYQPYRVVVLSFELLHAPATVCGPKKSTNLVKNKCVNFNFNGLTGTGVLTESNKKFLPFQQFGRDIADTTDAVRDPQTLEILDITPCSFGGVSVITPGTNTSNQVAVLYQGVNCTEVPVAIHADQLTPTWRVYSTGSNVFQTRAGCLIGAEHVNNSYECDIPIGAGICASYHTQTNSPRRARSVASQSIIAYTMSLGAENSVAYSNNSIAIPTNFTISVTTEILPVSMTKTSVDCTMYICGDSTECSNLLLQYGSFCTQLNRALTGIAVEQDKNTQEVFAQVKQIYKTPPIKDFGGFNFSQILPDPSKPSKRSFIEDLLFNKVTLADAGFIKQYGDCLGDIAARDLICAQKFNGLTVLPPLLTDEMIAQYTSALLAGTITSGWTFGAGAALQIPFAMQMAYRFNGIGVTQNVLYENQKLIANQFNSAIGKIQDSLSSTASALGKLQDVVNQNAQALNTLVKQLSSNFGCISSVLNDILSRLDKVEAEVQIDCLITGRLQSLQTYVTQQLIRAAEIRASANLAATKMSECVLGQSKRVDFCGKGYHLMSFPQSAPHGVVFLHVTYVPAQEKNFTTAPAICHDGKAHFPREGVFVSNGTHWFVTQRNFYEPQIITTDNTFVSGNCDVVIGIVNNTVYDPLQPELDS

SEQ ID NO: 3476 - protein, 1147 aa, Artificial Sequence; identical to SEQ ID NO: 3431
  SARS-CoV-2/Iceland/247/2020__EPI_ISL_417575 spike protein (1-1147)(A972C_R995C)

SEQ ID NO: 3477 - protein, 1147 aa, Artificial Sequence
  SARS-CoV-2/Iceland/238/2020__EPI_ISL_417566 spike protein (1-1147)(A972C_R995C)
MFVFLVLLPLVSSQCVNLTTRTQLPPAYTNSFTRGVYYPDKVFRSSVLHSTQDLFLPFFSNVTWFHAIHVSGTNGTKRFDNPVLPFNDGVYFASTEKSNIIRGWIFGTTLDSKTQSLLIVNNATNVVIKVCEFQFCNDPFLGVYYHKNNKSWMESEFRVYSSANNCTFEYVSQPFLMDLEGKQGNFKNLREFVFKNIDGYFKIYSKHTPINLVRDLPQGFSALEPLVDLPIGINITRFQTLLALHRSYLTPGDSSSGWTAGAAAYYVGYLQPRTFLLKYNENGTITDAVDCALDPLSETKCTLKSFTVEKGIYQTSNFRVQPTESIVRFPNITNLCPFGEVFNATRFASVYAWNRKRISNCVADYSVLYNSASFSTFKCYGVSPTKLNDLCFTNVYADSFVIRGDEVRQIAPGQTGKIADYNYKLPDDFTGCVIAWNSNNLDSKVGGNYNYLYRLFRKSNLKPFERDISTEIYQAGSTPCNGVEGFNCYFPLQSYGFQPTNGVGYQPYRVVVLSFELLHAPATVCGPKKSTNLVKNKCVNFNFNGLTGTGVLTESNKKFLPFQQFGRDIADTTDAVRDPQTLEILDITPCSFGGVSVITPGTNTSNQVAVLYQGVNCTEVPVAIHADQLTPTWRVYSTGSNVFQTRAGCLIGAEHVNNSYECDIPIGAGICASYQTQTNSPRRARSVASQSIIAYTMSLGAENSVAYSNNSIAIPTNFTISVTTEILPVSMTKTSVDCTMYICGDSTECSNLLLQYGSFCTQLNRALTGIAVEQDKNTQEVFAQVKQIYKTPPIKDFGGFNFSQILPDPSKPSKRSFIEDLLFNKVTLADVGFIKQYGDCLGDIAARDLICAQKFNGLTVLPPLLTDEMIAQYTSALLAGTITSGWTFGAGAALQIPFAMQMAYRFNGIGVTQNVLYENQKLIANQFNSAIGKIQDSLSSTASALGKLQDVVNQNAQALNTLVKQLSSNFGCISSVLNDILSRLDKVEAEVQIDCLITGRLQSLQTYVTQQLIRAAEIRASANLAATKMSECVLGQSKRVDFCGKGYHLMSFPQSAPHGVVFLHVTYVPAQEKNFTTAPAICHDGKAHFPREGVFVSNGTHWFVTQRNFYEPQIITTDNTFVSGNCDVVIGIVNNTVYDPLQPELDS

SEQ ID NO: 3478 - protein, 1147 aa, Artificial Sequence
  SARS-CoV-2/Greece/16/2020__EPI_ISL_418265 spike protein (1-1147)(A972C_R995C)
MFVFLVLLPLVSSQCVNLTTRTQLPPAYTNSFTRGVYYPDKVFRSSVLHSTQDLFLPFFSNVTWFHAIHVSGTNGTKRFDNPVLPFNDGVYFASTEKSNIIRGWIFGTTLDSKTQSLLIVNNATNVVIKVCEFQFCNDPFLGVYYHKNNKSWMESEFRVYSSANNCTFEYVSQPFLMDLEGKQGNFKNLREFVFKNVDGYFKIYSKHTPINLVRDLPQGFSALEPLVDLPIGINITRFQTLLALHRSYLTPGDSSSGWTAGAAAYYVGYLQPRTFLLKYNENGTITDAVDCALDPLSETKCTLKSFTVEKGIYQTSNFRVQPTESIVRFPNITNLCPFGEVFNATRFASVYAWNRKRISNCVADYSVLYNSASFSTFKCYGVSPTKLNDLCFTNVYADSFVIRGDEVRQIAPGQTGKIADYNYKLPDDFTGCVIAWNSNNLDSKVGGNYNYLYRLFRKSNLKPFERDISTEIYQAGSTPCNGVEGFNCYFPLQSYGFQPTNGVGYQPYRVVVLSFELLHAPATVCGPKKSTNLVKNKCVNFNFNGLTGTGVLTESNKKFLPFQQFGRDIADTTDAVRDPQTLEILDITPCSFGGVSVITPGTNTSNQVAVLYQDVNCTEVPVAIHADQLTPTWRVYSTGSNVFQTRAGCLIGAEHVNNSYECDIPIGAGICASYQTQTNSPRRARSVASQSIIAYTMSLGAENSVAYSNNSIAIPTNFTISVTTEILPVSMTKTSVDCTMYICGDSTECSNLLLQYGSFCTQLNRALTGIAVEQDKNTQEVFAQVKQIYKTPPIKDFGGFNFSQILPDPSKPSKRSFIEDLLFNKVTLADAGFIKQYGDCLGDIAARDLICAQKFNGLTVLPPLLTDEMIAQYTSALLAGTITSGWTFGAGAALQIPFAMQMAYRFNGIGVTQNVLYENQKLIANQFNSAIGKIQDSLSSTASALGKLQDVVNQNAQALNTLVKQLSSNFGCISSVLNDILSRLDKVEAEVQIDCLITGRLQSLQTYVTQQLIRAAEIRASANLAATKMSECVLGQSKRVDFCGKGYHLMSFPQSAPHGVVFLHVTYVPAQEKNFTTAPAICHDGKAHFPREGVFVSNGTHWFVTQRNFYEPQIITTDNTFVSGNCDVVIGIVNNTVYDPLQPELDS

SEQ ID NO: 3479 - protein, 1147 aa, Artificial Sequence
  SARS-CoV-2/Iceland/319/2020__EPI_ISL_417648 spike protein (1-1147)(A972C_R995C)
MFVFLVLLPLVSSQCVNLTTRTQLPPAYTNSFTRGVYYPDKVFRSSVLHSTQDLFLPFFSNVTWFHAIHVSGTNGTKRFDNPVLPFNDGVYFASTEKSNIIRGWIFGTTLDSKTQSLLIVNNATNVVIKVCEFQFCNDPFLGVYYHKNNKSWMESEFRVYSSANNCTFEYVSQPFLIDLEGKQGNFKNLREFVFKNIDGYFKIYSKHTPINLVRDLPQGFSALEPLVDLPIGINITRFQTLLALHRSYLTPGDSSSGWTAGAAAYYVGYLQPRTFLLKYNENGTITDAVDCALDPLSETKCTLKSFTVEKGIYQTSNFRVQPTESIVRFPNITNLCPFGEVFNATRFASVYAWNRKRISNCVADYSVLYNSASFSTFKCYGVSPTKLNDLCFTNVYADSFVIRGDEVRQIAPGQTGKIADYNYKLPDDFTGCVIAWNSNNLDSKVGGNYNYLYRLFRKSNLKPFERDISTEIYQAGSTPCNGVEGFNCYFPLQSYGFQPTNGVGYQPYRVVVLSFELLHAPATVCGPKKSTNLVKNKCVNFNFNGLTGTGVLTESNKKFLPFQQFGRDIADTTDAVRDPQTLEILDITPCSFGGVSVITPGTNTSNQVAVLYQGVNCTEVPVAIHADQLTPTWRVYSTGSNVFQTRAGCLIGAEHVNNSYECDIPIGAGICASYQTQTNSPRRARSVASQSIIAYTMSLGAENSVAYSNNSIAIPTNFTISVTTEILPVSMTKTSVDCTMYICGDSTECSNLLLQYGSFCTQLNRALTGIAVEQDKNTQEVFAQVKQIYKTPPIKDFGGFNFSQILPDPSKPSKRSFIEDLLFNKVTLADAGFIKQYGDCLGDIAARDLICAQKFNGLTVLPPLLTDEMIAQYTSALLAGTITSGWTFGAGAALQIPFAMQMAYRFNGIGVTQNVLYENQKLIANQFNSAIGKIQDSLSSTASALGKLQDVVNQNAQALNTLVKQLSSNFGCISSVLNDILSRLDKVEAEVQIDCLITGRLQSLQTYVTQQLIRAAEIRASANLAATKMSECVLGQSKRVDFCGKGYHLMSFPQSAPHGVVFLHVTYVPAQEKNFTTAPAICHDGKAHFPREGVFVSNGTHWFVTQRNFYEPQIITTDNTFVSGNCDVVIGIVNNTVYDPLQPELDS

SEQ ID NO: 3480 - protein, 1147 aa, Artificial Sequence
  SARS-CoV-2/Congo/94/2020__EPI_ISL_417947 spike protein (1-1147)(A972C_R995C)
MFVFLVLLPLVSSQCVNLTTRTQLPPAYTNSFTRGVYYPDKVFRSSVLHSTQDLFLPFFSNVTWFHAIHVSGTNGTKRFDNPVLPFNDGVYFASTEKSNIIRGWIFGTTLDSKTQSLLIVNNATNVVIKVCEFQFCNDPFLGVYYHKNNKSWMESEFRVYSSANNCTFEYVSQPFLMDLEGKQGNFKNLREFVFKNIDGYFKIYSKHTPINLVRDLPQGFSALEPLVDLPIGINITRFQTLLALHRSYLTPGDSSSGWTAGAAAYYVGYLQPRTFLLKYNENGTITDAVDCALDPLSETKCTLKSFTVEKGIYQTSNFRVQPTESIVRFPNITNLCPFGEVFNATRFASVYAWNRKRISNCVADYSVLYNSASFSTFKCYGVSPTKLNDLCFTNVYADSFVIRGDEVRQIAPGQTGKIADYNYKLPDDFTGCVIAWNSNNLDSKVGGNYNYLYRLFRKSNLKPFERDISTEIYQAGSTPCNGVEGFNCYFPLQSYGFQPTNGVGYQPYRVVVLSFELLHAPATVCGPKKSTNLVKNKCVNFNFNGLTGTGVLTESNKKFLPFQQFGRDIADTTDAVRDPQTLEILDITPCSFGGVSVITPGTNTSNQVAVLYQGVNCTEVPVAIHADQLTPTWRVYSTGSNVFQTRAGCLIGAEHVNNSYECDIPIGAGICASYQTQTNSPRRARSVASQSIIAYTMSLGAENSVAYSNNSIAIPTNFTISVTTEILPVSMTKTSVDCTMYICGDSTECSNLLLQYGSFCTQLNRALTGIAVEQDKNTQEVFAQVKQIYKTPPIKDFGGFNFSQILPDPSKPSKRSFIEDILFNKVTLADAGFIKQYGDCLGDIAARDLICAQKFNGLTVLPPLLTDEMIAQYTSALLAGTITSGWTFGAGAALQIPFAMQMAYRFNGIGVTQNVLYENQKLIANQFNSAIGKIQDSLSSTASALGKLQDVVNQNAQALNTLVKQLSSNFGCISSVLNDILSRLDKVEAEVQIDCLITGRLQSLQTYVTQQLIRAAEIRASANLAATKMSECVLGQSKRVDFCGKGYHLMSFPQSAPHGVVFLHVTYVPAQEKNFTTAPAICHDGKAHFPREGVFVSNGTHWFVTQRNFYEPQIITTDNTFVSGNCDVVIGIVNNTVYDPLQPELDS

SEQ ID NO: 3481 - protein, 1147 aa, Artificial Sequence
  SARS-CoV-2/Congo/158/2020__EPI_ISL_417950 spike protein (1-1147)(A972C_R995C)
MFVFLVLLPLVSSQCVNLTTRTQLPPAYTNSFTRGVYYPDKVFRSSVLHSTQDLFLPFFSNVTWFHAIHVSGTNGTKRFDNPVLPFNDGVYFASTEKSNIIRGWIFGTTLDSKTQSLLIVNNATNVVIKVCEFQFCNDPFLGVYYHKNNKSWMESEFRVYSSANNCTFEYVSQPFLMDLEGKQGNFKNLREFVFKNIDGYFKIYSKHTPINLVRDLPQGFSALEPLVDLPIGINITRFQTLLALHRSYLTPGDSSSGWTAGAAAYYVGYLQPRTFLLKYNENGTITDAVDCALDPLSETKCTLKSFTVEKGIYQTSNFRVQPTESIVRFPNITNLCPFGEVFNATRFASVYAWNRKRISNCVADYSVLYNSASFSTFKCYGVSPTKLNDLCFTNVYADSFVIRGDEVRQIAPGQTGKIADYNYKLPDDFTGCVIAWNSNNLDSKVGGNYNYLYRLFRKSNLKPFERDISTEIYQAGSTPCNGVEGFNCYFPLQSYGFQPTNGVGYQPYRVVVLSFELLHAPATVCGPKKSTNLVKNKCVNFNFNGLTGTGVLTESNKKFLPFQQFGRDIADTTDAVRDPQTLEILDITPCSFGGVSVITPGTNTSNQVAVLYQDVNCTEVPVAIHADQLTPTWRVYSTGSNVFQTRAGCLIGAEHVNNSYECDIPIGAGICASYQTQTNSPRRARSVASQSIIAYTMSLGAENSVAYSNNSIAIPTNFTISVTTEILPVSMTKTSVDCTMYICGDSTECSNLLLQYGSFCTQLNRALTGIAVEQDKNTQEVFAQVKQIYKTPPIKDFGGFNFSQILPDPSKPSKRSFIEDLLFNKVTLADAGFIKQYGDCLGDIAARDLICAQKFNGLTVLPPLLTDEMIAQYTSALLAGTITSGWTFGAGAALQIPFAMQMAYRFNGIGVTQNVLYENQKLIANQFNSAIGKIQDSLSSTASALGKLQDVVNQNAQALNTLVKQLSSNFGCISSVLNDILSRLDKVEAEVQIDCLITGRLQSLQTYVTQQLIRAAEIRASANLAATKMSECVLGQSKRVDFCGKGYHLMSFPQSAPHGVVFLHVTYVPAQEKNFTTAPAICHDGKAHFPREGVFVSNGTHWFVTQRNFYEPQIITTDNTFLSGNCDVVIGIVNNTVYDPLQPELDS

SEQ ID NO: 3482 - protein, 1147 aa, Artificial Sequence
  SARS-CoV-2/USA/UT-00034/2020__EPI_ISL_417977 spike protein (1-1147)(A972C_R995C)
MFVFLVLLPLVSSQCVNLTTRTQLPPAYTNSFTRGVYYPDKVFRSSVLHSTQDLFLPFFSNVTWFHAIHVSGTNGTKRFDNPVLPFNDGVYFASTEKSNIIRGWIFGTTLDSKTQSLLIVNNATNVVIKVCEFQFCNDPFLGVYYYKNNKSWMESEFRVYSSANNCTFEYVSQPFLMDLEGKQGNFKNLREFVFKNIDGYFKIYSKHTPINLVRDLPQGFSALEPLVDLPIGINITRFQTLLALHRSYLTPGDSSSGWTAGAAAYYVGYLQPRTFLLKYNENGTITDAVDCALDPLSETKCTLKSFTVEKGIYQTSNFRVQPTESIVRFPNITNLCPFGEVFNATRFASVYAWNRKRISNCVADYSVLYNSASFSTFKCYGVSPTKLNDLCFTNVYADSFVIRGDEVRQIAPGQTGKIADYNYKLPDDFTGCVIAWNSNNLDSKVGGNYNYLYRLFRKSNLKPFERDISTEIYQAGSTPCNGVEGFNCYFPLQSYGFQPTNGVGYQPYRVVVLSFELLHAPATVCGPKKSTNLVKNKCVNFNFNGLTGTGVLTESNKKFLPFQQFGRDIADTTDAVRDPQTLEILDITPCSFGGVSVITPGTNTSNQVAVLYQGVNCTEVPVAIHADQLTPTWRVYSTGSNVFQTRAGCLIGAEHVNNSYECDIPIGAGICASYQTQTNSPRRARSVASQSIIAYTMSLGAENSVAYSNNSIAIPTNFTISVTTEILPVSMTKTSVDCTMYICGDSTECSNLLLQYGSFCTQLNRALTGIAVEQDKNTQEVFAQVKQIYKTPPIKDFGGFNFSQILPDPSKPSKRSFIEDLLFNKVTLADAGFIKQYGDCLGDIAARDLICAQKFNGLTVLPPLLTDEMIAQYTSALLAGTITSGWTFGAGAALQIPFAMQMAYRFNGIGVTQNVLYENQKLIANQFNSAIGKIQDSLSSTASALGKLQDVVNQNAQALNTLVKQLSSNFGCISSVLNDILSRLDKVEAEVQIDCLITGRLQSLQTYVTQQLIRAAEIRASANLAATKMSECVLGQSKRVDFCGKGYHLMSFPQSAPHGVVFLHVTYVPAQEKNFTTAPAICHDGKAHFPREGVFVSNGTHWFVTQRNFYEPQIITTDNTFVSGNCDVVIGIVNNTVYDPLQPELDS

SEQ ID NO: 3483 - protein, 1147 aa, Artificial Sequence
  SARS-CoV-2/USA/UT-00033/2020__EPI_ISL_417976 spike protein (1-1147)(A972C_R995C)
MFVFLVLLPLVSSQCVNLTTRTQLPPAYTNSFTRGVYYPDKVFRSSVLHSTQDLFLPFFSNVTWFHAIHVSGTNGTKRFDNPVLPFNDGVYFASTEKSNIIRGWIFGTTLDSKTQSLLIVNNATNVVIKVCEFQFCNDPFLGVYYHKNNKSWMESEFRVYSSANNCTFEYVSQPFLMDLEGKQGNFKNLREFVFKNIDGYFKIYSKHTPINLVRDLPQGFSALEPLVDLPIGINITRFQTLLALHRSYLTPGDSSSGLTAGAAAYYVGYLQPRTFLLKYNENGTITDAVDCALDPLSETKCTLKSFTVEKGIYQTSNFRVQPTESIVRFPNITNLCPFGEVFNATRFASVYAWNRKRISNCVADYSVLYNSASFSTFKCYGVSPTKLNDLCFTNVYADSFVIRGDEVRQIAPGQTGKIADYNYKLPDDFTGCVIAWNSNNLDSKVGGNYNYLYRLFRKSNLKPFERDISTEIYQAGSTPCNGVEGFNCYFPLQSYGFQPTNGVGYQPYRVVVLSFELLHAPATVCGPKKSTNLVKNKCVNFNFNGLTGTGVLTESNKKFLPFQQFGRDIADTTDAVRDPQTLEILDITPCSFGGVSVITPGTNTSNQVAVLYQGVNCTEVPVAIHADQLTPTWRVYSTGSNVFQTRAGCLIGAEHVNNSYECDIPIGAGICASYQTQTNSPRRARSVASQSIIAYTMSLGAENSVAYSNNSIAIPTNFTISVTTEILPVSMTKTSVDCTMYICGDSTECSNLLLQYGSFCTQLNRALTGIAVEQDKNTQEVFAQVKQIYKTPPIKDFGGFNFSQILPDPSKPSKRSFIEDLLFNKVTLADAGFIKQYGDCLGDIAARDLICAQKFNGLTVLPPLLTDEMIAQYTSALLAGTITSGWTFGAGAALQIPFAMQMAYRFNGIGVTQNVLYENQKLIANQFNSAIGKIQDSLSSTASALGKLQDVVNQNAQALNTLVKQLSSNFGCISSVLNDILSRLDKVEAEVQIDCLITGRLQSLQTYVTQQLIRAAEIRASANLAATKMSECVLGQSKRVDFCGKGYHLMSFPQSAPHGVVFLHVTYVPAQEKNFTTAPAICHDGKAHFPREGVFVSNGTHWFVTQRNFYEPQIITTDNTFVSGNCDVVIGIVNNTVYDPLQPELDS

SEQ ID NO: 3484 - protein, 1147 aa, Artificial Sequence
  SARS-CoV-2/USA/WI-13/2020__EPI_ISL_417516 spike protein (1-1147)(A972C_R995C)
MFVFLVLLPLVSSQCVNLTTRTQLPPAYTNSFTRGVYYPDKVFRSSVLHSTQDLFLPFFSNVTWFHAIHVSGTNGTKRFDNPVLPFNDGVYFASTEKSNIIRGWIFGTTLDSKTQSLLIVNNATNVVIKVCEFQFCNDPFLGVYYHKNNKSWMESEFRVYSSANNCTFEYVSQPFLMDLEGKQGNFKNLREFVFKNIDGYFKIYSKHTPINLVRDLPQGFSALEPLVDLPIGINITRFQTLLALHRSYLTPGDSSSGWTAGAAAYYVGYLQPRTFLLKYNENGTITDAVDCALDPLSETKCTLKSFTVEKGIYQTSNFRVLPTESIVRFPNITNLCPFGEVFNATRFASVYAWNRKRISNCVADYSVLYNSASFSTFKCYGVSPTKLNDLCFTNVYADSFVIRGDEVRQIAPGQTGKIADYNYKLPDDFTGCVIAWNSNNLDSKVGGNYNYLYRLFRKSNLKPFERDISTEIYQAGSTPCNGVEGFNCYFPLQSYGFQPTNGVGYQPYRVVVLSFELLHAPATVCGPKKSTNLVKNKCVNFNFNGLTGTGVLTESNKKFLPFQQFGRDIADTTDAVRDPQTLEILDITPCSFGGVSVITPGTNTSNQVAVLYQGVNCTEVPVAIHADQLTPTWRVYSTGSNVFQTRAGCLIGAEHVNNSYECDIPIGAGICASYQTQTNSPRRARSVASQSIIAYTMSLGAENSVAYSNNSIAIPTNFTISVTTEILPVSMTKTSVDCTMYICGDSTECSNLLLQYGSFCTQLNRALTGIAVEQDKNTQEVFAQVKQIYKTPPIKDFGGFNFSQILPDPSKPSKRSFIEDLLFNKVTLADAGFIKQYGDCLGDIAARDLICAQKFNGLTVLPPLLTDEMIAQYTSALLAGTITSGWTFGAGAALQIPFAMQMAYRFNGIGVTQNVLYENQKLIANQFNSAIGKIQDSLSSTASALGKLQDVVNQNAQALNTLVKQLSSNFGCISSVLNDILSRLDKVEAEVQIDCLITGRLQSLQTYVTQQLIRAAEIRASANLAATKMSECVLGQSKRVDFCGKGYHLMSFPQSAPHGVVFLHVTYVPAQEKNFTTAPAICHDGKAHFPREGVFVSNGTHWFVTQRNFYEPQIITTDNTFVSGNCDVVIGIVNNTVYDPLQPELDS

SEQ ID NO: 3485 - protein, 1146 aa, Artificial Sequence
  SARS-CoV-2/India/1-27/2020__EPI_ISL_413522 spike protein (1-1146)(A971C_R994C)
MFVFLVLLPLVSSQCVNLTTRTQLPPAYTNSFTRGVYYPDKVFRSSVLHSTQDLFLPFFSNVTWFHAIHVSGTNGTKRFDNPVLPFNDGVYFASTEKSNIIRGWIFGTTLDSKTQSLLIVNNATNVVIKVCEFQFCNDPFLGVYHKNNKSWMESEFRVYSSANNCTFEYVSQPFLMDLEGKQGNFKNLREFVFKNIDGYFKIYSKHTPINLVRDLPQGFSALEPLVDLPIGINITRFQTLLALHRSYLTPGDSSSGWTAGAAAYYVGYLQPRTFLLKYNENGTITDAVDCALDPLSETKCTLKSFTVEKGIYQTSNFRVQPTESIVRFPNITNLCPFGEVFNATRFASVYAWNRKRISNCVADYSVLYNSASFSTFKCYGVSPTKLNDLCFTNVYADSFVIRGDEVIQIAPGQTGKIADYNYKLPDDFTGCVIAWNSNNLDSKVGGNYNYLYRLFRKSNLKPFERDISTEIYQAGSTPCNGVEGFNCYFPLQSYGFQPTNGVGYQPYRVVVLSFELLHAPATVCGPKKSTNLVKNKCVNFNFNGLTGTGVLTESNKKFLPFQQFGRDIADTTDAVRDPQTLEILDITPCSFGGVSVITPGTNTSNQVAVLYQDVNCTEVPVAIHADQLTPTWRVYSTGSNVFQTRAGCLIGAEHVNNSYECDIPIGAGICASYQTQTNSPRRARSVASQSIIAYTMSLGAENSVAYSNNSIAIPTNFTISVTTEILPVSMTKTSVDCTMYICGDSTECSNLLLQYGSFCTQLNRALTGIAVEQDKNTQEVFAQVKQIYKTPPIKDFGGFNFSQILPDPSKPSKRSFIEDLLFNKVTLADAGFIKQYGDCLGDIAARDLICAQKFNGLTVLPPLLTDEMIAQYTSALLAGTITSGWTFGAGAALQIPFAMQMAYRFNGIGVTQNVLYENQKLIANQFNSAIGKIQDSLSSTASALGKLQDVVNQNAQALNTLVKQLSSNFGCISSVLNDILSRLDKVEAEVQIDCLITGRLQSLQTYVTQQLIRAAEIRASANLAATKMSECVLGQSKRVDFCGKGYHLMSFPQSAPHGVVFLHVTYVPAQEKNFTTAPAICHDGKAHFPREGVFVSNGTHWFVTQRNFYEPQIITTDNTFVSGNCDVVIGIVNNTVYDPLQPELDS

SEQ ID NO: 3486 - protein, 1141 aa, Artificial Sequence
  SARS-CoV-2/pangolin/Guangxi/P4L/2017__EPI_ISL_410538 spike protein (1-1141)(A966C_R989C)
MFVFLFVLPLVSSQCVNLTTRTGIPPGYTNSSTRGVYYPDKVFRSSILHLTQDLFLPFFSNVTWFNTINYQGGFKKFDNPVLPFNDGVYFASTEKSNIIRGWIFGTTLDARTQSLLIVNNATNVVIKVCEFQFCTDPFLGVYYHNNNKTWVENEFRVYSSANNCTFEYISQPFLMDLEGKQGNFKNLREFVFKNVDGYFKIYSKHTPIDLVRDLPRGFAALEPLVDLPIGINITRFQTLLALHRSYLTPGNLESGWTTGAAAYYVGYLQQRTFLLSYNQNGTITDAVDCSLDPLSETKCTLKSLTVEKGIYQTSNFRVQPTISIVRFPNITNLCPFGEVFNASKFASVYAWNRKRISNCVADYSVLYNSTSFSTFKCYGVSPTKLNDLCFTNVYADSFVVKGDEVRQIAPGQTGVIADYNYKLPDDFTGCVIAWNSVKQDALTGGNYGYLYRLFRKSKLKPFERDISTEIYQAGSTPCNGQVGLNCYYPLERYGFHPTTGVNYQPFRVVVLSFELLNGPATVCGPKLSTTLVKDKCVNFNFNGLTGTGVLTTSKKQFLPFQQFGRDISDTTDAVRDPQTLEILDITPCSFGGVSVITPGTNTSNQVAVLYQDVNCTEVPMAIHAEQLTPAWRVYSAGANVFQTRAGCLVGAEHVNNSYECDIPVGAGICASYHSMSSLRSVNQRSIIAYTMSLGAENSVAYSNNSIAIPTNFTISVTTEILPVSMTKTSVDCTMYICGDSIECSNLLLQYGSFCTQLNRALTGIAVEQDKNTQEVFAQVKQIYKTPPIKDFGGFNFSQILPDPSKPSKRSFIEDLLFNKVTLADAGFIKQYGDCLGDIAARDLICAQKFNGLTVLPPLLTDEMIAQYTSALLAGTITSGWTFGAGAALQIPFAMQMAYRFNGIGVTQNVLYENQKLIANQFNSAIGKIQDSLSSTASALGKLQDVVNQNAQALNTLVKQLSSNFGCISSVLNDILSRLDKVEAEVQIDCLITGRLQSLQTYVTQQLIRAAEIRASANLAATKMSECVLGQSKRVDFCGKGYHLMSFPQSAPHGVVFLHVTYVPAQEKNFTTAPAICHEGKAHFPREGVFVSNGTHWFITQRNFYEPQIITTDNTFVSGSCDVVIGIVNNTVYDPLQPELDS

SEQ ID NO: 3487 - protein, 1141 aa, Artificial Sequence
  SARS-CoV-2/pangolin/Guangxi/P5L/2017__EPI_ISL_410540 spike protein (1-1141)(A966C_R989C)
MFVFLFVLPLVSSQCVNLTTRTGIPPGYTNSSTRGVYYPDKVFRSSILHLTQDLFLPFFSNVTWFNTINYQGGFKKFDNPVLPFNDGVYFASTEKSNIIRGWIFGTTLDARTQSLLIVNNATNVVIKVCEFQFCTDPFLGVYYHNNNKTWVENEFRVYSSANNCTFEYISQPFLMDLEGKQGNFKNLREFVFKNVDGYFKIYSKHTPIDLVRDLPRGFAALEPLVDLPIGINITRFQTLLALHRSYLTPGKLESGWTTGAAAYYVGYLQQRTFLLSYNQNGTITDAVDCSLDPLSETKCTLKSLTVEKGIYQTSNFRVQPTISIVRFPNITNLCPFGEVFNASKFASVYAWNRKRISNCVADYSVLYNSTSFSTFKCYGVSPTKLNDLCFTNVYADSFVVKGDEVRQIAPGQTGVIADYNYKLPDDFTGCVIAWNSVKQDALTGGNYGYLYRLFRKSKLKPFERDISTEIYQAGSTPCNGQVGLNCYYPLERYGFHPTTGVNYQPFRVVVLSFELLNGPATVCGPKLSTTLVKDKCVNFNFNGLTGTGVLTTSKKQFLPFQQFGRDISDTTDAVRDPQTLEILDITPCSFGGVSVITPGTNTSNQVAVLYQDVNCTEVPMAIHAEQLTPAWRVYSAGANVFQTRAGCLVGAEHVNNSYECDIPVGAGICASYHSMSSFRSVNQRSIIAYTMSLGAENSVAYSNNSIAIPTNFTISVTTEILPVSMTKTSVDCTMYICGDSIECSNLLLQYGSFCTQLNRALTGIAVEQDKNTQEVFAQVKQIYKTPPIKDFGGFNFSQILPDPSKPSKRSFIEDLLFNKVTLADAGFIKQYGDCLGDIAARDLICAQKFNGLTVLPPLLTDEMIAQYTSALLAGTITSGWTFGAGAALQIPFAMQMAYRFNGIGVTQNVLYENQKLIANQFNSAIGKIQDSLSSTASALGKLQDVVNQNAQALNTLVKQLSSNFGCISSVLNDILSRLDKVEAEVQIDCLITGRLQSLQTYVTQQLIRAAEIRASANLAATKMSECVLGQSKRVDFCGKGYHLMSFPQSAPHGVVFLHVTYVPAQEKNFTTAPAICHEGKAHFPREGVFVSNGTHWFITQRNFYEPQIITTDNTFVSGSCDVVIGIVNNTVYDPLQPELDS

SEQ ID NO: 3488 - protein, 1141 aa, Artificial Sequence
  SARS-CoV-2/pangolin/Guangxi/P5E/2017__EPI_ISL_410541 spike protein (1-1141)(A966C_R989C)
MFVFLFVLPLVSSQCVNLTTRTGIPPGYTNSSTRGVYYPDKVFRSSILHLTQDLFLPFFSNVTWFNTITYQGGSKKFDNPVLPFNDGVYFASTEKSNIIRGWIFGTTLDARTQSLLIVNNATNVVIKVCEFQFCTDPFLGVYYHNNNKTWVENEFRVYSSANNCTFEYISQPFLMDLEGKQGNFKNLREFVFKNVDGYFKIYSKHTPIDLVRDLPRGFAALEPLVDLPIGINITRFQTLLALHRSYLTPGKLESGWTTGAAAYYVGYLQQRTFLLSYNQNGTITDAVDCSLDPLSETKCTLKSLTVEKGIYQTSNFRVQPTISIVRFPNITNLCPFGEVFNASKFASVYAWNRKRISNCVADYSVLYNSTSFSTFKCYGVSPTKLNDLCFTNVYADSFVVKGDEVRQIAPGQTGVIADYNYKLPDDFTGCVIAWNSVKQDALTGDNYGYLYRLFRKSKLKPFERDISTEIYQAGSTPCNGQVGLNCYYPLERYGFHPTTGVNYQPFRVVVLSFELLNGPATVCGPKLSTTLVKDKCVNFNFNGLTGTGVLTTSKKQFLPFQQFGRDISDTTDAVRDPQTLEILDITPCSFGGVSVITPGTNTSNQVAVLYQDVNCTEVPMAIHAEQLTPAWRVYSAGANVFQTRAGCLVGAEHVNNSYECDIPVGAGICASYHSMSSFRSVNQRSIIAYTMSLGAENSVAYSNNSIAIPTNFTISVTTEILPVSMTKTSVDCTMYICGDSIECSNLLLQYGSFCTQLNRALTGIAVEQDKNTQEVFAQVKQIYKTPPIKDFGGFNFSQILPDPSKPSKRSFIEDLLFNKVTLADAGFIKQYGDCLGDIAARDLICAQKFNGLTVLPPLLTDEMIAQYTSALLAGTITSGWTFGAGAALQIPFAMQMAYRFNGIGVTQNVLYENQKLIANQFNSAIGKIQDSLSSTASALGKLQDVVNQNAQALNTLVKQLSSNFGCISSVLNDILSRLDKVEAEVQIDCLITGRLQSLQTYVTQQLIRAAEIRASANLAATKMSECVLGQSKRVDFCGKGYHLMSFPQSAPHGVVFLHVTYVPAQEKNFTTAPAICHEGKAHFPREGVFVSNGTHWFITQRNFYEPQIITTDNTFVSGSCDVVIGIVNNTVYDPLQPELDS

SEQ ID NO: 3489 - protein, 1139 aa, Artificial Sequence
  SARS-CoV-2/pangolin/Guangxi/P1E/2017__EPI_ISL_410539 spike protein (1-1139)(A964C_R987C)
MFVFLFVLPLVSSQCVNLTTRTGIQPGYTNSSTRGVYYPDKVFRSSILHLTQDLFLPFFSNVTWFNTINYQGGFKKFDNPVLPFNDGVYFASTEKSNIIRGWIFGTTLDARTQSLLIVNNATNVVIKVCEFQFCTDPFLGVYYHNNNKTWVENEFRVYSSANNCTFEYISQPFLMDLEGKQGNFKNLREFVFKNVDGYFKIYSKHTPIDLVRDLPRGFAALEPLVDLPIGINITRFQTLLALHRSYLTPGKLESGWTTGAAAYYVGYLQQRTFLLSYNQNGTITDAVDCSLDPLSETKCTLKSLTVEKGIYQTSNFRVQPTISIVRFPNITNLCPFGEVFNASKFASVYAWNRKRISNCVADYSVLYNSTSFSTFKCYGVSPTKLNDLCFTNVYADSFVVKGDEVRQIAPGQTGVIADYNYKLPDDFTGCVIAWNSVKQDALTGGNYLYRLFRKSKLKPFERDISTEIYQAGSTPCNGQVGLNCYYPLERYGFHPTTGVNYQPFRVVVLSFELLNGPATVCGPKLSTTLVKDKCVNFNFNGLTGTGVLTTSKKQFLPFQQFGRDISDTTDAVRDPQTLEILDITPCSFGGVSVITPGTNTSNQVAVLYQDVNCTEVPMAIHAEQLTPAWRVYSAGANVFQTRAGCLVGAEHVNNSYECDIPVGAGICASYHSMSSLRSVNQRSIIAYTMSLGAENSVAYSNNSIAIPTNFTISVTTEILPVSMTKTSVDCTMYICGDSIECSNLLLQYGSFCTQLNRALTGIAVEQDKNTQEVFAQVKQIYKTPPIKDFGGFNFSQILPDPSKPSKRSFIEDLLFNKVTLADAGFIKQYGDCLGDIAARDLICAQKFNGLTVLPPLLTDEMIAQYTSALLAGTITSGWTFGAGAALQIPFAMQMAYRFNGIGVTQNVLYENQKLIANQFNSAIGKIQDSLSSTASALGKLQDVVNQNAQALNTLVKQLSSNFGCISSVLNDILSRLDKVEAEVQIDCLITGRLQSLQTYVTQQLIRAAEIRASANLAATKMSECVLGQSKRVDFCGKGYHLMSFPQSAPHGVVFLHVTYVPAQEKNFTTAPAICHEGKAHFPREGVFVSNGTHWFITQRNFYEPQIITTDNTFVSGSCDVVIGIVNNTVYDPLQPELDS

SEQ ID NO: 3490 - protein, 1147 aa, Artificial Sequence
  SARS-CoV-2/Wuhan/WIV05/2019__EPI_ISL_402128 spike protein (1-1147)(A890C_V1040C)
MFVFLVLLPLVSSQCVNLTTRTQLPPAYTNSFTRGVYYPDKVFRSSVLHSTQDLFLPFFSNVTWFHAIHVSGTNGTKRFDNPVLPFNDGVYFASTEKSNIIRGWIFGTTLDSKTQSLLIVNNATNVVIKVCEFQFCNDPFLGVYYHKNNKSWMESEFRVYSSANNCTFEYVSQPFLMDLEGKQGNFKNLREFVFKNIDGYFKIYSKHTPINLVRDLPQGFSALEPLVDLPIGINITRFQTLLALHRSYLTPGDSSSGWTAGAAAYYVGYLQPRTFLLKYNENGTITDAVDCALDPLSETKCTLKSFTVEKGIYQTSNFRVQPTESIVRFPNITNLCPFGEVFNATRFASVYAWNRKRISNCVADYSVLYNSASFSTFKCYGVSPTKLNDLCFTNVYADSFVIRGDEVRQIAPGQTGKIADYNYKLPDDFTGCVIAWNSNNLDSKVGGNYNYLYRLFRKSNLKPFERDISTEIYQAGSTPCNGVEGFNCYFPLQSYGFQPTNGVGYQPYRVVVLSFELLHAPATVCGPKKSTNLVKNKCVNFNFNGLTGTGVLTESNKKFLPFQQFGRDIADTTDAVRDPQTLEILDITPCSFGGVSVITPGTNTSNQVAVLYQDVNCTEVPVAIHADQLTPTWRVYSTGSNVFQTRAGCLIGAEHVNNSYECDIPIGAGICASYQTQTNSPRRARSVASQSIIAYTMSLGAENSVAYSNNSIAIPTNFTISVTTEILPVSMTKTSVDCTMYICGDSTECSNLLLQYGSFCTQLNRALTGIAVEQDKNTQEVFAQVKQIYKTPPIKDFGGFNFSQILPDPSKPSKRSFIEDLLFNKVTLADAGFIKQYGDCLGDIAARDLICAQKFNGLTVLPPLLTDEMIAQYTSALLAGTITSGWTFGCGAALQIPFAMQMAYRFNGIGVTQNVLYENQKLIANQFNSAIGKIQDSLSSTASALGKLQDVVNQNAQALNTLVKQLSSNFGAISSVLNDILSRLDKVEAEVQIDRLITGRLQSLQTYVTQQLIRAAEIRASANLAATKMSECVLGQSKRCDFCGKGYHLMSFPQSAPHGVVFLHVTYVPAQEKNFTTAPAICHDGKAHFPREGVFVSNGTHWFVTQRNFYEPQIITTDNTFVSGNCDVVIGIVNNTVYDPLQPELDS

SEQ ID NO: 3491 - protein, 1143 aa, Artificial Sequence; identical to SEQ ID NO: 3223
  SARS-CoV-2/bat/Yunnan/RaTG13/2013__EPI_ISL_402131 spike protein (1-1143)(A886C_V1036C)

SEQ ID NO: 3492 - protein, 1147 aa, Artificial Sequence; identical to SEQ ID NO: 3224
  SARS-CoV-2/Wuhan/HBCDC-HB-01/2019__EPI_ISL_402132 spike protein (1-1147)(A890C_V1040C)

SEQ ID NO: 3493 - protein, 1147 aa, Artificial Sequence; identical to SEQ ID NO: 3225
  SARS-CoV-2/Guangdong/20SF028/2020__EPI_ISL_403936 spike protein (1-1147)(A890C_V1040C)

SEQ ID NO: 3494 - protein, 1147 aa, Artificial Sequence; identical to SEQ ID NO: 3226
  SARS-CoV-2/Shenzhen/SZTH-001/2020__EPI_ISL_406592 spike protein (1-1147)(A890C_V1040C)

SEQ ID NO: 3495 - protein, 1147 aa, Artificial Sequence; identical to SEQ ID NO: 3227
  SARS-CoV-2/Shenzhen/SZTH-004/2020__EPI_ISL_406595 spike protein (1-1147)(A890C_V1040C)

SEQ ID NO: 3496 - protein, 1147 aa, Artificial Sequence; identical to SEQ ID NO: 3228
  SARS-CoV-2/France/IDF0372/2020__EPI_ISL_406596 spike protein (1-1147)(A890C_V1040C)

SEQ ID NO: 3497 - protein, 1147 aa, Artificial Sequence; identical to SEQ ID NO: 3229
  SARS-CoV-2/Australia/VIC01/2020__EPI_ISL_406844 spike protein (1-1147)(A890C_V1040C)

SEQ ID NO: 3498 - protein, 1147 aa, Artificial Sequence; identical to SEQ ID NO: 3230
  SARS-CoV-2/Germany/BavPat1/2020__EPI_ISL_406862 spike protein (1-1147)(A890C_V1040C)

SEQ ID NO: 3499 - protein, 1147 aa, Artificial Sequence; identical to SEQ ID NO: 3231
  SARS-CoV-2/Wuhan/HBCDC-HB-02/2020__EPI_ISL_412978 spike protein (1-1147)(A890C_V1040C)

SEQ ID NO: 3500 - protein, 1147 aa, Artificial Sequence; identical to SEQ ID NO: 3232
  SARS-CoV-2/Australia/QLD02/2020__EPI_ISL_407896 spike protein (1-1147)(A890C_V1040C)

SEQ ID NO: 3501 - protein, 1147 aa, Artificial Sequence; identical to SEQ ID NO: 3233
  SARS-CoV-2/India/1-31/2020__EPI_ISL_413523 spike protein (1-1147)(A890C_V1040C)

SEQ ID NO: 3502 - protein, 1147 aa, Artificial Sequence; identical to SEQ ID NO: 3234
  SARS-CoV-2/Guangdong/GD2020087-P0008/2020__EPI_ISL_413863 spike protein (1-1147)(A890C_V1040C)

SEQ ID NO: 3503 - protein, 1147 aa, Artificial Sequence; identical to SEQ ID NO: 3235
  SARS-CoV-2/Sweden/01/2020__EPI_ISL_411951 spike protein (1-1147)(A890C_V1040C)

SEQ ID NO: 3504 - protein, 1147 aa, Artificial Sequence; identical to SEQ ID NO: 3236
  SARS-CoV-2/Tianmen/HBCDC-HB-07/2020__EPI_ISL_412983 spike protein (1-1147)(A890C_V1040C)

SEQ ID NO: 3505 - protein, 1147 aa, Artificial Sequence; identical to SEQ ID NO: 3237
  SARS-CoV-2/Hong Kong/case42_VM20002493/2020__EPI_ISL_414527 spike protein (1-1147)(A890C_V1040C)

SEQ ID NO: 3506 - protein, 1147 aa, Artificial Sequence; identical to SEQ ID NO: 3238
  SARS-CoV-2/USA/CruiseA-23/2020__EPI_ISL_414482 spike protein (1-1147)(A890C_V1040C)

SEQ ID NO: 3507 - protein, 1147 aa, Artificial Sequence; identical to SEQ ID NO: 3239
  SARS-CoV-2/Hong Kong/case85_VM20002868/2020__EPI_ISL_414519 spike protein (1-1147)(A890C_V1040C)

SEQ ID NO: 3508 - protein, 1147 aa, Artificial Sequence; identical to SEQ ID NO: 3230
  SARS-CoV-2/England/200990660/2020__EPI_ISL_414523 spike protein (1-1147)(A890C_V1040C)

SEQ ID NO: 3509 - protein, 1147 aa, Artificial Sequence; identical to SEQ ID NO: 3241
  SARS-CoV-2/Australia/NSW09/2020__EPI_ISL_413595 spike protein (1-1147)(A890C_V1040C)

SEQ ID NO: 3510 - protein, 1147 aa, Artificial Sequence; identical to SEQ ID NO: 3222
  SARS-CoV-2/Australia/NSW10/2020__EPI_ISL_413596 spike protein (1-1147)(A890C_V1040C)

SEQ ID NO: 3511 - protein, 1147 aa, Artificial Sequence; identical to SEQ ID NO: 3243
  SARS-CoV-2/Switzerland/1000477797/2020__EPI_ISL_413023 spike protein (1-1147)(A890C_V1040C)

SEQ ID NO: 3512 - protein, 1147 aa, Artificial Sequence; identical to SEQ ID NO: 3244
  SARS-CoV-2/Belgium/BA-02291/2020__EPI_ISL_415159 spike protein (1-1147)(A890C_V1040C)

SEQ ID NO: 3513 - protein, 1147 aa, Artificial Sequence; identical to SEQ ID NO: 3245
  SARS-CoV-2/USA/WA8-UW5/2020__EPI_ISL_413486 spike protein (1-1147)(A890C_V1040C)

SEQ ID NO: 3514 - protein, 1147 aa, Artificial Sequence; identical to SEQ ID NO: 3246
  SARS-CoV-2/England/20102000506/2020__EPI_ISL_415147 spike protein (1-1147)(A890C_V1040C)

SEQ ID NO: 3515 - protein, 1147 aa, Artificial Sequence; identical to SEQ ID NO: 3247
  SARS-CoV-2/Belgium/VAG-03013/2020__EPI_ISL_415155 spike protein (1-1147)(A890C_V1040C)

SEQ ID NO: 3516 - protein, 1147 aa, Artificial Sequence; identical to SEQ ID NO: 3248
  SARS-CoV-2/Belgium/BC-03016/2020__EPI_ISL_415157 spike protein (1-1147)(A890C_V1040C)

SEQ ID NO: 3517 - protein, 1147 aa, Artificial Sequence; identical to SEQ ID NO: 3249
  SARS-CoV-2/Germany/BavPat3/2020__EPI_ISL_414521 spike protein (1-1147)(A890C_V1040C)

SEQ ID NO: 3518 - protein, 1147 aa, Artificial Sequence; identical to SEQ ID NO: 3250
  SARS-CoV-2/France/HF1805/2020__EPI_ISL_414628 spike protein (1-1147)(A890C_V1040C)

SEQ ID NO: 3519 - protein, 1147 aa, Artificial Sequence; identical to SEQ ID NO: 3251
  SARS-CoV-2/Netherlands/ZuidHolland_9/2020__EPI_ISL_414445 spike protein (1-1147)(A890C_V1040C)

SEQ ID NO: 3520 - protein, 1147 aa, Artificial Sequence; identical to SEQ ID NO: 3252
  SARS-CoV-2/Finland/FIN03032020A/2020__EPI_ISL_413602 spike protein (1-1147)(A890C_V1040C)

SEQ ID NO: 3521 - protein, 1147 aa, Artificial Sequence; identical to SEQ ID NO: 3253
  SARS-CoV-2/France/GE1977/2020__EPI_ISL_414632 spike protein (1-1147)(A890C_V1040C)

SEQ ID NO: 3522 - protein, 1147 aa, Artificial Sequence; identical to SEQ ID NO: 3254
  SARS-CoV-2/Finland/FIN-313/2020__EPI_ISL_414641 spike protein (1-1147)(A890C_V1040C)

SEQ ID NO: 3523 - protein, 1147 aa, Artificial Sequence; identical to SEQ ID NO: 3255
  SARS-CoV-2/Netherlands/ZuidHolland_2/2020__EPI_ISL_414556 spike protein (1-1147)(A890C_V1040C)

SEQ ID NO: 3524 - protein, 1147 aa, Artificial Sequence; identical to SEQ ID NO: 3256
  SARS-CoV-2/USA/WA-UW31/2020__EPI_ISL_414618 spike protein (1-1147)(A890C_V1040C)

SEQ ID NO: 3525 - protein, 1147 aa, Artificial Sequence; identical to SEQ ID NO: 3257
  SARS-CoV-2/South Korea/SNU01/2020__EPI_ISL_411929 spike protein (1-1147)(A890C_V1040C)

SEQ ID NO: 3526 - protein, 1147 aa, Artificial Sequence; identical to SEQ ID NO: 3258
  SARS-CoV-2/China/WF0004/2020__EPI_ISL_413694 spike protein (1-1147)(A890C_V1040C)

SEQ ID NO: 3527 - protein, 1147 aa, Artificial Sequence; identical to SEQ ID NO: 3259
  SARS-CoV-2/China/WF0028/2020__EPI_ISL_413791 spike protein (1-1147)(A890C_V1040C)

SEQ ID NO: 3528 - protein, 1147 aa, Artificial Sequence; identical to SEQ ID NO: 3260
  SARS-CoV-2/2019-nCoV/USA-CruiseA-18/2020__MT159716.1 spike protein (1-1147)(A890C_V1040C)

SEQ ID NO: 3529 - protein, 1147 aa, Artificial Sequence; identical to SEQ ID NO: 3261
  SARS-CoV-2/SARS-CoV-2/Yunnan-01/human/2020/CHN__MT049951.1 spike protein (1-1147)(A890C_V1040C)

SEQ ID NO: 3530 - protein, 1147 aa, Artificial Sequence; identical to SEQ ID NO: 3262
  SARS-CoV-2/USA/WA-UW292/2020__EPI_ISL_418077 spike protein (1-1147)(A890C_V1040C)

SEQ ID NO: 3531 - protein, 1147 aa, Artificial Sequence; identical to SEQ ID NO: 3263
  SARS-CoV-2/Iceland/192/2020__EPI_ISL_417819 spike protein (1-1147)(A890C_V1040C)

SEQ ID NO: 3532 - protein, 1147 aa, Artificial Sequence; identical to SEQ ID NO: 3264
  SARS-CoV-2/Belgium/ULG-6939/2020__EPI_ISL_417020 spike protein (1-1147)(A890C_V1040C)

SEQ ID NO: 3533 - protein, 1147 aa, Artificial Sequence; identical to SEQ ID NO: 3265
  SARS-CoV-2/France/HF2496/2020__EPI_ISL_418231 spike protein (1-1147)(A890C_V1040C)

SEQ ID NO: 3534 - protein, 1147 aa, Artificial Sequence; identical to SEQ ID NO: 3266
  SARS-CoV-2/USA/WA-UW291/2020__EPI_ISL_418076 spike protein (1-1147)(A890C_V1040C)

SEQ ID NO: 3535 - protein, 1147 aa, Artificial Sequence; identical to SEQ ID NO: 3230
  SARS-CoV-2/Portugal/PT0034/2020__EPI_ISL_418019 spike protein (1-1147)(A890C_V1040C)

SEQ ID NO: 3536 - protein, 1147 aa, Artificial Sequence; identical to SEQ ID NO: 3222
  SARS-CoV-2/Iceland/202/2020__EPI_ISL_417750 spike protein (1-1147)(A890C_V1040C)

SEQ ID NO: 3537 - protein, 1147 aa, Artificial Sequence; identical to SEQ ID NO: 3269
  SARS-CoV-2/USA/WA-UW261/2020__EPI_ISL_418046 spike protein (1-1147)(A890C_V1040C)

SEQ ID NO: 3538 - protein, 1147 aa, Artificial Sequence; identical to SEQ ID NO: 3270
  SARS-CoV-2/Portugal/PT0035/2020__EPI_ISL_418020 spike protein (1-1147)(A890C_V1040C)

SEQ ID NO: 3539 - protein, 1147 aa, Artificial Sequence; identical to SEQ ID NO: 3271
  SARS-CoV-2/USA/NY-NYUMC7/2020__EPI_ISL_418192 spike protein (1-1147)(A890C_V1040C)

SEQ ID NO: 3540 - protein, 1147 aa, Artificial Sequence; identical to SEQ ID NO: 3272
  SARS-CoV-2/Iceland/189/2020__EPI_ISL_417709 spike protein (1-1147)(A890C_V1040C)

SEQ ID NO: 3541 - protein, 1147 aa, Artificial Sequence; identical to SEQ ID NO: 3273
  SARS-CoV-2/Australia/NSW56/2020__EPI_ISL_417408 spike protein (1-1147)(A890C_V1040C)

SEQ ID NO: 3542 - protein, 1147 aa, Artificial Sequence; identical to SEQ ID NO: 3274
  SARS-CoV-2/Iceland/280/2020__EPI_ISL_417608 spike protein (1-1147)(A890C_V1040C)

SEQ ID NO: 3543 - protein, 1147 aa, Artificial Sequence; identical to SEQ ID NO: 3230
  SARS-CoV-2/Iceland/247/2020__EPI_ISL_417575 spike protein (1-1147)(A890C_V1040C)

SEQ ID NO: 3544 - protein, 1147 aa, Artificial Sequence; identical to SEQ ID NO: 3276
  SARS-CoV-2/Iceland/238/2020__EPI_ISL_417566 spike protein (1-1147)(A890C_V1040C)

SEQ ID NO: 3545 - protein, 1147 aa, Artificial Sequence; identical to SEQ ID NO: 3277
  SARS-CoV-2/Greece/16/2020__EPI_ISL_418265 spike protein (1-1147)(A890C_V1040C)

SEQ ID NO: 3546 - protein, 1147 aa, Artificial Sequence; identical to SEQ ID NO: 3278
  SARS-CoV-2/Iceland/319/2020__EPI_ISL_417648 spike protein (1-1147)(A890C_V1040C)

SEQ ID NO: 3547 - protein, 1147 aa, Artificial Sequence; identical to SEQ ID NO: 3279
  SARS-CoV-2/Congo/94/2020__EPI_ISL_417947 spike protein (1-1147)(A890C_V1040C)

SEQ ID NO: 3548 - protein, 1147 aa, Artificial Sequence; identical to SEQ ID NO: 3280
  SARS-CoV-2/Congo/158/2020__EPI_ISL_417950 spike protein (1-1147)(A890C_V1040C)

SEQ ID NO: 3549 - protein, 1147 aa, Artificial Sequence; identical to SEQ ID NO: 3281
  SARS-CoV-2/USA/UT-00034/2020__EPI_ISL_417977 spike protein (1-1147)(A890C_V1040C)

SEQ ID NO: 3550 - protein, 1147 aa, Artificial Sequence; identical to SEQ ID NO: 3282
  SARS-CoV-2/USA/UT-00033/2020__EPI_ISL_417976 spike protein (1-1147)(A890C_V1040C)

SEQ ID NO: 3551 - protein, 1147 aa, Artificial Sequence; identical to SEQ ID NO: 3283
  SARS-CoV-2/USA/WI-13/2020__EPI_ISL_417516 spike protein (1-1147)(A890C_V1040C)

SEQ ID NO: 3552 - protein, 1146 aa, Artificial Sequence; identical to SEQ ID NO: 3284
  SARS-CoV-2/India/1-27/2020__EPI_ISL_413522 spike protein (1-1146)(A889C_V1039C)

SEQ ID NO: 3553 - protein, 1141 aa, Artificial Sequence; identical to SEQ ID NO: 3285
  SARS-CoV-2/pangolin/Guangxi/P4L/2017__EPI_ISL_410538 spike protein (1-1141)(A884C_V1034C)

SEQ ID NO: 3554 - protein, 1141 aa, Artificial Sequence; identical to SEQ ID NO: 3286
  SARS-CoV-2/pangolin/Guangxi/P5L/2017__EPI_ISL_410540 spike protein (1-1141)(A884C_V1034C)

SEQ ID NO: 3555 - protein, 1141 aa, Artificial Sequence; identical to SEQ ID NO: 3287
  SARS-CoV-2/pangolin/Guangxi/P5E/2017__EPI_ISL_410541 spike protein (1-1141)(A884C_V1034C)

SEQ ID NO: 3556 - protein, 1139 aa, Artificial Sequence; identical to SEQ ID NO: 3288
  SARS-CoV-2/pangolin/Guangxi/P1E/2017__EPI_ISL_410539 spike protein (1-1139)(A882C_V1032C)

SEQ ID NO: 3557 - protein, 1147 aa, Artificial Sequence
  SARS-CoV-2/Wuhan/WIV05/2019__EPI_ISL_402128 spike protein (1-1147)(T874C_S1055C)
MFVFLVLLPLVSSQCVNLTTRTQLPPAYTNSFTRGVYYPDKVFRSSVLHSTQDLFLPFFSNVTWFHAIHVSGTNGTKRFDNPVLPFNDGVYFASTEKSNIIRGWIFGTTLDSKTQSLLIVNNATNVVIKVCEFQFCNDPFLGVYYHKNNKSWMESEFRVYSSANNCTFEYVSQPFLMDLEGKQGNFKNLREFVFKNIDGYFKIYSKHTPINLVRDLPQGFSALEPLVDLPIGINITRFQTLLALHRSYLTPGDSSSGWTAGAAAYYVGYLQPRTFLLKYNENGTITDAVDCALDPLSETKCTLKSFTVEKGIYQTSNFRVQPTESIVRFPNITNLCPFGEVFNATRFASVYAWNRKRISNCVADYSVLYNSASFSTFKCYGVSPTKLNDLCFTNVYADSFVIRGDEVRQIAPGQTGKIADYNYKLPDDFTGCVIAWNSNNLDSKVGGNYNYLYRLFRKSNLKPFERDISTEIYQAGSTPCNGVEGFNCYFPLQSYGFQPTNGVGYQPYRVVVLSFELLHAPATVCGPKKSTNLVKNKCVNFNFNGLTGTGVLTESNKKFLPFQQFGRDIADTTDAVRDPQTLEILDITPCSFGGVSVITPGTNTSNQVAVLYQDVNCTEVPVAIHADQLTPTWRVYSTGSNVFQTRAGCLIGAEHVNNSYECDIPIGAGICASYQTQTNSPRRARSVASQSIIAYTMSLGAENSVAYSNNSIAIPTNFTISVTTEILPVSMTKTSVDCTMYICGDSTECSNLLLQYGSFCTQLNRALTGIAVEQDKNTQEVFAQVKQIYKTPPIKDFGGFNFSQILPDPSKPSKRSFIEDLLFNKVTLADAGFIKQYGDCLGDIAARDLICAQKFNGLTVLPPLLTDEMIAQYCSALLAGTITSGWTFGAGAALQIPFAMQMAYRFNGIGVTQNVLYENQKLIANQFNSAIGKIQDSLSSTASALGKLQDVVNQNAQALNTLVKQLSSNFGAISSVLNDILSRLDKVEAEVQIDRLITGRLQSLQTYVTQQLIRAAEIRASANLAATKMSECVLGQSKRVDFCGKGYHLMSFPQCAPHGVVFLHVTYVPAQEKNFTTAPAICHDGKAHFPREGVFVSNGTHWFVTQRNFYEPQIITTDNTFVSGNCDVVIGIVNNTVYDPLQPELDS

SEQ ID NO: 3558 - protein, 1143 aa, Artificial Sequence
  SARS-CoV-2/bat/Yunnan/RaTG13/2013__EPI_ISL_402131 spike protein (1-1143)(T870C_S1051C)
MFVFLVLLPLVSSQCVNLTTRTQLPPAYTNSSTRGVYYPDKVFRSSVLHLTQDLFLPFFSNVTWFHAIHVSGTNGIKRFDNPVLPFNDGVYFASTEKSNIIRGWIFGTTLDSKTQSLLIVNNATNVVIKVCEFQFCNDPFLGVYYHKNNKSWMESEFRVYSSANNCTFEYVSQPFLMDLEGKQGNFKNLREFVFKNIDGYFKIYSKHTPINLVRDLPPGFSALEPLVDLPIGINITRFQTLLALHRSYLTPGDSSSGWTAGAAAYYVGYLQPRTFLLKYNENGTITDAVDCALDPLSETKCTLKSFTVEKGIYQTSNFRVQPTDSIVRFPNITNLCPFGEVFNATTFASVYAWNRKRISNCVADYSVLYNSTSFSTFKCYGVSPTKLNDLCFTNVYADSFVITGDEVRQIAPGQTGKIADYNYKLPDDFTGCVIAWNSKHIDAKEGGNFNYLYRLFRKANLKPFERDISTEIYQAGSKPCNGQTGLNCYYPLYRYGFYPTDGVGHQPYRVVVLSFELLNAPATVCGPKKSTNLVKNKCVNFNFNGLTGTGVLTESNKKFLPFQQFGRDIADTTDAVRDPQTLEILDITPCSFGGVSVITPGTNASNQVAVLYQDVNCTEVPVAIHADQLTPTWRVYSTGSNVFQTRAGCLIGAEHVNNSYECDIPIGAGICASYQTQTNSRSVASQSIIAYTMSLGAENSVAYSNNSIAIPTNFTISVTTEILPVSMTKTSVDCTMYICGDSTECSNLLLQYGSFCTQLNRALTGIAVEQDKNTQEVFAQVKQIYKTPPIKDFGGFNFSQILPDPSKPSKRSFIEDLLFNKVTLADAGFIKQYGDCLGDIAARDLICAQKFNGLTVLPPLLTDEMIAQYCSALLAGTITSGWTFGAGAALQIPFAMQMAYRFNGIGVTQNVLYENQKLIANQFNSAIGKIQDSLSSTASALGKLQDVVNQNAQALNTLVKQLSSNFGAISSVLNDILSRLDKVEAEVQIDRLITGRLQSLQTYVTQQLIRAAEIRASANLAATKMSECVLGQSKRVDFCGKGYHLMSFPQCAPHGVVFLHVTYVPAQEKNFTTAPAICHDGKAHFPREGVFVSNGTHWFVTQRNFYEPQIITTDNTFVSGSCDVVIGIVNNTVYDPLQPELDS

SEQ ID NO: 3559 - protein, 1147 aa, Artificial Sequence
  SARS-CoV-2/Wuhan/HBCDC-HB-01/2019__EPI_ISL_402132 spike protein (1-1147)(T874C_S1055C)
MFVFLVLLPLVSSQCVNLTTRTQLPPAYTNSITRGVYYPDKVFRSSVLHSTQDLFLPFFSNVTWFHAIHVSGTNGTKRFDNPVLPFNDGVYFASTEKSNIIRGWIFGTTLDSKTQSLLIVNNATNVVIKVCEFQFCNDPFLGVYYHKNNKSWMESEFRVYSSANNCTFEYVSQPFLMDLEGKQGNFKNLREFVFKNIDGYFKIYSKHTPINLVRDLPQGFSALEPLVDLPIGINITRFQTLLALHRSYLTPGDSSSGWTAGAAAYYVGYLQPRTFLLKYNENGTITDAVDCALDPLSETKCTLKSFTVEKGIYQTSNFRVQPTESIVRFPNITNLCPFGEVFNATRFASVYAWNRKRISNCVADYSVLYNSASFSTFKCYGVSPTKLNDLCFTNVYADSFVIRGDEVRQIAPGQTGKIADYNYKLPDDFTGCVIAWNSNNLDSKVGGNYNYLYRLFRKSNLKPFERDISTEIYQAGSTPCNGVEGFNCYFPLQSYGFQPTNGVGYQPYRVVVLSFELLHAPATVCGPKKSTNLVKNKCVNFNFNGLTGTGVLTESNKKFLPFQQFGRDIADTTDAVRDPQTLEILDITPCSFGGVSVITPGTNTSNQVAVLYQDVNCTEVPVAIHADQLTPTWRVYSTGSNVFQTRAGCLIGAEHVNNSYECDIPIGAGICASYQTQTNSPRRARSVASQSIIAYTMSLGAENSVAYSNNSIAIPTNFTISVTTEILPVSMTKTSVDCTMYICGDSTECSNLLLQYGSFCTQLNRALTGIAVEQDKNTQEVFAQVKQIYKTPPIKDFGGFNFSQILPDPSKPSKRSFIEDLLFNKVTLADAGFIKQYGDCLGDIAARDLICAQKFNGLTVLPPLLTDEMIAQYCSALLAGTITSGWTFGAGAALQIPFAMQMAYRFNGIGVTQNVLYENQKLIANQFNSAIGKIQDSLSSTASALGKLQDVVNQNAQALNTLVKQLSSNFGAISSVLNDILSRLDKVEAEVQIDRLITGRLQSLQTYVTQQLIRAAEIRASANLAATKMSECVLGQSKRVDFCGKGYHLMSFPQCAPHGVVFLHVTYVPAQEKNFTTAPAICHDGKAHFPREGVFVSNGTHWFVTQRNFYEPQIITTDNTFVSGNCDVVIGIVNNTVYDPLQPELDS

SEQ ID NO: 3560 - protein, 1147 aa, Artificial Sequence
  SARS-CoV-2/Guangdong/20SF028/2020__EPI_ISL_403936 spike protein (1-1147)(T874C_S1055C)
MFVFLVLLPLVSSQCVNLTTRTQLPPAYTNSFTRGVYYPDKVFRSSVLYSTQDLFLPFFSNVTWFHAIHVSGTNGTKRFDNPVLPFNDGVYFASTEKSNIIRGWIFGTTLDSKTQSLLIVNNATNVVIKVCEFQFCNDPFLGVYYHKNNKSWMESEFRVYSSANNCTFEYVSQPFLMDLEGKQGNFKNLREFVFKNIDGYFKIYSKHTPINLVRDLPQGFSALEPLVDLPIGINITRFQTLLALHRSYLTPGDSSSGWTAGAAAYYVGYLQPRTFLLKYNENGTITDAVDCALDPLSETKCTLKSFTVEKGIYQTSNFRVQPTESIVRFPNITNLCPFGEVFNATRFASVYAWNRKRISNCVADYSVLYNSASFSTFKCYGVSPTKLNDLCFTNVYADSFVIRGDEVRQIAPGQTGKIADYNYKLPDDFTGCVIAWNSNNLDSKVGGNYNYLYRLFRKSNLKPFERDISTEIYQAGSTPCNGVEGFNCYFPLQSYGFQPTNGVGYQPYRVVVLSFELLHAPATVCGPKKSTNLVKNKCVNFNFNGLTGTGVLTESNKKFLPFQQFGRDIADTTDAVRDPQTLEILDITPCSFGGVSVITPGTNTSNQVAVLYQDVNCTEVPVAIHADQLTPTWRVYSTGSNVFQTRAGCLIGAEHVNNSYECDIPIGAGICASYQTQTNSPRRARSVASQSIIAYTMSLGAENSVAYSNNSIAIPTNFTISVTTEILPVSMTKTSVDCTMYICGDSTECSNLLLQYGSFCTQLNRALTGIAVEQDKNTQEVFAQVKQIYKTPPIKDFGGFNFSQILPDPSKPSKRSFIEDLLFNKVTLADAGFIKQYGDCLGDIAARDLICAQKFNGLTVLPPLLTDEMIAQYCSALLAGTITSGWTFGAGAALQIPFAMQMAYRFNGIGVTQNVLYENQKLIANQFNSAIGKIQDSLSSTASALGKLQDVVNQNAQALNTLVKQLSSNFGAISSVLNDILSRLDKVEAEVQIDRLITGRLQSLQTYVTQQLIRAAEIRASANLAATKMSECVLGQSKRVDFCGKGYHLMSFPQCAPHGVVFLHVTYVPAQEKNFTTAPAICHDGKAHFPREGVFVSNGTHWFVTQRNFYEPQIITTDNTFVSGNCDVVIGIVNNTVYDPLQPELDS

SEQ ID NO: 3561 - protein, 1147 aa, Artificial Sequence
  SARS-CoV-2/Shenzhen/SZTH-001/2020__EPI_ISL_406592 spike protein (1-1147)(T874C_S1055C)
MFVFLVLLPLVSSQCVNLTTRTQLPPAYTNSFTRGVYYPDKVFRSSVLHSTQDLFLPFFSNVTWFHAIHVSGTNGTKRFDNPVLPFNDGVYFASTEKSNIIRGWIFGTTLDSKTQSLLIVNNATNVVIKVCEFQFCNDPFLGVYYHKNNKSWMESEFRVYSSANNCTFEYVSQPFLMDLEGKQGNFKNLREFVFKNIDGYFKIYSKHTPINLVRDLPQGFSALEPLVDLPIGINITRFQTLLALHRSYLTPGDSSSGWTAGAAAYYVGYLQPRTFLLKYNENGTITDAVDCALDPLSETKCTLKSFTVEKGIYQTSNFRVQPTESIVRFPNITNLCPFGEVFNATRFASVYAWNRKRISNCVADYSVLYNSASFSTFKCYGVSPTKLNDLCFTNVYADSFVIRGDEVRQIAPGQTGKIADYNYKLPDDFTGCVIAWNSNNLDSKVGGNYNYLYRLFRKSNLKPFERDISTEIYQAGSTPCNGVEGFNCYFPLQSYGFQPTNGVGYQPYRVVVLSFELLHAPATVCGPKKSTNLVKNKCVNFNFNGLTGTGVLTESNKKFLPFQQFGRDIADTTDAVRDPQTLEILDITPCSFGGVSVITPGTNTSNQVAVLYQDVNCTEVPVAIHADQLTPTWRVYSTGSNVFQTRAGCLIGAEHVNNSYECDIPIGAGICASYQTQTNSPRRARSVASQSIIAYTMSLGAENSVAYSNNSIAIPTNFTISVTTEILPVSMTKTSVDCTMYICGDSTECSNLLLQYGSFCTQLNRALTGIAVEQDKNTQEVFAQVKQIYKTPPIKDFGGFNFSQILPDPSKPSKRSFIEDLLFNKVTLADAGFIKQYGDCLGDIAARDLICAQKFNGLTVLPPLLTDEMIAQYCSALLAGTITSGWTFGAGAALQIPFAMQMAYRFNGIGVTQNVLYENQKLIANQFNSAIGKIQDSLSSTASALGKLQDVVNQNAQALNTLVKQLSSNFGAISSVLNDILSRLDKVEAEVQIDRLITGRLQSLQTYVTQQLIRAAEIRASANLAATKMSECVLGQSKRVDFCGKGYHLMSFPQCAPHGVVFLHVTYVPAQEKNFTTAPAICHDGKAHFPREGVFVSNGTHWFVTQRNFYEPQIITTDNTFVSGNCDVLIGIVNNTVYDPLQPELDS

SEQ ID NO: 3562 - protein, 1147 aa, Artificial Sequence
  SARS-CoV-2/Shenzhen/SZTH-004/2020__EPI_ISL_406595 spike protein (1-1147)(T874C_S1055C)
MFVFLVLLPLVSSQCVNLTTRTQLPPAYTNSFTRGVYYPDKVFRSSVLHSTQDLFLPFFSNVTWFHAIHVSGTNGTKRFDNPVLPFNDGVYFASTEKSNIIRGWIFGTTLDSKTQSLLIVNNATNVVIKVCEFQFCNDPFLGVYYHKNNKSWMESEFRVYSSANNCTFEYVSQPFLMDLEGKQGNFKNLREFVFKNIDGYFKIYSKHTPINLVRDLPQGFSALEPLVDLPIGINITRFQTLLALHRSYLTPGDSSSGWTAGAAAYYVGYLQPRTFLLKYNENGTITDAVDCALDPLSETKCTLKSFTVEKGIYQTSNFRVQPTESIVRFPNITNLCPFGEVFNATRFASVYAWDRKRISNCVAYYSVLYNSASFSTFKCYGVSPTKLNDLCFTNVYADSFVIRGDEVRQIAPGQTGKIADYNYKLPDDFTGCVIAWNSNNLDSKVGGNYNYLYRLFRKSNLKPFERDISTEIYQAGSTPCNGVEGFNCYFPLQSYGFQPTNGVGYQPYRVVVLSFELLHAPATVCGPKKSTNLVKNKCVNFNFNGLTGTGVLTESNKKFLPFQQFGRDIADTTDAVRDPQTLEILDITPCSFGGVSVITPGTNTSNQVAVLYQDVNCTEVPVAIHADQLTPTWRVYSTGSNVFQTRAGCLIGAEHVNNSYECDIPIGAGICASYQTQTNSPRRARSVASQSIIAYTMSLGAENSVAYSNNSIAIPTNFTISVTTEILPVSMTKTSVDCTMYICGDSTECSNLLLQYGSFCTQLNRALTGIAVEQDKNTQEVFAQVKQIYKTPPIKDFGGFNFSQILPDPSKPSKRSFIEDLLFNKVTLADAGFIKQYGDCLGDIAARDLICAQKFNGLTVLPPLLTDEMIAQYCSALLAGTITSGWTFGAGAALQIPFAMQMAYRFNGIGVTQNVLYENQKLIANQFNSAIGKIQDSLSSTASALGKLQDVVNQNAQALNTLVKQLSSNFGAISSVLNDILSRLDKVEAEVQIDRLITGRLQSLQTYVTQQLIRAAEIRASANLAATKMSECVLGQSKRVDFCGKGYHLMSFPQCAPHGVVFLHVTYVPAQEKNFTTAPAICHDGKAHFPREGVFVSNGTHWFVTQRNFYEPQIITTDNTFVSGNCDVVIGIVNNTVYDPLQPELDS

SEQ ID NO: 3563 - protein, 1147 aa, Artificial Sequence
  SARS-CoV-2/France/IDF0372/2020__EPI_ISL_406596 spike protein (1-1147)(T874C_S1055C)
MFVFLVLLPLVSSQCVNLTTRTQLPPAYTNSFTRGVYYPDKVFRSSVLHSTQDLFLPFFSNVTWFHAIHVSGTNGTKRFDNPVLPFNDGVYFASTEKSNIIRGWIFGTTLDSKTQSLLIVNNATNVVIKVCEFQFCNDPFLGVYYHKNNKSWMESEFRVYSSANNCTFEYVSQPFLMDLEGKQGNFKNLREFVFKNIDGYFKIYSKHTPINLVRDLPQGFSALEPLVDLPIGINITRFQTLLALHRSYLTPGDSSSGWTAGAAAYYVGYLQPRTFLLKYNENGTITDAVDCALDPLSETKCTLKSFTVEKGIYQTSNFRVQPTESIVRFPNITNLCPFGEVFNATRFASVYAWNRKRISNCVADYSFLYNSASFSTFKCYGVSPTKLNDLCFTNVYADSFVIRGDEVRQIAPGQTGKIADYNYKLPDDFTGCVIAWNSNNLDSKVGGNYNYLYRLFRKSNLKPFERDISTEIYQAGSTPCNGVEGFNCYFPLQSYGFQPTNGVGYQPYRVVVLSFELLHAPATVCGPKKSTNLVKNKCVNFNFNGLTGTGVLTESNKKFLPFQQFGRDIADTTDAVRDPQTLEILDITPCSFGGVSVITPGTNTSNQVAVLYQDVNCTEVPVAIHADQLTPTWRVYSTGSNVFQTRAGCLIGAEHVNNSYECDIPIGAGICASYQTQTNSPRRARSVASQSIIAYTMSLGAENSVAYSNNSIAIPTNFTISVTTEILPVSMTKTSVDCTMYICGDSTECSNLLLQYGSFCTQLNRALTGIAVEQDKNTQEVFAQVKQIYKTPPIKDFGGFNFSQILPDPSKPSKRSFIEDLLFNKVTLADAGFIKQYGDCLGDIAARDLICAQKFNGLTVLPPLLTDEMIAQYCSALLAGTITSGWTFGAGAALQIPFAMQMAYRFNGIGVTQNVLYENQKLIANQFNSAIGKIQDSLSSTASALGKLQDVVNQNAQALNTLVKQLSSNFGAISSVLNDILSRLDKVEAEVQIDRLITGRLQSLQTYVTQQLIRAAEIRASANLAATKMSECVLGQSKRVDFCGKGYHLMSFPQCAPHGVVFLHVTYVPAQEKNFTTAPAICHDGKAHFPREGVFVSNGTHWFVTQRNFYEPQIITTDNTFVSGNCDVVIGIVNNTVYDPLQPELDS

SEQ ID NO: 3564 - protein, 1147 aa, Artificial Sequence
  SARS-CoV-2/Australia/VIC01/2020__EPI_ISL_406844 spike protein (1-1147)(T874C_S1055C)
MFVFLVLLPLVSSQCVNLTTRTQLPPAYTNSFTRGVYYPDKVFRSSVLHSTQDLFLPFFSNVTWFHAIHVSGTNGTKRFDNPVLPFNDGVYFASTEKSNIIRGWIFGTTLDSKTQSLLIVNNATNVVIKVCEFQFCNDPFLGVYYHKNNKSWMESEFRVYSSANNCTFEYVSQPFLMDLEGKQGNFKNLREFVFKNIDGYFKIYSKHTPINLVRDLPQGFSALEPLVDLPIGINITRFQTLLALHRRYLTPGDSSSGWTAGAAAYYVGYLQPRTFLLKYNENGTITDAVDCALDPLSETKCTLKSFTVEKGIYQTSNFRVQPTESIVRFPNITNLCPFGEVFNATRFASVYAWNRKRISNCVADYSVLYNSASFSTFKCYGVSPTKLNDLCFTNVYADSFVIRGDEVRQIAPGQTGKIADYNYKLPDDFTGCVIAWNSNNLDSKVGGNYNYLYRLFRKSNLKPFERDISTEIYQAGSTPCNGVEGFNCYFPLQSYGFQPTNGVGYQPYRVVVLSFELLHAPATVCGPKKSTNLVKNKCVNFNFNGLTGTGVLTESNKKFLPFQQFGRDIADTTDAVRDPQTLEILDITPCSFGGVSVITPGTNTSNQVAVLYQDVNCTEVPVAIHADQLTPTWRVYSTGSNVFQTRAGCLIGAEHVNNSYECDIPIGAGICASYQTQTNSPRRARSVASQSIIAYTMSLGAENSVAYSNNSIAIPTNFTISVTTEILPVSMTKTSVDCTMYICGDSTECSNLLLQYGSFCTQLNRALTGIAVEQDKNTQEVFAQVKQIYKTPPIKDFGGFNFSQILPDPSKPSKRSFIEDLLFNKVTLADAGFIKQYGDCLGDIAARDLICAQKFNGLTVLPPLLTDEMIAQYCSALLAGTITSGWTFGAGAALQIPFAMQMAYRFNGIGVTQNVLYENQKLIANQFNSAIGKIQDSLSSTASALGKLQDVVNQNAQALNTLVKQLSSNFGAISSVLNDILSRLDKVEAEVQIDRLITGRLQSLQTYVTQQLIRAAEIRASANLAATKMSECVLGQSKRVDFCGKGYHLMSFPQCAPHGVVFLHVTYVPAQEKNFTTAPAICHDGKAHFPREGVFVSNGTHWFVTQRNFYEPQIITTDNTFVSGNCDVVIGIVNNTVYDPLQPELDS

SEQ ID NO: 3565 - protein, 1147 aa, Artificial Sequence
  SARS-CoV-2/Germany/BavPat1/2020__EPI_ISL_406862 spike protein (1-1147)(T874C_S1055C)
MFVFLVLLPLVSSQCVNLTTRTQLPPAYTNSFTRGVYYPDKVFRSSVLHSTQDLFLPFFSNVTWFHAIHVSGTNGTKRFDNPVLPFNDGVYFASTEKSNIIRGWIFGTTLDSKTQSLLIVNNATNVVIKVCEFQFCNDPFLGVYYHKNNKSWMESEFRVYSSANNCTFEYVSQPFLMDLEGKQGNFKNLREFVFKNIDGYFKIYSKHTPINLVRDLPQGFSALEPLVDLPIGINITRFQTLLALHRSYLTPGDSSSGWTAGAAAYYVGYLQPRTFLLKYNENGTITDAVDCALDPLSETKCTLKSFTVEKGIYQTSNFRVQPTESIVRFPNITNLCPFGEVFNATRFASVYAWNRKRISNCVADYSVLYNSASFSTFKCYGVSPTKLNDLCFTNVYADSFVIRGDEVRQIAPGQTGKIADYNYKLPDDFTGCVIAWNSNNLDSKVGGNYNYLYRLFRKSNLKPFERDISTEIYQAGSTPCNGVEGFNCYFPLQSYGFQPTNGVGYQPYRVVVLSFELLHAPATVCGPKKSTNLVKNKCVNFNFNGLTGTGVLTESNKKFLPFQQFGRDIADTTDAVRDPQTLEILDITPCSFGGVSVITPGTNTSNQVAVLYQGVNCTEVPVAIHADQLTPTWRVYSTGSNVFQTRAGCLIGAEHVNNSYECDIPIGAGICASYQTQTNSPRRARSVASQSIIAYTMSLGAENSVAYSNNSIAIPTNFTISVTTEILPVSMTKTSVDCTMYICGDSTECSNLLLQYGSFCTQLNRALTGIAVEQDKNTQEVFAQVKQIYKTPPIKDFGGFNFSQILPDPSKPSKRSFIEDLLFNKVTLADAGFIKQYGDCLGDIAARDLICAQKFNGLTVLPPLLTDEMIAQYCSALLAGTITSGWTFGAGAALQIPFAMQMAYRFNGIGVTQNVLYENQKLIANQFNSAIGKIQDSLSSTASALGKLQDVVNQNAQALNTLVKQLSSNFGAISSVLNDILSRLDKVEAEVQIDRLITGRLQSLQTYVTQQLIRAAEIRASANLAATKMSECVLGQSKRVDFCGKGYHLMSFPQCAPHGVVFLHVTYVPAQEKNFTTAPAICHDGKAHFPREGVFVSNGTHWFVTQRNFYEPQIITTDNTFVSGNCDVVIGIVNNTVYDPLQPELDS

SEQ ID NO: 3566 - protein, 1147 aa, Artificial Sequence
  SARS-CoV-2/Wuhan/HBCDC-HB-02/2020__EPI_ISL_412978 spike protein (1-1147)(T874C_S1055C)
MFVFLVLLPLVSSQCVNLTTRTQLPPAYTNSFTRGVYYPDKVFRSSVLHSTQDLFLPFFSNVTWFHAIHVSGTNGTKRFDNPVLPFNDGVYFASTEKSNIIRGWIFGTTLDSKTQSLLIVNNATNVVIKVCEFQFCNDPFLGVYYHKNNKSWMESEFRVYSSANNCTFEYVSQPFLMDLEGKQGNFKNLREFVFKNIDGYFKIYSKHTPINLVRDLPQGFSALEPLVDLPIGINITRFQTLLALHRSYLTPGDSSSGWTAGAAAYYVGYLQPRTFLLKYNENGTITDAVDCALDPLSETKCTLKSFTVEKGIYQTSNFRVQPTESIVRFPNITNLCPFGEVFNATRFASVYAWNRKRISNCVADYSVLYNSASFSTFKCYGVSPTKLNDLCFTNVYADSFVIRGDEVRQIAPGQTGKIADYNYKLPDDFTGCVIAWNSNNLDSKVGGNYNYLYRLFRKSNLKPFERDISTEIYQAGSTPCNGVEGFNCYFPLQSYGFQPTNGVGYQPYRVVVLSFELLHAPATVCGPKKSTNLVKNKCVNFNFNGLTGTGVLTESNKKFLPFQQFGRDIADTTDAVRDPQTLEILDITPCSFGGVSVITPGTNTSNQVAVLYQDVNCTEVPVAIHADQLTPTWRVYSTGSNVFQTRAGCLIGAEHVNNSYECDIPIGAGICASYQTQTNSPRRARSVASQSIIAYTMSLGAENSVAYSNNSIAIPTNFTISVTTEILPVSMTKTSVDCTMYICGDSTECSNFLLQYGSFCTQLNRALTGIAVEQDKNTQEVFAQVKQIYKTPPIKDFGGFNFSQILPDPSKPSKRSFIEDLLFNKVTLADAGFIKQYGDCLGDIAARDLICAQKFNGLTVLPPLLTDEMIAQYCSALLAGTITSGWTFGAGAALQIPFAMQMAYRFNGIGVTQNVLYENQKLIANQFNSAIGKIQDSLSSTASALGKLQDVVNQNAQALNTLVKQLSSNFGAISSVLNDILSRLDKVEAEVQIDRLITGRLQSLQTYVTQQLIRAAEIRASANLAATKMSECVLGQSKRVDFCGKGYHLMSFPQCAPHGVVFLHVTYVPAQEKNFTTAPAICHDGKAHFPREGVFVSNGTHWFVTQRNFYEPQIITTDNTFVSGNCDVVIGIVNNTVYDPLQPELDS

SEQ ID NO: 3567 - protein, 1147 aa, Artificial Sequence
  SARS-CoV-2/Australia/QLD02/2020__EPI_ISL_407896 spike protein (1-1147)(T874C_S1055C)
MFVFLVLLPLVSSQCVNLTTRTQLPPAYTNSFTRGVYYPDKVFRSSVLHSTQDLFLPFFSNVTWFHAIHVSGTNGTKRFDNPVLPFNDGVYFASTEKSNIIRGWIFGTTLDSKTQSLLIVNNATNVVIKVCEFQFCNDPFLGVYYHKNNKSWMESEFRVYSSANNCTFEYVSQPFLMDLEGKQGNFKNLREFVFKNIDGYFKIYSKHTPINLVRDLPQGFSALEPLVDLPIGINITRFQTLLALHRSYLTPGDSSSGWTAGAAAYYVGYLQPRTFLLKYNENGTITDAVDCALDPLSETKCTLKSFTVEKGIYQTSNFRVQPTESIVRFPNITNLCPFGEVFNATRFASVYAWNRKRISNCVADYSVLYNSASFSTFKCYGVSPTKLNDLCFTNVYADSFVIRGDEVRQIAPGQTGKIADYNYKLPDDFTGCVIAWNSNNLDSKVGGNYNYLYRLFRKSNLKPFERDISTEIYQAGSTPCNGVEGFNCYFPLQSYGFQPTNGVGYQPYRVVVLSFELLHAPATVCGPKKSTNLVKNKCVNFNFNGLTGTGVLTESNKKFLPFQQFGRDIADTTDAVRDPQTLEILDITPCSFGGVSVITPGTNTSNQVAVLYQDVNCTEVPVAIHADQLTPTWRVYSTGSNVFQTRAGCLIGAEHVNNSYECDIPIGAGICASYQTQTNSPRRARSVASQSIIAYTMSLGAENSVAYSNNSIAIPTNFTISVTTEILPVSMTKTSVDCTMYICGDSTECSNLLLQYGSFCTQLNRALTGIAVEQDKNTQEVFAQVKQIYKTPPIKDFGGFNFSQILPDPSKPSKRSFIEDLLFNKVTLADAGFIKQYGDCLGDIAARDLICAQKFNGLTVLPPLLTDEMIAQYCSALLAGTITSGWTFGAGAALQIPFAMQMAYRFNGIGVTQNVLYENQKLIANQFNSAIGKIQDSLSSTASALGKLQDVVNQNAQALNTLVKQLSSNFGAISSVLNDILSRLDKVEAEVQIDRLITGRLQSLQTYVTQQLIRAAEIRASANLAATKMSECVLGQSKRVDFCGKGYHLMSFPQCAPHGVVFLHVTYVPAQEKNFTTAPAICHDGKAHFPREGVFVSNGTHWFVTQRNFYEPQIITTDNTFVSGNCDVVIGIVNNTVYDPLQLELDS

SEQ ID NO: 3568 - protein, 1147 aa, Artificial Sequence
  SARS-CoV-2/India/1-31/2020__EPI_ISL_413523 spike protein (1-1147)(T874C_S1055C)
MFVFLVLLPLVSSQCVNLTTRTQLPPAYTNSFTRGVYYPDKVFRSSVLHSTQDLFLPFFSNVTWFHAIHVSGTNGTKRFDNPVLPFNDGVYFASTEKSNIIRGWIFGTTLDSKTQSLLIVNNATNVVIKVCEFQFCNDPFLGVYYHKNNKSWMESEFRVYSSANNCTFEYVSQPFLMDLEGKQGNFKNLREFVFKNIDGYFKIYSKHTPINLVRDLPQGFSALEPLVDLPIGINITRFQTLLALHRSYLTPGDSSSGWTAGAAAYYVGYLQPRTFLLKYNENGTITDAVDCALDPLSETKCTLKSFTVEKGIYQTSNFRVQPTESIVRFPNITNLCPFGEVFNATRFASVYAWNRKRISNCVADYSVLYNSASFSTFKCYGVSPTKLNDLCFTNVYADSFVIRGDEVRQIAPGQTGKIADYNYKLPDDFTGCVIAWNSNNLDSKVGGNYNYLYRLFRKSNLKPFERDISTEIYQAGSTPCNGVEGFNCYFPLQSYGFQPTNGVGYQPYRVVVLSFELLHAPATVCGPKKSTNLVKNKCVNFNFNGLTGTGVLTESNKKFLPFQQFGRDIADTTDAVRDPQTLEILDITPCSFGGVSVITPGTNTSNQVAVLYQDVNCTEVPVAIHADQLTPTWRVYSTGSNVFQTRAGCLIGAEHVNNSYECDIPIGAGICASYQTQTNSPRRARSVASQSIIAYTMSLGAENSVAYSNNSIAIPTNFTISVTTEILPVSMTKTSVDCTMYICGDSTECSNLLLQYGSFCTQLNRALTGIAVEQDKNTQEVFAQVKQIYKTPPIKDFGGFNFSQILPDPSKPSKRSFIEDLLFNKVTLADAGFIKQYGDCLGDIAARDLICAQKFNGLTVLPPLLTDEMIAQYCSALLAGTITSGWTFGAGAALQIPFAMQMAYRFNGIGVTQNVLYENQKLIANQFNSVIGKIQDSLSSTASALGKLQDVVNQNAQALNTLVKQLSSNFGAISSVLNDILSRLDKVEAEVQIDRLITGRLQSLQTYVTQQLIRAAEIRASANLAATKMSECVLGQSKRVDFCGKGYHLMSFPQCAPHGVVFLHVTYVPAQEKNFTTAPAICHDGKAHFPREGVFVSNGTHWFVTQRNFYEPQIITTDNTFVSGNCDVVIGIVNNTVYDPLQPELDS

SEQ ID NO: 3569 - protein, 1147 aa, Artificial Sequence
  SARS-CoV-2/Guangdong/GD2020087-P0008/2020__EPI_ISL_413863 spike protein (1-1147)(T874C_S1055C)
MFVFLVLLPLVSSQCVNLTTRTQLPPAYTNSFTRGVYYPDKVFRSSVLHSTQDLFLPFFSNVTWFHAIHVSGTNGTKRFDNPVLPFNDGVYFASTEKSNIIRGWIFGTTLDSKTQSLLIVNNATNVVIKVCEFQFCNDPFLGVYYHKNNKSWMESEFRVYSSANNCTFEYVSQPFLMDLEGKQGNFKNLREFVFKNIDGYFKIYSKHTPINLVRDLPQGFSALEPLVDLPIGINITRFQTLLALHRSYLTPGDSSSGWTAGAAAYYVGYLQPRTFLLKYNENGTITDAVDCALDPLSETKCTLKSFTVEKGIYQTSNFRVQPTESIVRFPNITNLCPFGEVFNATRFASVYAWNRKRISNCVADYSVLYNSASFSTFKCYGVSPTKLNDLCFTNVYADSFVIRGDEVREIAPGQTGKIADYNYKLPDDFTGCVIAWNSNNLDSKVGGNYNYLYRLFRKSNLKPFERDISTEIYQAGSTPCNGVEGFNCYFPLQSYGFQPTNGVGYQPYRVVVLSFELLHAPATVCGPKKSTNLVKNKCVNFNFNGLTGTGVLTESNKKFLPFQQFGRDIADTTDAVRDPQTLEILDITPCSFGGVSVITPGTNTSNQVAVLYQDVNCTEVPVAIHADQLTPTWRVYSTGSNVFQTRAGCLIGAEHVNNSYECDIPIGAGICASYQTQTNSPRRARSVASQSIIAYTMSLGAENSVAYSNNSIAIPTNFTISVTTEILPVSMTKTSVDCTMYICGDSTECSNLLLQYGSFCTQLNRALTGIAVEQDKNTQEVFAQVKQIYKTPPIKDFGGFNFSQILPDPSKPSKRSFIEDLLFNKVTLADAGFIKQYGDCLGDIAARDLICAQKFNGLTVLPPLLTDEMIAQYCSALLAGTITSGWTFGAGAALQIPFAMQMAYRFNGIGVTQNVLYENQKLIANQFNSAIGKIQDSLSSTASALGKLQDVVNQNAQALNTLVKQLSSNFGAISSVLNDILSRLDKVEAEVQIDRLITGRLQSLQTYVTQQLIRAAEIRASANLAATKMSECVLGQSKRVDFCGKGYHLMSFPQCAPHGVVFLHVTYVPAQEKNFTTAPAICHDGKAHFPREGVFVSNGTHWFVTQRNFYEPQIITTDNTFVSGNCDVVIGIVNNTVYDPLQPELDS

SEQ ID NO: 3570 - protein, 1147 aa, Artificial Sequence
  SARS-CoV-2/Sweden/01/2020__EPI_ISL_411951 spike protein (1-1147)(T874C_S1055C)
MFVFLVLLPLVSSQCVNLTTRTQLPPAYTNSFTRGVYYPDKVFRSSVLHSTQDLFLPFFSNVTWFHAIHVSGTNGTKRFDNPVLPFNDGVYFASTEKSNIIRGWIFGTTLDSKTQSLLIVNNATNVVIKVCEFQFCNDPFLGVYYHKNNKSWMESEFRVYSSANNCTFEYVSQPFLMDLEGKQGNFKNLREFVFKNIDGYFKIYSKHTPINLVRDLPQGFSALEPLVDLPIGINITRFQTLLALHRSYLTPGDSSSGWTAGAAAYYVGYLQPRTFLLKYNENGTITDAVDCALDPLSETKCTLKSFTVEKGIYQTSNFRVQPTESIVRFPNITNLCPFGEVFNATRFASVYAWNRKRISNCVADYSVLYNSASFSTFKCYGVSPTKLNDLCFTNVYADSFVIRGDEVRQIAPGQTGKIADYNYKLPDDFTGCVIAWNSNNLDSKVGGNYNYLYRLFRKSNLKPFERDISTEIYQAGSTPCNGVEGFNCYFPLQSYGFQPTNGVGYQPYRVVVLSFELLHAPATVCGPKKSTNLVKNKCVNFNFNGLTGTGVLTESNKKFLPFQQFGRDIADTTDAVRDPQTLEILDITPCSFGGVSVITPGTNTSNQVAVLYQDVNCTEVPVAIHADQLTPTWRVYSTGSNVFQTRAGCLIGAEHVNNSYECDIPIGAGICASYQTQTNSPRRARSVASQSIIAYTMSLGAENSVAYSNNSIAIPTNFTISVTTEILPVSMTKTSVDCTMYICGDSTECSNLLLQYGSFCTQLNRALTGIAVEQDKNTQEVFAQVKQIYKTPPIKDCGGFNFSQILPDPSKPSKRSFIEDLLFNKVTLADAGFIKQYGDCLGDIAARDLICAQKFNGLTVLPPLLTDEMIAQYCSALLAGTITSGWTFGAGAALQIPFAMQMAYRFNGIGVTQNVLYENQKLIANQFNSAIGKIQDSLSSTASALGKLQDVVNQNAQALNTLVKQLSSNFGAISSVLNDILSRLDKVEAEVQIDRLITGRLQSLQTYVTQQLIRAAEIRASANLAATKMSECVLGQSKRVDFCGKGYHLMSFPQCAPHGVVFLHVTYVPAQEKNFTTAPAICHDGKAHFPREGVFVSNGTHWFVTQRNFYEPQIITTDNTFVSGNCDVVIGIVNNTVYDPLQPELDS

SEQ ID NO: 3571 - protein, 1147 aa, Artificial Sequence
  SARS-CoV-2/Tianmen/HBCDC-HB-07/2020__EPI_ISL_412983 spike protein (1-1147)(T874C_S1055C)
MFVFLVLLPLVSSQCVNLTTRTQLPPAYTNSFTRGVYYPDKVFRSSVLHSTQDLFLPFFSNVTWFHAIHVSGTNGTKRFDNPVLPFNDGVYFASTEKSNIIRGWIFGTTLDSKTQSLLIVNNATNVVIKVCEFQFCNDPFLGVYYHKNNKSWMESEFRVYSSANNCTFEYVSQPFLMDLEGKQGNFKNLREFVFKNIDGYFKIYSKHTPINLVRDLPQGFSALEPLVDLPIGINITRFQTLLALHRSYLTPGDSSSGWTAGAAAYYVGYLQPRTFLLKYNENGTITDAVDCALDPLSETKCTLKSFTVEKGIYQTSNFRVQPTESIVRFPNITNLCPFGEVFNATRFASVYAWNRKRISNCVADYSVLYNSASFSTFKCYGVSPTKLNDLCFTNVYADSFVIRGDEVRQIAPGQTGKIADYNYKLPDDFTGCVIAWNSNNLDSKVGGNYNYLYRLFRKSNLKPFERDISTEIYQAGSTPCNGVEGFNCYFPLQSYGFQPTNGVGYQPYRVVVLSFELLHAPATVCGPKKSTNLVKNKCVNFNFNGLTGTGVLTESNKKFLPFQQFGRDIADTTDAVRDPQTLEILDITPCSFGGVSVITPGTNTSNQVAVLYQDLNCTEVPVAIHADQLTPTWRVYSTGSNVFQTRAGCLIGAEHVNNSYECDIPIGAGICASYQTQTNSPRRARSVASQSIIAYTMSLGAENSVAYSNNSIAIPTNFTISVTTEILPVSMTKTSVDCTMYICGDSTECSNLLLQYGSFCTQLNRALTGIAVEQDKNTQEVFAQVKQIYKTPPIKDFGGFNFSQILPDPSKPSKRSFIEDLLFNKVTLADAGFIKQYGDCLGDIAARDLICAQKFNGLTVLPPLLTDEMIAQYCSALLAGTITSGWTFGAGAALQIPFAMQMAYRFNGIGVTQNVLYENQKLIANQFNSAIGKIQDSLSSTASALGKLQDVVNQNAQALNTLVKQLSSNFGAISSVLNDILSRLDKVEAEVQIDRLITGRLQSLQTYVTQQLIRAAEIRASANLAATKMSECVLGQSKRVDFCGKGYHLMSFPQCAPHGVVFLHVTYVPAQEKNFTTAPAICHDGKAHFPREGVFVSNGTHWFVTQRNFYEPQIITTDNTFVSGNCDVVIGIVNNTVYDPLQPELDS

SEQ ID NO: 3572 - protein, 1147 aa, Artificial Sequence
  SARS-CoV-2/Hong Kong/case42_VM20002493/2020__EPI_ISL_414527 spike protein (1-1147)(T874C_S1055C)
MFVFLVLLPLVSSQCVNLTTRTQLPPAYTNSFTRGVYYPDKVFRSSVLHSTQDLFLPFFSNVTWFHAIHVSGTNGTKRFDNPVLPFNDGVYFASTEKSNIIRGWIFGTTLDSKTQSLLIVNNATNVVIKVCEFQFCNDPFLGVYYHKNNKSWMESEFRVYSSANNCTFEYVSQPFLMDLEGKQGNFKNLREFVFKNIDGYFKIYSKHTPINLVRDLPQGFSALEPLVDLPIGINITRFQTLLALHRSYLTPGDSSSGWTAGAAAYYVGYLQPRTFLLKYNENGTITDAVDCALDPLSETKCTLKSFTVEKGIYQTSNFRVQPTESIVRFPNITNLCPFGEVFNATRFASVYAWNRKRISNCVADYSVLYNSASFSTFKCYGVSPTKLNDLCFTNVYADSFVIRGDEVRQIAPGQTGKIADYNYKLPDDFTGCVIAWNSNNLDSKVGGNYNYLYRLFRKSNLKPFERDISTEIYQAGSTPCNGVEGFNCYFPLQSYGFQPTNGVGYQPYRVVVLSFELLHAPATVCGPKKSTNLVKNKCVNFNFNGLTGTGVLTESNKKFLPFQQFGRDIADTTDAVRDPQTLEILDITPCSFGGVSVITPGTNTSNQVAVLYQDVNCTEVPVAIHADQLTPTWRVYSTGSNVFQTRAGCLIGAEHVNNSYECDIPIGAGICASYQTQTNSPRRARSVASQSIIAYTMSLGAENSVAYSNNSIAIPTNFAISVTTEILPVSMTKTSVDCTMYICGDSTECSNLLLQYGSFCTQLNRALTGIAVEQDKNTQEVFAQVKQIYKTPPIKDFGGFNFSQILPDPSKPSKRSFIEDLLFNKVTLADAGFIKQYGDCLGDIAARDLICAQKFNGLTVLPPLLTDEMIAQYCSALLAGTITSGWTFGAGAALQIPFAMQMAYRFNGIGVTQNVLYENQKLIANQFNSAIGKIQDSLSSTASALGKLQDVVNQNAQALNTLVKQLSSNFGAISSVLNDILSRLDKVEAEVQIDRLITGRLQSLQTYVTQQLIRAAEIRASANLAATKMSECVLGQSKRVDFCGKGYHLMSFPQCAPHGVVFLHVTYVPAQEKNFTTAPAICHDGKAHFPREGVFVSNGTHWFVTQRNFYEPQIITTDNTFVSGNCDVVIGIVNNTVYDPLQPELDS

SEQ ID NO: 3573 - protein, 1147 aa, Artificial Sequence
  SARS-CoV-2/USA/CruiseA-23/2020__EPI_ISL_414482 spike protein (1-1147)(T874C_S1055C)
MFVFLVLLPLVSSQCVNLTTRTQLPPAYTNSFTRGVYYPDKVFRSSVLHSTQDLFLPFFSNVTWFHAIHVSGTNGTKRFDNPVLPFNDGVYFASTEKSNIIRGWIFGTTLDSKTQSLLIVNNATNVVIKVCEFQFCNDPFLGVYYHKNNKSWMESEFRVYSSANNCTFEYVSQPFLMDLEVKQGNFKNLREFVFKNIDGYFKIYSKHTPINLVRDLPQGFSALEPLVDLPIGINITRFQTLLALHRSYLTPGDSSSGWTAGAAAYYVGYLQPRTFLLKYNENGTITDAVDCALDPLSETKCTLKSFTVEKGIYQTSNFRVQPTESIVRFPNITNLCPFGEVFNATRFASVYAWNRKRISNCVADYSVLYNSASFSTFKCYGVSPTKLNDLCFTNVYADSFVIRGDEVRQIAPGQTGKIADYNYKLPDDFTGCVIAWNSNNLDSKVGGNYNYLYRLFRKSNLKPFERDISTEIYQAGSTPCNGVEGFNCYFPLQSYGFQPTNGVGYQPYRVVVLSFELLHAPATVCGPKKSTNLVKNKCVNFNFNGLTGTGVLTESNKKFLPFQQFGRDIADTTDAVRDPQTLEILDITPCSFGGVSVITPGTNTSNQVAVLYQDVNCTEVPVAIHADQLTPTWRVYSTGSNVFQTRAGCLIGAEHVNNSYECDIPIGAGICASYQTQTNSPRRARSVASQSIIAYTMSLGAENSVAYSNNSIAIPTNFTISVTTEILPVSMTKTSVDCTMYICGDSTECSNLLLQYGSFCTQLNRALTGIAVEQDKNTQEVFAQVKQIYKTPPIKDFGGFNFSQILPDPSKPSKRSFIEDLLFNKVTLADAGFIKQYGDCLGDIAARDLICAQKFNGLTVLPPLLTDEMIAQYCSALLAGTITSGWTFGAGAALQIPFAMQMAYRFNGIGVTQNVLYENQKLIANQFNSAIGKIQDSLSSTASALGKLQDVVNQNAQALNTLVKQLSSNFGAISSVLNDILSRLDKVEAEVQIDRLITGRLQSLQTYVTQQLIRAAEIRASANLAATKMSECVLGQSKRVDFCGKGYHLMSFPQCAPHGVVFLHVTYVPAQEKNFTTAPAICHDGKAHFPREGVFVSNGTHWFVTQRNFYEPQIITTDNTFVSGNCDVVIGIVNNTVYDPLQPELDS

SEQ ID NO: 3574 - protein, 1147 aa, Artificial Sequence
  SARS-CoV-2/Hong Kong/case85_VM20002868/2020__EPI_ISL_414519 spike protein (1-1147)(T874C_S1055C)
MFVFLVLVPLVSSQCVNLTTRTQLPPAYTNSFTRGVYYPDKVFRSSVLHSTQDLFLPFFSNVTWFHAIHVSGTNGTKRFDNPVLPFNDGVYFASTEKSNIIRGWIFGTTLDSKTQSLLIVNNATNVVIKVCEFQFCNDPFLGVYYHKNNKSWMESEFRVYSSANNCTFEYVSQPFLMDLEGKQGNFKNLREFVFKNIDGYFKIYSKHTPINLVRDLPQGFSALEPLVDLPIGINITRFQTLLALHRSYLTPGDSSSGWTAGAAAYYVGYLQPRTFLLKYNENGTITDAVDCALDPLSETKCTLKSFTVEKGIYQTSNFRVQPTESIVRFPNITNLCPFGEVFNATRFASVYAWNRKRISNCVADYSVLYNSASFSTFKCYGVSPTKLNDLCFTNVYADSFVIRGDEVRQIAPGQTGKIADYNYKLPDDFTGCVIAWNSNNLDSKVGGNYNYLYRLFRKSNLKPFERDISTEIYQAGSTPCNGVEGFNCYFPLQSYGFQPTNGVGYQPYRVVVLSFELLHAPATVCGPKKSTNLVKNKCVNFNFNGLTGTGVLTESNKKFLPFQQFGRDIADTTDAVRDPQTLEILDITPCSFGGVSVITPGTNTSNQVAVLYQDVNCTEVPVAIHADQLTPTWRVYSTGSNVFQTRAGCLIGAEHVNNSYECDIPIGAGICASYQTQTNSPRRARSVASQSIIAYTMSLGAENSVAYSNNSIAIPTNFTISVTTEILPVSMTKTSVDCTMYICGDSTECSNLLLQYGSFCTQLNRALTGIAVEQDKNTQEVFAQVKQIYKTPPIKDFGGFNFSQILPDPSKPSKRSFIEDLLFNKVTLADAGFIKQYGDCLGDIAARDLICAQKFNGLTVLPPLLTDEMIAQYCSALLAGTITSGWTFGAGAALQIPFAMQMAYRFNGIGVTQNVLYENQKLIANQFNSAIGKIQDSLSSTASALGKLQDVVNQNAQALNTLVKQLSSNFGAISSVLNDILSRLDKVEAEVQIDRLITGRLQSLQTYVTQQLIRAAEIRASANLAATKMSECVLGQSKRVDFCGKGYHLMSFPQCAPHGVVFLHVTYVPAQEKNFTTAPAICHDGKAHFPREGVFVSNGTHWFVTQRNFYEPQIITTDNTFVSGNCDVVIGIVNNTVYDPLQPELDS

SEQ ID NO: 3575 - protein, 1147 aa, Artificial Sequence; identical to SEQ ID NO: 3565
  SARS-CoV-2/England/200990660/2020__EPI_ISL_414523 spike protein (1-1147)(T874C_S1055C)

SEQ ID NO: 3576 - protein, 1147 aa, Artificial Sequence
  SARS-CoV-2/Australia/NSW09/2020__EPI_ISL_413595 spike protein (1-1147)(T874C_S1055C)
MFVFLVLLPLVSSQCVNLTTRTQLPPAYTNSFTRGVYYPDKVFRSSVLHSTQDLFLPFFSNVTWFHAIHVSGTNGTKRFDNPVLPFNDGVYFASTEKSNIIRGWIFGTTLDSKTQSLLIVNNATNVVIKVCEFQFCNDPFLGVYYHKNNKSWMESEFRVYSSANNCTFEYVSQPFLMDLEGKQGNFKNLREFVFKNIDGYFKIYSKHTPINLVRDLPQGFSALEPLVDLPIGINITRFQTLLALHRSYLTPGDSSSGWTAGAAAYYVGYLQPRTFLLKYNENGTITDAVDCALDPLSETKCTLKSFTVEKGIYQTSNFRVQPTESIVRFPNITNLCPFGEVFNATRFASVYAWNRKRISNCVADYSVLYNSASFSTFKCYGVSPTKLNDLCFTNVYADSFVIRGDEVRQIAPGQTGKIADYNYKLPDDFTGCVIAWNSNNLDSKVGGNYNYLYRLFRKSNLKPFERDISTEIYQAGSTPCNGVEGFNCYFPLQSYGFQPTNGVGYQPYRVVVLSFELLHAPATVCGPKKSTNLVKNKCVNFNFNGLTGTGVLTESNKKFLPFQQFGRDIADTTDAVRDPQTLEILDITPCSFGGVSVITPGTNTSNQVAVLYQDVNCTEVPVAIHADQLTPTWRVYSTGSNVFQTRAGCLIGAEHVNNSYECDIPIGAGICASYQTQTNSPRRARSVASQSIIAYTMSLGAENSVAYSNNSIAIPTNFTISVTTEILPVSMTKTSVDCTMYICGDSTECSNLLLQYGSFCTQLNRALTGIAVEQDKNTQEVFAQVKQIYKTPPIKDFGGFNFSQILPDPSKPSKRSFIEDLLFNKVTLADAGFIKQYGDCLGDIAARDLICAQKFNGLTVLPPLLTDEMIAQYCSALLAGTITSGWTFGAGAALQIPFAMQMAYRFNGIGVTQNVLYENQKLIANQFNSAIGKIQDSLSFTASALGKLQDVVNQNAQALNTLVKQLSSNFGAISSVLNDILSRLDKVEAEVQIDRLITGRLQSLQTYVTQQLIRAAEIRASANLAATKMSECVLGQSKRVDFCGKGYHLMSFPQCAPHGVVFLHVTYVPAQEKNFTTAPAICHDGKAHFPREGVFVSNGTHWFVTQRNFYEPQIITTDNTFVSGNCDVVIGIVNNTVYDPLQPELDS

SEQ ID NO: 3577 - protein, 1147 aa, Artificial Sequence; identical to SEQ ID NO: 3557
  SARS-CoV-2/Australia/NSW10/2020__EPI_ISL_413596 spike protein (1-1147)(T874C_S1055C)

SEQ ID NO: 3578 - protein, 1147 aa, Artificial Sequence
  SARS-CoV-2/Switzerland/1000477797/2020__EPI_ISL_413023 spike protein (1-1147)(T874C_S1055C)
MFVFLVLLPLVSSQCVNLTTRTQLPPAYTNSFTRGVYYPDKVFRSSVLHSTQDLFLPFFSNVTWFHAIHVSGTNGTKRFDNPVLPFNDGVYFASTEKSNIIRGWIFGTTLDSKTQSLLIVNNATNVVIKVCEFQFCNDPFLGVYYHKNNKSWMESEFRVYSSANNCTFEYVSQPFLMDLEGKQGNFKNLREFVFKNIDGYFNIYSKHTPINLVRDLPQGFSALEPLVDLPIGINITRFQTLLALHRSYLTPGDSSSGWTAGAAAYYVGYLQPRTFLLKYNENGTITDAVDCALDPLSETKCTLKSFTVEKGIYQTSNFRVQPTESIVRFPNITNLCPFGEVFNATRFASVYAWNRKRISNCVADYSVLYNSASFSTFKCYGVSPTKLNDLCFTNVYADSFVIRGDEVRQIAPGQTGKIADYNYKLPDDFTGCVIAWNSNNLDSKVGGNYNYLYRLFRKSNLKPFERDISTEIYQAGSTPCNGVEGFNCYFPLQSYGFQPTNGVGYQPYRVVVLSFELLHAPATVCGPKKSTNLVKNKCVNFNFNGLTGTGVLTESNKKFLPFQQFGRDIADTTDAVRDPQTLEILDITPCSFGGVSVITPGTNTSNQVAVLYQGVNCTEVPVAIHADQLTPTWRVYSTGSNVFQTRAGCLIGAEHVNNSYECDIPIGAGICASYQTQTNSPRRARSVASQSIIAYTMSLGAENSVAYSNNSIAIPTNFTISVTTEILPVSMTKTSVDCTMYICGDSTECSNLLLQYGSFCTQLNRALTGIAVEQDKNTQEVFAQVKQIYKTPPIKDFGGFNFSQILPDPSKPSKRSFIEDLLFNKVTLADAGFIKQYGDCLGDIAARDLICAQKFNGLTVLPPLLTDEMIAQYCSALLAGTITSGWTFGAGAALQIPFAMQMAYRFNGIGVTQNVLYENQKLIANQFNSAIGKIQDSLSSTASALGKLQDVVNQNAQALNTLVKQLSSNFGAISSVLNDILSRLDKVEAEVQIDRLITGRLQSLQTYVTQQLIRAAEIRASANLAATKMSECVLGQSKRVDFCGKGYHLMSFPQCAPHGVVFLHVTYVPAQEKNFTTAPAICHDGKAHFPREGVFVSNGTHWFVTQRNFYEPQIITTDNTFVSGNCDVVIGIVNNTVYDPLQPELDS

SEQ ID NO: 3579 - protein, 1147 aa, Artificial Sequence
  SARS-CoV-2/Belgium/BA-02291/2020__EPI_ISL_415159 spike protein (1-1147)(T874C_S1055C)
MFVFLVLLPLVSSQCVNLTTRTQLPPAYTNSFTRGVYYPDKVFRSSVLHSTQDLFLPFFSNVTWFHAIHVSGTNGTKRFDNPVLPFNDGVYFASTEKSNIIRGWIFGTTLDSKTQSLLIVNNATNVVIKVCEFQFCNDPFLGVYYHKNNKSWMESEFRVYSSANNCTFEYVSQPFLMDLEGKQGNFKNLREFVFKNIDGYFKIYSKHTPINLVRDLPQGFSALEPLVDLPIGINITRFQTLLALHRSYLTPGDSSSGWTAGAAAYYVGYLQPRTFLLKYNENGTITDAVDCALDPLSETKCTLKSFTVEKGIYQTSNFRVQPTESIVRFPNITNLCPFGEVFNATRFASVYAWNRKRISNCVADYSVLYNSASFSTFKCYGVSPTKLNDLCFTNVYADSFVIRGDEVRQIAPGQTGKIADYNYKLPDDFTGCVIAWNSNNLDSKVGGNYNYLYRLFRRSNLKPFERDISTEIYQAGSTPCNGVEGFNCYFPLQSYGFQPTNGVGYQPYRVVVLSFELLPAPATVCGPKKSTNLVKNKCVNFNFNGLTGTGVLTESNKKFLPFQQFGRDIADTTDAVRDPQTLEILDITPCSFGGVSVITPGTNTSNQVAVLYQGVNCTEVPVAIHADQLTPTWRVYSTGSNVFQTRAGCLIGAEHVNNSYECDIPIGAGICASYQTQTNSPRRARSVASQSIIAYTMSLGAENSVAYSNNSIAIPTNFTISVTTEILPVSMTKTSVDCTMYICGDSTECSNLLLQYGSFCTQLNRALTGIAVEQDKNTQEVFAQVKQIYKTPPIKDFGGFNFSQILPDPSKPSKRSFIEDLLFNKVTLADAGFIKQYGDCLGDIAARDLICAQKFNGLTVLPPLLTDEMIAQYCSALLAGTITSGWTFGAGAALQIPFAMQMAYRFNGIGVTQNVLYENQKLIANQFNSAIGKIQDSLSSAAPALGKLQDVVNQNAQALNTLVKQLSSNFGAISSVLNDILSRLDKVEAEVQIDRLITGRLQSLQTYVTQQLIRAAEIRASANLAATKMSECVLGQSKRVDFCGKGYHLMSFPQCAPHGVVFLHVTYVPAQEKNFTTAPAICHDGKAHFPREGVFVSNGTHWFVTQRNFYEPQIITTDNTFVSGNCDVVIGIVNNTVYDPLQPELDS

SEQ ID NO: 3580 - protein, 1147 aa, Artificial Sequence
  SARS-CoV-2/USA/WA8-UW5/2020__EPI_ISL_413486 spike protein (1-1147)(T874C_S1055C)
MFVFLVLLPLVSSQCVNLTTRTQLPPAYTNSFTRGVYYPDKVFRSSVLHSTQDLFLPFFSNVTWFHAIHVSGTNGTKRFDNPVLPFNDGVYFASTEKSNIIRGWIFGTTLDSKTQSLLIVNNATNVVIKVCEFQFCNDPFLGVYYHKNNKSWMESEFRVYSSANNCTFEYVSQPFLMDLEGKQGNFKNLREFVFKNIDGYFKIYSKHTPINLVRDLPQGFSALEPLVDLPIGINITRFQTLLALHRSYLTPGDSSSGWTAGAAAYYVGYLQPRTFLLKYNENGTITDAVDCALDPLSETKCTLKSFTVEKGIYQTSNFRVQPTESIVRFPNITNLCPFGEVFNATRFASVYAWNRKRISNCVADYSVLYNSASFSTFKCYGVSPTKLNDLCFTNVYADSFVIRGDEVRQIAPGQTGKIADYNYKLPDDFTGCVIAWNSNNLDSKVGGNYNYLYRLFRKSNLKPFERDISTEIYQAGSTPCNGVEGFNCYFPLQSYGFQPTNGVGYQPYRVVVLSFELLHAPATVCGPKKSTNLVKNKCVNFNFNGLTGTGVLTESNKKFLPFQQFGRDIADTTDAVRDPQTLEILDITPCSFGGVSVITPGTNTSNQVAVLYQDVNCTEVPVAIHADQLTPTWRVYSTGSNVFQTRAGCLIGAEYVNNSYECDIPIGAGICASYQTQTNSPRRARSVASQSIIAYTMSLGAENSVAYSNNSIAIPTNFTISVTTEILPVSMTKTSVDCTMYICGDSTECSNLLLQYGSFCTQLNRALTGIAVEQDKNTQEVFAQVKQIYKTPPIKDFGGFNFSQILPDPSKPSKRSFIEDLLFNKVTLADAGFIKQYGDCLGDIAARDLICAQKFNGLTVLPPLLTDEMIAQYCSALLAGTITSGWTFGAGAALQIPFAMQMAYRFNGIGVTQNVLYENQKLIANQFNSAIGKIQDSLSSTASALGKLQDVVNQNAQALNTLVKQLSSNFGAISSVLNDILSRLDKVEAEVQIDRLITGRLQSLQTYVTQQLIRAAEIRASANLAATKMSECVLGQSKRVDFCGKGYHLMSFPQCAPHGVVFLHVTYVPAQEKNFTTAPAICHDGKAHFPREGVFVSNGTHWFVTQRNFYEPQIITTDNTFVSGNCDVVIGIVNNTVYDPLQPELDS

SEQ ID NO: 3581 - protein, 1147 aa, Artificial Sequence
  SARS-CoV-2/England/20102000506/2020__EPI_ISL_415147 spike protein (1-1147)(T874C_S1055C)
MFVFLVLLPLVSSQCVNLTTRTQLPPAYTNSFTRGVYYPDKVFRSSVLHSTQDLFLPFFSNVTWFHAIHVSGTNGTKRFDNPVLPFNDGVYFASTEKSNIIRGWIFGTTLDSKTQSLLIVNNATNVVIKVCEFQFCNDPFLGVYYHKNNKSWMESEFRVYSSANNCTFEYVSQPFLMDLEGKQGNFKNLREFVFKNIDGYFKIYSKHTPINLVRDLPQGFSALEPLVDLPIGINITRFQTLLALHRSYLTPGDSSSGWTAGAAAYYVGYLQPRTFLLKYNENGTITDAVDCALDPLSETKCTLKSFTVEKGIYQTSNFRVQPTESIVRFPNITNLCPFGEVFNATRFASVYAWNRKRISNCVADYSVLYNSASFSTFKCYGVSPTKLNDLCFTNVYADSFVIRGDEVRQIAPGQTGKIADYNYKLPDDFTGCVIAWNSNNLDSKVGGNYNYLYRLFRKSNLKPFERDISTEIYQAGSTPCNGVEGFNCYFPLQSYGFQPTNGVGYQPYRVVVLSFELLHAPATVCGPKKSTNLVKNKCVNFNFNGLTGTGVLTESNKKFLPFQQFGRDIADTTDAVRDPQTLEILDITPCSFGGVSVITPGTNTSNQVAVLYQGVNCTEVPVAIHADQLTPTWRVYSTGSNVFQTRAGCLIGAEHVNNSYECDIPIGAGICASYQTQTNSPRRARSVASQSIIAYTMSLGAENSVAYSNNSIAIPTNFTISVTTEILPVSMTKTSVDCTMYICGDSTECSNLLLQYGSFCTQLNRALTGIAVEQDKNTQEVFAQVKQIYKTPPIKDFGGFNFSQILPDPSKPSKRSFIEDLLFNKVTLADAGFIKQYGYCLGDIAARDLICAQKFNGLTVLPPLLTDEMIAQYCSALLAGTITSGWTFGAGAALQIPFAMQMAYRFNGIGVTQNVLYENQKLIANQFNSAIGKIQDSLSSTASALGKLQDVVNQNAQALNTLVKQLSSNFGAISSVLNDILSRLDKVEAEVQIDRLITGRLQSLQTYVTQQLIRAAEIRASANLAATKMSECVLGQSKRVDFCGKGYHLMSFPQCAPHGVVFLHVTYVPAQEKNFTTAPAICHDGKAHFPREGVFVSNGTHWFVTQRNFYEPQIITTDNTFVSGNCDVVIGIVNNTVYDPLQPELDS

SEQ ID NO: 3582 - protein, 1147 aa, Artificial Sequence
  SARS-CoV-2/Belgium/VAG-03013/2020__EPI_ISL_415155 spike protein (1-1147)(T874C_S1055C)
MFVFLVLLPLVSSQCVNLTTRTQLPPAYTNSFTRGVYYPDKVFRSSVLHSTQDLFLPFFSNVTWFHAIHVSGTNGTKRFDNPVLPFNDGVYFASTEKSNIIRGWIFGTTLDSKTQSLLIVNNATNVVIKVCEFQFCNDPFLGVYYHKNNKSWMESEFRVYSSANNCTFEYVSQPFLMDLEGKQGNFKNLREFVFKNIDGYFKIYSKHTPINLVRDLPQGFSALEPLVDLPIGINITRFQTLLALHRSYLTPGDSSSGWTAGAAAYYVGYLQPRTFLLKYNENGTITDAVDCALDPLSETKCTLKSFTVEKGIYQTSNFRVQPTESIVRFPNITNLCPFGEVFNATRFASVYAWNRKRISNCVADYSVLYNSASFSTFKCYGVSPTKLNDLCFTNVYADSFVIRGDEVRQIAPGQTGKIADYNYKLPDDFTGCVIAWNSNNLDSKVGGNYNYLYRLFRKSNLKPFERDISTEIYQAGSTPCNGVEGFNCYFPLQSYGFQPTNGVGYQPYRVVVLSFELLHAPATVCGPKKSTNLVKNKCVNFNFNGLTGTGVLTESNKKFLPFQQFGRDIADTTDAVRDPQTLEILDITPCSFGGVSVITPGTNTSNQVAVLYQGVNCTEVPVAIHADQLTPTWRVYSTGSNVFQTRAGCLIGAEHVNNSYECDIPIGAGICASYQTQTNSPRRARSVASQSIIAYTMSLGAENSVAYSNNSIAIPTNFTISVTTEILPVSMTKTSVDCTMYICGDSTECSNLLLQYGSFCTQLNRALTGIAVEQDKNTQEVFAQVKQIYKTPPIKDFGGFNFSQILPDPSKPSKRSFIEDLLFNKVTLADAGFIKQYGDCLGDIAARDLICAQKFNGLTVLPPLLTDEMIAQYCSALLAGTITSGWTFGAGAALQIPFAMQMAYRFNGIGVTQNVLYENQKLIANQFNSAIGKIQDSLSSTATALGKLQDVVNQNAQALNTLVKQLSSNFGAISSVLNDILSRLDKVEAEVQIDRLITGRLQSLQTYVTQQLIRAAEIRASANLAATKMSECVLGQSKRVDFCGKGYHLMSFPQCAPHGVVFLHVTYVPAQEKNFTTAPAICHDGKAHFPREGVFVSNGTHWFVTQRNFYEPQIITTDNTFVSGNCDVVIGIVNNTVYDPLQPELDS

SEQ ID NO: 3583 - protein, 1147 aa, Artificial Sequence
  SARS-CoV-2/Belgium/BC-03016/2020__EPI_ISL_415157 spike protein (1-1147)(T874C_S1055C)
MFVFLVLLPLVSSQCVNLTTRTQLPPAYTNSFTRGVYYPDKVFRSSVLHSTQDLFLPFFSNVTWFHAIHVSGTNGTKRFDNPVLPFNDGVYFASTEKSNIIRGWIFGTTLDSKTQSLLIVNNATNVVIKVCEFQFCNDPFLGVYYHKNNKSWMESEFRVYSSANNCTFEYVSQPFLMDLEGKQGNFKNLREFVFKNIDGYFKIYSKHTPINLVRDLPQGFSALEPLVDLPIGINITRFQTLLALHRSYLTPGDSSSGWTAGAAAYYVGYLQPRTFLLKYNENGTITDAVDCALDPLSETKCTLKSFTVEKGIYQTSNFRVQPTESIVRFPNITNLCPFGEVFNATRFASVYAWNRKRISNCVADYSVLYNSASFSTFKCYGVSPTKLNDLCFTNVYADSFVIRGDEVRQIAPGQTGKIADYNYKLPDDFTGCVIAWNSNNLDSKVGGNYNYLYRLFRKSNLKPFERDISTEIYQAGSTPCNGVEGFNCYFPLQSYGFQPTNGVGYQPYRVVVLSFELLHAPATVCGPKKSTNLVKNKCVNFNFNGLTGTGVLTESNKKFLPFQQFGRDIADTTDAVRDPQTLEILDITPCSFGGVSVITPGTNTSNQVAVLYQGVNCTEVPVAIHADQLTPTWRVYSTGSNVFQTRAGCLIGAEHVNNSYECDIPIGAGICASYQTQTNSPRRARSVASQSIIAYTMSLGAENSVAYSNNSIAIPTNFTISVTTEILPVSMTKTSVDCTMYICGDSTECSNLLLQYGSFCTQLNRALTGIAVEQDKNTQEVFAQVKQIYKTPPIKDFGGFNFSQILPDPSKPSKRSFIEDLLFNKVTLADAGFIKQYGDCLGDIAARDLICAQKFNGLTVLPPLLTDEMIAQYCSALLAGTITSGWTFGAGAALQIPFAMQMAYRFNGIGVTQNVLYENQKLIANQFNSAIGKIQDSLSSTAPALGKLQDVVNQNAQALNTLVKQLSSNFGAISSVLNDILSRLDKVEAEVQIDRLITGRLQSLQTYVTQQLIRAAEIRASANLAATKMSECVLGQSKRVDFCGKGYHLMSFPQCAPHGVVFLHVTYVPAQEKNFTTAPAICHDGKAHFPREGVFVSNGTHWFVTQRNFYEPQIITTDNTFVSGNCDVVIGIVNNTVYDPLQPELDS

SEQ ID NO: 3584 - protein, 1147 aa, Artificial Sequence
  SARS-CoV-2/Germany/BavPat3/2020__EPI_ISL_414521 spike protein (1-1147)(T874C_S1055C)
MFVFLVLLPLVSSQCVNLTTRTQLPPAYTNSFTRGVYYPDKVFRSSVLHSTQDLFLPFFSNVTWFHAIHVSGTNGTKRFDNPVLPFNDGVYFASTEKSNIIRGWIFGTTLDSKTQSLLIVNNATNVVIKVCEFQFCNDPFLGVYYHKNNKSWMESEFRVYSSANNCTFEYVSQPFLMDLEGKQGNFKNLREFVFKNIDGYFKIYSKHTPINLVRDLPQGFSALEPLVDLPIGINITRFQTLLALHRSYLTPGDSSSGWTAGAAAYYVGYLQPRTFLLKYNENGTITDAVDCALDPLSETKCTLKSFTVEKGIYQTSNFRVQPTESIVRFPNITNLCPFGEVFNATRFASVYAWNRKRISNCVADYSVLYNSASFSTFKCYGVSPTKLNDLCFTNVYADSFVIRGDEVRQIAPGQTGKIADYNYKLPDDFTGCVIAWNSNNLDSKVGGNYNYLYRLFRKSNLKPFERDISTEIYQAGSTPCNGVEGFNCYFPLQSYGFQPTNGVGYQPYRVVVLSFELLHAPATVCGPKKSTNLVKNKCVNFNFNGLTGTGVLTESNKKFLPFQQFGRDIADTTDAVRDPQTLEILDITPCSFGGVSVITPGTNTSNQVAVLYQDVNCTEVPVAIHADQLTPTWRVYSTGSNVFQTRAGCLIGAEHVNNSYECDIPIGAGICASYQTQTNSPRRARSVASQSIIAYTMSLGAENSVAYSNNSIAIPTNFTISVTTEILPVSMTKTSVDCTMYICGDSTECSNLLLQYGSFCTQLNRALTGIAVEQDKNTQQVFAQVKQIYKTPPIKDFGGFNFSQILPDPSKPSKRSFIEDLLFNKVTLADAGFIKQYGDCLGDIAARDLICAQKFNGLTVLPPLLTDEMIAQYCSALLAGTITSGWTFGAGAALQIPFAMQMAYRFNGIGVTQNVLYENQKLIANQFNSAIGKIQDSLSSTASALGKLQDVVNQNAQALNTLVKQLSSNFGAISSVLNDILSRLDKVEAEVQIDRLITGRLQSLQTYVTQQLIRAAEIRASANLAATKMSECVLGQSKRVDFCGKGYHLMSFPQCAPHGVVFLHVTYVPAQEKNFTTAPAICHDGKAHFPREGVFVSNGTHWFVTQRNFYEPQIITTDNTFVSGNCDVVIGIVNNTVYDPLQPELDS

SEQ ID NO: 3585 - protein, 1147 aa, Artificial Sequence
  SARS-CoV-2/France/HF1805/2020__EPI_ISL_414628 spike protein (1-1147)(T874C_S1055C)
MFVFLVLLPLVSSQCVNLTTRTQLPPAYTNSFTRGVYYPDKVFRSSVLHSTQDLFLPFFSNVTWFHAIHVSGTNGTKRFDNPVLPFNDGVYFASTEKSNIIRGWIFGTTLDSKTQSLLIVNNATNVVIKVCEFQFCNDPFLGVYYHKNNKSWMESEFRVYSSANNCTFEYVSQPFLMDLEGKQGNFKNLREFVFKNIDGYFKIYSKHTPINLVRDLPQGFSALEPLVDLPIGINITRFQTLLALHRSYLTPGDSSSGWTAGAAAYYVGYLQPRTFLLKYNENGTITDAVDCALDPLSETKCTLKSFTVEKGIYQTSNFRVQPTESIVRFPNITNLCPFGEVFNATRFASVYAWNRKRISNCVADYSVLYNSASFSTFKCYGVSPTKLNDLCFTNVYADSFVIRGDEVRQIAPGQTGKIADYNYKLPDDFTGCVIAWNSNNLDSKVGGNYNYLYRLFRKSNLKPFERDISTEIYQAGSTPCNGVEGFNCYFPLQSYGFQPTNGVGYQPYRVVVLSFELLHAPATVCGPKKSTNLVKNKCVNFNFNGLTGTGVLTESNKKFLPFQQFGRDIADTTDAVRDPQTLEILDITPCSFGGVSVITPGTNTSNQVAVLYQGVNCTEVPVAIHADQLTPTWRVYSTGSNVFQTRAGCLIGAEHVNNSYECDIPIGAGICASYQTQTNSPRRARSVASQSIIAYTMSLGAENSVAYSNNSIAIPTNFTISVTTEILPVSMTKTSVDCTMYICGDSTECSNLLLQYGSFCTQLNRALTGIAVEQDKNTQEVFAQVKQIYKTPPIKDFGGFNFSQILPDPSKPSKRSFIEDLLFNKVTLADAGFIKQYGDCLGDIAARDLICAQKFNGLTVLPPLLTDEMIAQYCSALLAGTITSGWTFGAGAALQIPFAMQMAYRFNGIGVTQNVLYENQKLIANQFNSAIGKIQDSLSSTASALGKLQDVVNQNAQALNTLVKQLSSNFGAISSVLNDILSRLDKVEAEVQIDRLITGRLQSLQTYVTQQLIRAAEIRASANLAATKMSECVLGQSKRVDFCGKGYHLMSFPQCAPHGVVFLHVTYVPAQEKNFTTAPAICHDGKAHFPREGVFVSNGTHWFVTQRNFYEPQIITTDNTFVSGNCDVVIGVVNNTVYDPLQPELDS

SEQ ID NO: 3586 - protein, 1147 aa, Artificial Sequence
  SARS-CoV-2/Netherlands/ZuidHolland_9/2020__EPI_ISL_414445 spike protein (1-1147)(T874C_S1055C)
MFVFLVLLPLVSSQCVNLTTRTQLPPAYTNSFTRGVYYPDKVFRSSVLHSTQDLFLPFFSNVTWFHAIHVSGTNGTKRFDNPVLPFNDGVYFASTEKSNIIRGWIFGTTLDSKTQSLLIVNNATNVVIKVCEFQFCNDPFLGVYYHKNNKSWMESEFRVYSSANNCTFEYVSQPFLMDLEGKQGNFKNLREFVFKNIDGYFKIYSKHTPINLVRDLPQGFSALEPLVDLPIGINITRFQTLLALHRSYLTPGDSSSGWTAGAAAYYVGYLQPRTFLLKYNENGTITDAVDCALDPLSETKCTLKSFTVEKGIYQTSNFRVQPTESIVRFPNITNLCPFGEVFNATRFASVYAWNRKRISNCVADYSVLYNSASFSTFKCYGVSPTKLNDLCFTNVYADSFVIRGDEVRQIAPGQTGKIADYNYKLPDDFTGCVIAWNSNNLDSKVGGNYNYLYRLFRKSNLKPFERDISTEIYQAGSTPCNGVEGFNCYFPLQSYGFQPTNGVGYQPYRVVVLSFELLHAPATVCGPKKSTNLVKNKCVNFNFNGLTGTGVLTESNKKFLPFQQFGRDIADTTDAVRDPQTLEILDITPCSFGGVSVITPGTNTSNQVAVLYQGVNCTEVPVAIHADQLTPTWRVYSTGSNVFQTRAGCLIGAEHVNNSYECDIPIGAGICASYQTQTNSPRRARSVASQSIIAYTMSLGAENSVAYSNNSIAIPTNFTISVTTEILPVSMTKTSVDCTMYICGDSTECSNLLLQYGSFCTQLNRALTGIAVEQDKNTQEVFAQVKQIYKTPPIKDFGGFNFSQILPDPSKPSKRSFIEDLLFNKVTLADAGFIKQYGDCLGDIAARDLICVQKFNGLTVLPPLLTDEMIAQYCSALLAGTITSGWTFGAGAALQIPFAMQMAYRFNGIGVTQNVLYENQKLIANQFNSAIGKIQDSLSSTASALGKLQDVVNQNAQALNTLVKQLSSNFGAISSVLNDILSRLDKVEAEVQIDRLITGRLQSLQTYVTQQLIRAAEIRASANLAATKMSECVLGQSKRVDFCGKGYHLMSFPQCAPHGVVFLHVTYVPAQEKNFTTAPAICHDGKAHFPREGVFVSNGTHWFVTQRNFYEPQIITTDNTFVSGNCDVVIGIVNNTVYDPLQPELDS

SEQ ID NO: 3587 - protein, 1147 aa, Artificial Sequence
  SARS-CoV-2/Finland/FIN03032020A/2020__EPI_ISL_413602 spike protein (1-1147)(T874C_S1055C)
MFVFLVLLPLVSSQCVNLTTRTQLPPAYTNSFTRGVYYPDKVFRSSVLHSTQDLFLPFFSNVTWFHAIHVSGTNGTKRFDNPVLPFNDGVYFASTEKSNIIRGWIFGTTLDSKTQSLLIVNNATNVVIKVCEFQFCNDPFLGVYYHKNNKSWMESEFRVYSSANNCTFEYVSQPFLMDLEGKQGNFKNLREFVFKNIDGYFKIYSKHTPINLVRDLPQGFSALEPLVDLPIGINITRFQTLLALHRSYLTPGDSSSGWTAGAAAYYVGYLQPRTFLLKYNENGTITDAVDCALDPLSETKCTLKSFTVEKGIYQTSNFRVQPTESIVRFPNITNLCPFGEVFNATRFASVYAWNRKRISNCVADYSVLYNSASFSTFKCYGVSPTKLNDLCFTNVYADSFVIRGDEVRQIAPGQTGKIADYNYKLPDDFTGCVISWNSNNLDSKVGGNYNYLYRLFRKSNLKPFERDISTEIYQAGSTPCNGVEGFNCYFPLQSYGFQPTNGVGYQPYRVVVLSFELLHAPATVCGPKKSTNLVKNKCVNFNFNGLTGTGVLTESNKKFLPFQQFGRDIADTTDAVRDPQTLEILDITPCSFGGVSVITPGTNTSNQVAVLYQGVNCTEVPVAIHADQLTPTWRVYSTGSNVFQTRAGCLIGAEHVNNSYECDIPIGAGICASYQTQTNSPRRARSVASQSIIAYTMSLGAENSVAYSNNSIAIPTNFTISVTTEILPVSMTKTSVDCTMYICGDSTECSNLLLQYGSFCTQLNRALTGIAVEQDKNTQEVFAQVKQIYKTPPIKDFGGFNFSQILPDPSKPSKRSFIEDLLFNKVTLADAGFIKQYGDCLGDIAARDLICAQKFNGLTVLPPLLTDEMIAQYCSALLAGTITSGWTFGAGAALQIPFAMQMAYRFNGIGVTQNVLYENQKLIANQFNSAIGKIQDSLSSTASALGKLQDVVNQNAQALNTLVKQLSSNFGAISSVLNDILSRLDKVEAEVQIDRLITGRLQSLQTYVTQQLIRAAEIRASANLAATKMSECVLGQSKRVDFCGKGYHLMSFPQCAPHGVVFLHVTYVPAQEKNFTTAPAICHDGKAHFPREGVFVSNGTHWFVTQRNFYEPQIITTDNTFVSGNCDVVIGIVNNTVYDPLQPELDS

SEQ ID NO: 3588 - protein, 1147 aa, Artificial Sequence
  SARS-CoV-2/France/GE1977/2020__EPI_ISL_414632 spike protein (1-1147)(T874C_S1055C)
MFVFLVLLPLVSSQCVNLTTRTQLPPAYTNSFTRGVYYPDKVFRSSVLHSTQDLFLPFFSNVTWFHAIHVSGTNGTKRFDNPVLPFNDGVYFASTEKSNIIRGWIFGTTLDSKTQSLLIVNNATNVVIKVCEFQFCNDPFLGVYYHKNNKSWMESEFRVYSSANNCTFEYVSQPFLMDLEGKQGNFKNLREFVFKNIDGYFKIYSKHTPINLVRDLPQGFSALEPLVDLPIGINITRFQTLLALHRSYLTPGDSSSGWTAGAAAYYVGYLQPRTFLLKYNENGTITDAVDCALDPLSETKCTLKSFTVEKGIYQTSNFRVQPTESIVRFPNITNLCPFGEVFNATRFASVYAWNRKRISNCVADYSVLYNSASFSTFKCYGVSPTKLNDLCFTNVYADSFVIRGDEVRQIAPGQTGKIADYNYKLPDDFTGCVIAWNSNNLDSKVGGNYNYLYRLFRKSNLKPFERDISTEIYQAGSTPCNGVEGFNCYFPLQSYGFQPTNGVGYQPYRVVVLSFELLHAPATVCGPKKSTNLVKNKCVNFNFNGLTGTGVLTESNKKFLPFQQFGRDIADTTDAVRDPQTLEILDITPCSFGGVSVITPGTNTSNQVAVLYQGVNCTEVPVAIHADQLTPTWRVYSTGSNVFQTRAGCLIGAEHVNNSYECDIPIGAGICASYQTQTNSPRRARSVASQSIIAYTMSLGAENSVAYSNNSIAIPTNFTISVTTEILPVSMTKTSVDCTMYICGDSTECSNLLLQYGSFCTQLNRALTGIAVEQDKNTQEVFAQVKQIYKTPPIKDFGGFNFSQILPDPSKPSKRSFIEDLLFNKVTLADAGFIKQYGDCLGDIAARDLICAQKFNGLTVLPPLLTDEMIAQYCSALLAGTITSGWTFGAGAALQIPFAMQMAYRFNGIGVTQNVLYENQKLIANQFNSAIGKIQDSLFSTASALGKLQDVVNQNAQALNTLVKQLSSNFGAISSVLNDILSRLDKVEAEVQIDRLITGRLQSLQTYVTQQLIRAAEIRASANLAATKMSECVLGQSKRVDFCGKGYHLMSFPQCAPHGVVFLHVTYVPAQEKNFTTAPAICHDGKAHFPREGVFVSNGTHWFVTQRNFYEPQIITTDNTFVSGNCDVVIGIVNNTVYDPLQPELDS

SEQ ID NO: 3589 - protein, 1147 aa, Artificial Sequence
  SARS-CoV-2/Finland/FIN-313/2020__EPI_ISL_414641 spike protein (1-1147)(T874C_S1055C)
MFVFLVLLPLVSSQCVNLTTRTQLPPAYTNSFTRGVYYPDKVFRSSVLHSTQDLFLPFFSNVTWFHAIHVSGTNGTKRFDNPVLPFNDGVYFASTEKSNIIRGWIFGTTLDSKTQSLLIVNNATNVVIKVCEFQFCNDPFLGVYYHKNNKSWMESEFRVYSSANNCTFEYVSQPFLMDLEGKQGNFKNLREFVFKNIDGYFKIYSKHTPINLVRDLPQGFSALEPLVDLPIGINITRFKTLLALHRSYLTPGDSSSGWTAGAAAYYVGYLQPRTFLLKYNENGTITDAVDCALDPLSETKCTLKSFTVEKGIYQTSNFRVQPTESIVRFPNITNLCPFGEVFNATRFASVYAWNRKRISNCVADYSVLYNSASFSTFKCYGVSPTKLNDLCFTNVYADSFVIRGDEVRQIAPGQTGKIADYNYKLPDDFTGCVIAWNSNNLDSKVGGNYNYLYRLFRKSNLKPFERDISTEIYQAGSTPCNGVEGFNCYFPLQSYGFQPTNGVGYQPYRVVVLSFELLHAPATVCGPKKSTNLVKNKCVNFNFNGLTGTGVLTESNKKFLPFQQFGRDIADTTDAVRDPQTLEILDITPCSFGGVSVITPGTNTSNQVAVLYQGVNCTEVPVAIHADQLTPTWRVYSTGSNVFQTRAGCLIGAEHVNNSYECDIPIGAGICASYQTQTNSPRRARSVASQSIIAYTMSLGAENSVAYSNNSIAIPTNFTISVTTEILPVSMTKTSVDCTMYICGDSTECSNLLLQYGSFCTQLNRALTGIAVEQDKNTQEVFAQVKQIYKTPPIKDFGGFNFSQILPDPSKPSKRSFIEDLLFNKVTLADAGFIKQYGDCLGDIAARDLICAQKFNGLTVLPPLLTDEMIAQYCSALLAGTITSGWTFGAGAALQIPFAMQMAYRFNGIGVTQNVLYENQKLIANQFNSAIGKIQDSLSSTASALGKLQDVVNQNAQALNTLVKQLSSNFGAISSVLNDILSRLDKVEAEVQIDRLITGRLQSLQTYVTQQLIRAAEIRASANLAATKMSECVLGQSKRVDFCGKGYHLMSFPQCAPHGVVFLHVTYVPAQEKNFTTAPAICHDGKAHFPREGVFVSNGTHWFVTQRNFYEPQIITTDNTFVSGNCDVVIGIVNNTVYDPLQPELDS

SEQ ID NO: 3590 - protein, 1147 aa, Artificial Sequence
  SARS-CoV-2/Netherlands/ZuidHolland_2/2020__EPI_ISL_414556 spike protein (1-1147)(T874C_S1055C)
MFVFLVLLPLVSSQCVNLTTRTQLPPAYTNSFTRGVYYPDKVFRSSVLHSTQDLFLPFFSNVTWFHAIHVSGTNGTKRFDNPVLPFNDGVYFASTEKSNIIRGWIFGTTLDSKTQSLLIVNNATNVVIKVCEFQFCNDPFLGVYYHKNNKSWMESEFRVYSSANNCTFEYVSQPFLMDLEGKQGNFKNLREFVFKNIDGYFKIYSKHTPINLVRDLPQGFSALEPLVDLPIGINITRFQTLLALHRSYLTPGDSSSGWTAGAAAYYVGYLQPRTFLLKYNENGTITDAVDCALDPLSETKCTLKSFTVEKGIYQTSNFRVQPTESIVRFPNITNLCPFGEVFNATRFASVYAWNRKRISNCVADYSVLYNSASFSTFKCYGVSPTKLNDLCFTNVYADSFVIRGDEVRQIAPGQTGKIADYNYKLPDDFTGCVIAWNSNNLDSKVGGNYNYLYRLFRKSNLKPFERDISTEIYQAGSTPCNGVEGFNCYFPLQSYGFQPTNGVGYQPYRVVVLSFELLHAPATVCGPKKSTNLVKNKCVNFNFNGLTGTGVLTESNKKFLPFQQFGRDIADTTDAVRDPQTLEILDITPCSFGGVSVITPGTNTSNQVAVLYQGVNCTEVPVAIHADQLTPTWRVYSTGSNVFQTRAGCLIGAEHVNNSYECDIPIGAGICASYQTQTNSPRRARSVASQSIIAYTMSLGAENSVAYSNNSIAIPTNFTISVTTEILPVSMTKTSVDCTMYICGDSTECSNLLLQYGSFCTQLNRALTGIALEQDKNTQEVFAQVKQIYKTPPIKDFGGFNFSQILPDPSKPSKRSFIEDLLFNKVTLADAGFIKQYGDCLGDIAARDLICAQKFNGLTVLPPLLTDEMIAQYCSALLAGTITSGWTFGAGAALQIPFAMQMAYRFNGIGVTQNVLYENQKLIANQFNSAIGKIQDSLSSTASALGKLQDVVNQNAQALNTLVKQLSSNFGAISSVLNDILSRLDKVEAEVQIDRLITGRLQSLQTYVTQQLIRAAEIRASANLAATKMSECVLGQSKRVDFCGKGYHLMSFPQCAPHGVVFLHVTYVPAQEKNFTTAPAICHDGKAHFPREGVFVSNGTHWFVTQRNFYEPQIITTDNTFVSGNCDVVIGIVNNTVYDPLQPELDS

SEQ ID NO: 3591 - protein, 1147 aa, Artificial Sequence
  SARS-CoV-2/USA/WA-UW31/2020__EPI_ISL_414618 spike protein (1-1147)(T874C_S1055C)
MFVFLVLLPLVSSQCVNLTTRTQLPPAYTNSFTRGVYYPDKVFRSSVLHSTQDLFLPFFSNVTWFHAIHVSGTNGTKRFDNPVLPFNDGVYFASTEKSNIIRGWIFGTTLDSKTQSLLIVNNATNVVIKVCEFQFCNDPFLGVYYHKNNKSWMESEFRVYSSANNCTFEYVSQPFLMDLEGKQGNFKNLREFVFKNIDGYFKIYSKHTPINLVRDLPQGFSALEPLVDLPIGINITRFQTLLALHRSYLTPGDSSSGWTAGAAAYYVGYLQPRTFLLKYNENGTITDAVDCALDPLSETKCTLKSFTVEKGIYQTSNFRVQPTESIVRFPNITNLCPFGEVFNATRFASVYAWNRKRISNCVADYSVLYNSASFSTFKCYGVSPTKLNDLCFTNVYADSFVIRGDEVRQIAPGQTGKIADYNYKLPDDFTGCVIAWNSNNLDSKVGGNYNYLYRLFRKSNLKPFERDISTEIYQAGSTPCNGAEGFNCYFPLQSYGFQPTNGVGYQPYRVVVLSFELLHAPATVCGPKKSTNLVKNKCVNFNFNGLTGTGVLTESNKKFLPFQQFGRDIADTTDAVRDPQTLEILDITPCSFGGVSVITPGTNTSNQVAVLYQDVNCTEVPVAIHADQLTPTWRVYSTGSNVFQTRAGCLIGAEHVNNSYECDIPIGAGICASYQTQTNSPRRARSVASQSIIAYTMSLGAENSVAYSNNSIAIPTNFTISVTTEILPVSMTKTSVDCTMYICGDSTECSNLLLQYGSFCTQLNRALTGIAVEQDKNTQEVFAQVKQIYKTPPIKDFGGFNFSQILPDPSKPSKRSFIEDLLFNKVTLADAGFIKQYGDCLGDIAARDLICAQKFNGLTVLPPLLTDEMIAQYCSALLAGTITSGWTFGAGAALQIPFAMQMAYRFNGIGVTQNVLYENQKLIANQFNSAIGKIQDSLSSTASALGKLQDVVNQNAQALNTLVKQLSSNFGAISSVLNDILSRLDKVEAEVQIDRLITGRLQSLQTYVTQQLIRAAEIRASANLAATKMSECVLGQSKRVDFCGKGYHLMSFPQCAPHGVVFLHVTYVPAQEKNFTTAPAICHDGKAHFPREGVFVSNGTHWFVTQRNFYEPQIITTDNTFVSGNCDVVIGIVNNTVYDPLQPELDS

SEQ ID NO: 3592 - protein, 1147 aa, Artificial Sequence
  SARS-CoV-2/South Korea/SNU01/2020__EPI_ISL_411929 spike protein (1-1147)(T874C_S1055C)
MFVFLVLLPLVSSQCVNLTTRTQLPPAYTNSFTRGVYYPDKVFRSSVLHSTQDLFLPFFSNVTWFHAIHVSGTNGTKRFDNPVLPFNDGVYFASTEKSNIIRGWIFGTTLDSKTQSLLIVNNATNVVIKVCEFQFCNDPFLGVYYHKNNKSWMESEFRVYSSANNCTFEYVSQPFLMDLEGKQGNFKNLREFVFKNIDGYFKIYSKHTPINLVRDLPQGFWALEPLVDLPIGINITRFQTLLALHRSYLTPGDSSSGWTAGAAAYYVGYLQPRTFLLKYNENGTITDAVDCALDPLSETKCTLKSFTVEKGIYQTSNFRVQPTESIVRFPNITNLCPFGEVFNATRFASVYAWNRKRISNCVADYSVLYNSASFSTFKCYGVSPTKLNDLCFTNVYADSFVIRGDEVRQIAPGQTGKIADYNYKLPDDFTGCVIAWNSNNLDSKVGGNYNYLYRLFRKSNLKPFERDISTEIYQAGSTPCNGVEGFNCYFPLQSYGFQPTNGVGYQPYRVVVLSFELLHAPATVCGPKKSTNLVKNKCVNFNFNGLTGTGVLTESNKKFLPFQQFGRDIADTTDAVRDPQTLEILDITPCSFGGVSVITPGTNTSNQVAVLYQDVNCTEVPVAIHADQLTPTWRVYSTGSNVFQTRAGCLIGAEHVNNSYECDIPIGAGICASYQTQTNSPRRARSVASQSIIAYTMSLGAENSVAYSNNSIAIPTNFTISVTTEILPVSMTKTSVDCTMYICGDSTECSNLLLQYGSFCTQLNRALTGIAVEQDKNTQEVFAQVKQIYKTPPIKDFGGFNFSQILPDPSKPSKRSFIEDLLFNKVTLADAGFIKQYGDCLGDIAARDLICAQKFNGLTVLPPLLTDEMIAQYCSALLAGTITSGWTFGAGAALQIPFAMQMAYRFNGIGVTQNVLYENQKLIANQFNSAIGKIQDSLSSTASALGKLQDVVNQNAQALNTLVKQLSSNFGAISSVLNDILSRLDKVEAEVQIDRLITGRLQSLQTYVTQQLIRAAEIRASANLAATKMSECVLGQSKRVDFCGKGYHLMSFPQCAPHGVVFLHVTYVPAQEKNFTTAPAICHDGKAHFPREGVFVSNGTHWFVTQRNFYEPQIITTDNTFVSGNCDVVIGIVNNTVYDPLQPELDS

SEQ ID NO: 3593 - protein, 1147 aa, Artificial Sequence
  SARS-CoV-2/China/WF0004/2020__EPI_ISL_413694 spike protein (1-1147)(T874C_S1055C)
MFVFLVLLPLVSSQCVNLTTRTQLPPAYTNSFTRGVYYPDKVFRSSVLHSTQDLFLPFFSNVTWFHAIHVSGTNGTKRFDNPVLPFNDGVYFASTEKSNIIRGWIFGTTLDSKTQSLLIVNNATNVVIKVCEFQFCNDPFLGVYYHKNNKSWTESEFRVYSSANNCTFEYVSQPFLMDLEGKQGNFKNLREFVFKNIDGYFKIYSKHTPINLVRDLPQGFSALEPLVDLPIGINITRFQTLLALHRSYLTPGDSSSGWTAGAAAYYVGYLQPRTFLLKYNENGTITDAVDCALDPLSETKCTLKSFTVEKGIYQTSNFRVQPTESIVRFPNITNLCPFGEVFNATRFASVYAWNRKRISNCVADYSVLYNSASFSTFKCYGVSPTKLNDLCFTNVYADSFVIRGDEVRQIAPGQTGKIADYNYKLPDDFTGCVIAWNSNNLDSKVGGNYNYLYRLFRKSNLKPFERDISTEIYQAGSTPCNGVEGFNCYFPLQSYGFQPTNGVGYQPYRVVVLSFELLHAPATVCGPKKSTNLVKNKCVNFNFNGLTGTGVLTESNKKFLPFQQFGRDIADTTDAVRDPQTLEILDITPCSFGGVSVITPGTNTSNQVAVLYQDVNCTEVPVAIHADQLTPTWRVYSTGSNVFQTRAGCLIGAEHVNNSYECDIPIGAGICASYQTQTNSPRRARSVASQSIIAYTMSLGAENSVAYSNNSIAIPTNFTISVTTEILPVSMTKTSVDCTMYICGDSTECSNLLLQYGSFCTQLNRALTGIAVEQDKNTQEVFAQVKQIYKTPPIKDFGGFNFSQILPDPSKPSKRSFIEDLLFNKVTLADAGFIKQYGDCLGDIAARDLICAQKFNGLTVLPPLLTDEMIAQYCSALLAGTITSGWTFGAGAALQIPFAMQMAYRFNGIGVTQNVLYENQKLIANQFNSAIGKIQDSLSSTASALGKLQDVVNQNAQALNTLVKQLSSNFGAISSVLNDILSRLDKVEAEVQIDRLITGRLQSLQTYVTQQLIRAAEIRASANLAATKMSECVLGQSKRFDFCGKGYHLMSFPQCAPHGVVFLHVTYVPAQEKNFTTAPAICHDGKAHFPREGVFVSNGTHWFVTQRNFYEPQIITTDNTFVSGNCDVVIGIVNNTVYDPLQPELDS

SEQ ID NO: 3594 - protein, 1147 aa, Artificial Sequence
  SARS-CoV-2/China/WF0028/2020__EPI_ISL_413791 spike protein (1-1147)(T874C_S1055C)
MFVFLVLLPLVSSQCVNLTTRTQLPPAYTNSFTRGVYYPDKVFRSSVLHSTQDLFLPFFSNVTWFHAIHVSGTNGTKRFDNPVLPFNDGVYFASTEKSNIIRGWIFGTTLDSKTQSLLIVNNATNVVIKVCEFQFCNDPFLGVYYHKNNKSWMESEFRVYSSANNCTFEYVSQPFLMDLEGKQGNFKNLREFVFKNIDGYFKIYSKHTPINLVRDLPQGFSALEPLVDLPIGINITRFQTLLALHRSYLTPGDSSSGWTAGAAAYYVGYLQPRTFLLKYNENGTITDAVDCALDPLSETKCTLKSFTVEKGIYQTSNFRVQPTESIVRFPNITNLCPFGEVFNATRFASVYAWNRKRISNCVADYSVLYNSASFSTFKCYGVSPTKLNDLCFTNVYADSFVIRGDEVRQIAPGQTGKIADYNYKLPDDFTGCVIAWNSNNLDSKVGGNYNYLYRLFRKSNLKPFERDISTEIYQAGSTPCNGVEGFNCYFPLQSYGFQPTNGVGYQPYRVVVLSFELLHAPATVCGPKKSTNLVKNKCVNFNFNGLTGTGVLTESNKKFLPFQQFGRDIADTTDAVRDPQTLEILDITPCSFGGVSVITPGTNTSNQVAVLYQDVNCTEVPVAIHADQLTPTWRVYSTGSNVFQTRAGCLIGAEHVNNSYECDIPIGAGICASYQTQTNSPRRARSVASQSIIAYTMSLGAENSVAYSNNSIAIPTNFTISVTTEILPVSMTKTSVDCTMYICGDSTECSNLLLQYGSFCTQLNRALTGIAVEQDKNTQEVFAQVKQIYKTPPIKDFGGFNFSQILPDPSKPSKRSFIEDLLFNKVTLADAGFIKQYGDCLGDIAARDLICAQKFNGLTVLPPLLTDEMIAQYCSALLAGTITSGWTFGAGAALQIPFAMQMAYRFNGIGVTQNVLYENQKLIANQFNSAIGKIQDSLSSTASALGKLQDVVNQNAQALNTLVKQLSSNFGAISSVLNDILSRLDKVEAEVQIDRLITGRLQSLQTYVTQQLIRAAEIRASANLAATKMSECVLGQSKRVDFCGKGYHLMSFPQCAPHGVVFLHVTYVPAQEKNFTTAPAICHDGKAHFPREGVFVSNGTHWFVTQRNFYEPQIITTDNTFVSGNCDVVIGIVNNTVYDPLQPELES

SEQ ID NO: 3595 - protein, 1147 aa, Artificial Sequence
  SARS-CoV-2/2019-nCoV/USA-CruiseA-18/2020__MT159716.1 spike protein (1-1147)(T874C_S1055C)
MFVFLVLLPLVSSQCVNLTTRTQLPPAYTNSFTRGVYYPDKVFRSSVLHSTQDLFLPFFSNVTWFHAIHVSGTNGTKRFDNPVLPFNDGVYFASTEKSNIIRGWIFGTTLDSKTQSLLIVNNATNVVIKVCEFQFCNDPFLGVYYHKNNKSWMESELRVYSSANNCTFEYVSQPFLMDLEGKQGNFKNLREFVFKNIDGYFKIYSKHTPINLVRDLPQGFSALEPLVDLPIGINITRFQTLLALHRSYLTPGDSSSGWTAGAAAYYVGYLQPRTFLLKYNENGTITDAVDCALDPLSETKCTLKSFTVEKGIYQTSNFRVQPTESIVRFPNITNLCPFGEVFNATRFASVYAWNRKRISNCVADYSVLYNSASFSTFKCYGVSPTKLNDLCFTNVYADSFVIRGDEVRQIAPGQTGKIADYNYKLPDDFTGCVIAWNSNNLDSKVGGNYNYLYRLFRKSNLKPFERDISTEIYQAGSTPCNGVEGFNCYFPLQSYGFQPTNGVGYQPYRVVVLSFELLHAPATVCGPKKSTNLVKNKCVNFNFNGLTGTGVLTESNKKFLPFQQFGRDIADTTDAVRDPQTLEILDITPCSFGGVSVITPGTNTSNQVAVLYQDVNCTEVPVAIHADQLTPTWRVYSTGSNVFQTRAGCLIGAEHVNNSYECDIPIGAGICASYQTQTNSPRRARSVASQSIIAYTMSLGAENSVAYSNNSIAIPTNFTISVTTEILPVSMTKTSVDCTMYICGDSTECSNLLLQYGSFCTQLNRALTGIAVEQDKNTQEVFAQVKQIYKTPPIKDFGGFNFSQILPDPSKPSKRSFIEDLLFNKVTLADAGFIKQYGDCLGDIAARDLICAQKFNGLTVLPPLLTDEMIAQYCSALLAGTITSGWTFGAGAALQIPFAMQMAYRFNGIGVTQNVLYENQKLIANQFNSAIGKIQDSLSSTASALGKLQDVVNQNAQALNTLVKQLSSNFGAISSVLNDILSRLDKVEAEVQIDRLITGRLQSLQTYVTQQLIRAAEIRASANLAATKMSECVLGQSKRVDFCGKGYHLMSFPQCAPHGVVFLHVTYVPAQEKNFTTAPAICHDGKAHFPREGVFVSNGTHWFVTQRNFYEPQIITTDNTFVSGNCDVVIGIVNNTVYDPLQPELDS

SEQ ID NO: 3596 - protein, 1147 aa, Artificial Sequence
  SARS-CoV-2/SARS-CoV-2/Yunnan-01/human/2020/CHN__MT049951.1 spike protein (1-1147)(T874C_S1055C)
MFVFLVLLPLVSSQCVNLTTRTQLPPANTNSFTRGVYYPDKVFRSSVLHSTQDLFLPFFSNVTWFHAIHVSGTNGTKRFDNPVLPFNDGVYFASTEKSNIIRGWIFGTTLDSKTQSLLIVNNATNVVIKVCEFQFCNDPFLGVYYHKNNKSWMESEFRVYSSANNCTFEYVSQPFLMDLEGKQGNFKNLREFVFKNIDGYFKIYSKHTPINLVRDLPQGFSALEPLVDLPIGINITRFQTLLALHRSYLTPGDSSSGWTAGAAAYYVGYLQPRTFLLKYNENGTITDAVDCALDPLSETKCTLKSFTVEKGIYQTSNFRVQPTESIVRFPNITNLCPFGEVFNATRFASVYAWNRKRISNCVADYSVLYNSASFSTFKCYGVSPTKLNDLCFTNVYADSFVIRGDEVRQIAPGQTGKIADYNYKLPDDFTGCVIAWNSNNLDSKVGGNYNYLYRLFRKSNLKPFERDISTEIYQAGSTPCNGVEGFNCYFPLQSYGFQPTNGVGYQPYRVVVLSFELLHAPATVCGPKKSTNLVKNKCVNFNFNGLTGTGVLTESNKKFLPFQQFGRDIADTTDAVRDPQTLEILDITPCSFGGVSVITPGTNTSNQVAVLYQDVNCTEVPVAIHADQLTPTWRVYSTGSNVFQTRAGCLIGAEHVNNSYECDIPIGAGICASYQTQTNSPRRARSVASQSIIAYTMSLGAENSVAYSNNSIAIPTNFTISVTTEILPVSMTKTSVDCTMYICGDSTECSNLLLQYGSFCTQLNRALTGIAVEQDKNTQEVFAQVKQIYKTPPIKDFGGFNFSQILPDPSKPSKRSFIEDLLFNKVTLADAGFIKQYGDCLGDIAARDLICAQKFNGLTVLPPLLTDEMIAQYCSALLAGTITSGWTFGAGAALQIPFAMQMAYRFNGIGVTQNVLYENQKLIANQFNSAIGKIQDSLSSTASALGKLQDVVNQNAQALNTLVKQLSSNFGAISSVLNDILSRLDKVEAEVQIDRLITGRLQSLQTYVTQQLIRAAEIRASANLAATKMSECVLGQSKRVDFCGKGYHLMSFPQCAPHGVVFLHVTYVPAQEKNFTTAPAICHDGKAHFPREGVFVSNGTHWFVTQRNFYEPQIITTDNTFVSGNCDVVIGIVNNTVYDPLQPELDS

SEQ ID NO: 3597 - protein, 1147 aa, Artificial Sequence
  SARS-CoV-2/USA/WA-UW292/2020__EPI_ISL_418077 spike protein (1-1147)(T874C_S1055C)
MFVFLVLLPLVSSQCVNLTTRTQLPPAYTNSFTRGVYYPDKVFRSSVLHSTQDLFLPFFSNVTWFHAIHVSGTNGTKRFDNPVLPFNDGVYFASTEKSNIIRGWIFGTTLDSKTQSLLIVNNATNVVIKVCEFQFCNDPFLGVYYHKNNKSWMESEFRVYSSANNCTFEYVSQPFLMDLEGKQGNFKNLREFVFKNIDGYFKIYSKHTPINLVRDLPQGFSALEPLVDLPIGINITRFQTLLALHRSYLTPGDSSSGWTAGAAAYYVGYLQPRTFLLKYNENGTITDAVDCALDPLSETKCTLKSFTVEKGIYQTSNFRVQPTESIVRFPNITNLCPFGEVFNATRFASVYAWNRKRISNCVADYSVLYNSASFSTFKCYGVSPTKLNDLCFTNVYADSFVIRGDEVRQIAPGQTGKIADYNYKLPDDFTGCVIAWNSNNLDSKVGGNYNYLYRLFRKSNLKPFERDISTEIYQASSTPCNGVEGFNCYFPLQSYGFQPTNGVGYQPYRVVVLSFELLHAPATVCGPKKSTNLVKNKCVNFNFNGLTGTGVLTESNKKFLPFQQFGRDIADTTDAVRDPQTLEILDITPCSFGGVSVITPGTNTSNQVAVLYQDVNCTEVPVAIHADQLTPTWRVYSTGSNVFQTRAGCLIGAEHVNNSYECDIPIGAGICASYQTQTNSPRRARSVASQSIIAYTMSLGAENSVAYSNNSIAIPTNFTISVTTEILPVSMTKTSVDCTMYICGDSTECSNLLLQYGSFCTQLNRALTGIAVEQDKNTQEVFAQVKQIYKTPPIKDFGGFNFSQILPDPSKPSKRSFIEDLLFNKVTLADAGFIKQYGDCLGDIAARDLICAQKFNGLTVLPPLLTDEMIAQYCSALLAGTITSGWTFGAGAALQIPFAMQMAYRFNGIGVTQNVLYENQKLIANQFNSAIGKIQDSLSSTASALGKLQDVVNQNAQALNTLVKQLSSNFGAISSVLNDILSRLDKVEAEVQIDRLITGRLQSLQTYVTQQLIRAAEIRASANLAATKMSECVLGQSKRVDFCGKGYHLMSFPQCAPHGVVFLHVTYVPAQEKNFTTAPAICHDGKAHFPREGVFVSNGTHWFVTQRNFYEPQIITTDNTFVSGNCDVVIGIVNNTVYDPLQPELDS

SEQ ID NO: 3598 - protein, 1147 aa, Artificial Sequence
  SARS-CoV-2/Iceland/192/2020__EPI_ISL_417819 spike protein (1-1147)(T874C_S1055C)
MFVFFVLLPLVSSQCVNLTTRTQLPPAYTNSFTRGVYYPDKVFRSSVLHSTQDLFLPFFSNVTWFHAIHVSGTNGTKRFDNPVLPFNDGVYFASTEKSNIIRGWIFGTTLDSKTQSLLIVNNATNVVIKVCEFQFCNDPFLGVYYHKNNKSWMESEFRVYSSANNCTFEYVSQPFLMDLEGKQGNFKNLREFVFKNIDGYFKIYSKHTPINLVRDLPQGFSALEPLVDLPIGINITRFQTLLALHRSYLTPGDSSSGWTAGAAAYYVGYLQPRTFLLKYNENGTITDAVDCALDPLSETKCTLKSFTVEKGIYQTSNFRVQPTESIVRFPNITNLCPFGEVFNATRFASVYAWNRKRISNCVADYSVLYNSASFSTFKCYGVSPTKLNDLCFTNVYADSFVIRGDEVRQIAPGQTGKIADYNYKLPDDFTGCVIAWNSNNLDSKVGGNYNYLYRLFRKSNLKPFERDISTEIYQAGSTPCNGVEGFNCYFPLQSYGFQPTNGVGYQPYRVVVLSFELLHAPATVCGPKKSTNLVKNKCVNFNFNGLTGTGVLTESNKKFLPFQQFGRDIADTTDAVRDPQTLEILDITPCSFGGVSVITPGTNTSNQVAVLYQGVNCTEVPVAIHADQLTPTWRVYSTGSNVFQTRAGCLIGAEHVNNSYECDIPIGAGICASYQTQTNSPRRARSVASQSIIAYTMSLGAENSVAYSNNSIAIPTNFTISVTTEILPVSMTKTSVDCTMYICGDSTECSNLLLQYGSFCTQLNRALTGIAVEQDKNTQEVFAQVKQIYKTPPIKDFGGFNFSQILPDPSKPSKRSFIEDLLFNKVTLADAGFIKQYGDCLGDIAARDLICAQKFNGLTVLPPLLTDEMIAQYCSALLAGTITSGWTFGAGAALQIPFAMQMAYRFNGIGVTQNVLYENQKLIANQFNSAIGKIQDSLSSTASALGKLQDVVNQNAQALNTLVKQLSSNFGAISSVLNDILSRLDKVEAEVQIDRLITGRLQSLQTYVTQQLIRAAEIRASANLAATKMSECVLGQSKRVDFCGKGYHLMSFPQCAPHGVVFLHVTYVPAQEKNFTTAPAICHDGKAHFPREGVFVSNGTHWFVTQRNFYEPQIITTDNTFVSGNCDVVIGIVNNTVYDPLQPELDS

SEQ ID NO: 3599 - protein, 1147 aa, Artificial Sequence
  SARS-CoV-2/Belgium/ULG-6939/2020__EPI_ISL_417020 spike protein (1-1147)(T874C_S1055C)
MFVFLVLLPLVSSQCVNLTTRTQLPPAYTNSFTRGVYYPDKVFRSSVLHSTQDLFLPFFSNVTWFHAIHVSGTNGTKRFDNPVLPFNDGVYFASTEKSNIIRGWIFGTTLDSKTQSLLIVNNATNVVIKVCEFQFCNDPFLGVYYHKNNKSWMESEFRVYSSANNCTFEYVSQPFLMDLEGKQGNFKNLREFVFKNIDGYFKIYSKHTPINLVRDLPQGFSALEPLVDLPIGINITRFQTLLALHRSYLTPGDSSSGWTAGAAAYYVGYLQPRTFLLKYNENGTITDAVDCALDPLSETKCTLKSFTVEKGIYQTSNFRVQPTESIVRFPNITNLCPFGEVFNATRFASVYAWNRKRISNCVADYSVLYNSASFSTFKCYGVSPTKLNDLCFTNVYADSFVIRGDEVRQIAPGQTGKIADYNYKLPDDFTGCVIAWNSNNLDSKVGGNYNYLYRLFRKSNLKPFERDISTEIYQAGSTPCNGVEGFNCYFPLQSYGFQPTNGVGYQPYRVVVLSFELLHAPATVCGPKKSTNLVKNKCVNFNFNGLTGTGVLTESNKKFLPFQQFGRDIADTTDAVRDPQTLEILDITPCSFGGVSVITPGTNTSNQVAVLYQGVNCTEVPVAIHADQLTPTWRVYSTGSNVFQTRAGCLIGAEHVNNSYECDIPIGAGICASYQTQTNSPRRARSVASQSIIAYTMSLGAENSVVYSNNSIAIPTNFTISVTTEILPVSMTKTSVDCTMYICGDSTECSNLLLQYGSFCTQLNRALTGIAVEQDKNTQEVFAQVKQIYKTPPIKDFGGFNFSQILPDPSKPSKRSFIEDLLFNKVTLADAGFIKQYGDCLGDIAARDLICAQKFNGLTVLPPLLTDEMIAQYCSALLAGTITSGWTFGAGAALQIPFAMQMAYRFNGIGVTQNVLYENQKLIANQFNSAIGKIQDSLSSTASALGKLQDVVNQNAQALNTLVKQLSSNFGAISSVLNDILSRLDKVEAEVQIDRLITGRLQSLQTYVTQQLIRAAEIRASANLAATKMSECVLGQSKRVDFCGKGYHLMSFPQCAPHGVVFLHVTYVPAQEKNFTTAPAICHDGKAHFPREGVFVSNGTHWFVTQRNFYEPQIITTDNTFVSGNCDVVIGIVNNTVYDPLQPELDS

SEQ ID NO: 3600 - protein, 1147 aa, Artificial Sequence
  SARS-CoV-2/France/HF2496/2020__EPI_ISL_418231 spike protein (1-1147)(T874C_S1055C)
MFVFLVLLPLVSSQCVNLTTRTQLPPAYTNSFTRGVYYPDKVFRSSVLHSTQDLFLPFFSNVTWFHAIHVSGTNGTKRFDNPVLPFNDGVYFASTEKSNIIRGWIFGTTLDSKTQSLLIVNNATNVVIKVCEFQFCNDPFLGVYYHKNNKSWMESEFRVYSSANNCTFEYVSQPFLMDLEGKQGNFKNLREFVFKNIDGYFKIYSKHTPINLVRDLPQGFSALEPLVDLPIGINITRFQTLLALHRSYLTPGDSSSGWTAGAAAYYVGYLQPRTFLLKYNENGTITDAVDCALDPLSETKCTLKSFTVEKGIYQTSNFRVQPTESIVRFPNITNLCPFGEVFNATRFASVYAWNRKRISNCVADYSVLYNSASFSTFKCYGVSPTKLNDLCFTNVYADSFVIRGDEVRQIAPGQTGKIADYNYKLPDDFTGCVIAWNSNNLDSKVGGNYNYLYRLFRKSNLKPFERDISTEIYQAGSTPCNGVEGFNCYFPLQSYGFQPTNGVGYQPYRVVVLSFELLHAPATVCGPKKSTNLVKNKCVNFNFNGLTGTGVLTESNKKFLPFQQFGRDIADTTDAVRDPQTLEILDITPCSFGGVSVITPGTNTSNQVAVLYQGVNCTEVPVAIHADQLTPTWRVYSTGSNVFQTRAGCLIGAEHVNNSYECDIPIGAGICASYQTQTNSPRRARSVASQSIIAYTMSLGAENSVAYSNNSIAIPTNFTISVTTEILPVSMTKTSVDCTMYICGDSTECSNLLLQYGSFCTQLNRALTGIAVEQDKNTQEVFAQVKQIYKTPPIKDFGGFNFSQILPDPSKPSKRSFIEDLLFNKVTLADAGFIKQYGDCLGDIVARDLICAQKFNGLTVLPPLLTDEMIAQYCSALLAGTITSGWTFGAGAALQIPFAMQMAYRFNGIGVTQNVLYENQKLIANQFNSAIGKIQDSLSSTASALGKLQDVVNQNAQALNTLVKQLSSNFGAISSVLNDILSRLDKVEAEVQIDRLITGRLQSLQTYVTQQLIRAAEIRASANLAATKMSECVLGQSKRVDFCGKGYHLMSFPQCAPHGVVFLHVTYVPAQEKNFTTAPAICHDGKAHFPREGVFVSNGTHWFVTQRNFYEPQIITTDNTFVSGNCDVVIGIVNNTVYDPLQPELDS

SEQ ID NO: 3601 - protein, 1147 aa, Artificial Sequence
  SARS-CoV-2/USA/WA-UW291/2020__EPI_ISL_418076 spike protein (1-1147)(T874C_S1055C)
MFVFLVLLPLVSSQCVNLTTRTQLPPAYTNSFTRGVYYPDKVFRSSVLHSTQDLFLPFFSNVTWFHAIHVSGTNGTKRFDNPVLPFNDGVYFASTEKSNIIRGWIFGTTLDSKTQSLLIVNNATNVVIKVCEFQFCNDPFLGVYYHKNNKSWMESEFRVYSSANNCTFEYVSQPFLMDLEGKQGNFKNLREFVFKNIDGYFKIYSKHTPINLVRDLPQGFSALEPLVDLPIGINITRFQTLLALHRSYLTPGDSSSGWTAGAAAYYVGYLQPRTFLLKYNENGTITDAVDCALDPLSETKCTLKSFTVEKGIYQTSNFRVQPTESIVRFPNITNLCPFGEVFNATRFASVYAWNRKRISNCVADYSVLYNSASFSTFKCYGVSPTKLNDLCFTNVYADSFVIRGDEVRQIAPGQTGKIADYNYKLPDDFTGCVIAWNSNNLDSKVGGNYNYLYRLFRKSNLKPFERDISTEIYQAGSTPCNGVEGFNCYFPLQSYGFQPTNGVGYQPYRVVVLSFELLHAPATVCGPKKSTNLVKNKCVNFNFNGLTGTGVLTESNKKFLPFQQFGRDIADTTDAVRDPQTLEILDITPCSFGGVSVITPGTNTSNQVAVLYQGVNCTEVPVAIHADQLTPTWRVYSTGSNVFQTRAGCLIGAEHVNNSYECDIPIGAGICASYQTQTNSPRRARSVASQSIIAYTMSLGAENSVAYSNNSIAIPTNFTISVTTEILPVSMTKTSVDCTMYICGDSTECSNLLLQYGSFCTQLNRALTGIAVEQDKNTQEVFAQVKQIYKTPPIKDFGGFNFSQILPDPSKPSKRSFIEDLLFNKVTLADAGFIKQYGDCLGDIAARDLICAQKFNGLTVLPPLLTDEMIAQYCSALLAGTITSGWTFGAGAALQIPFAMQMAYRFNGIGVTQNVLYENQKLIANQFNSAIGKIQYSLSSTASALGKLQDVVNQNAQALNTLVKQLSSNFGAISSVLNDILSRLDKVEAEVQIDRLITGRLQSLQTYVTQQLIRAAEIRASANLAATKMSECVLGQSKRVDFCGKGYHLMSFPQCAPHGVVFLHVTYVPAQEKNFTTAPAICHDGKAHFPREGVFVSNGTHWFVTQRNFYEPQIITTDNTFVSGNCDVVIGIVNNTVYDPLQPELDS

SEQ ID NO: 3602 - protein, 1147 aa, Artificial Sequence; identical to SEQ ID NO: 3565
  SARS-CoV-2/Portugal/PT0034/2020__EPI_ISL_418019 spike protein (1-1147)(T874C_S1055C)

SEQ ID NO: 3603 - protein, 1147 aa, Artificial Sequence; identical to SEQ ID NO: 3557
  SARS-CoV-2/Iceland/202/2020__EPI_ISL_417750 spike protein (1-1147)(T874C_S1055C)

SEQ ID NO: 3604 - protein, 1147 aa, Artificial Sequence
  SARS-CoV-2/USA/WA-UW261/2020__EPI_ISL_418046 spike protein (1-1147)(T874C_S1055C)
MFVFLVLLPLVSSQCVNLTTRTQLPPAYTNSFTRGVYYPDKVFRSSVLHSTQDLFLPFFSNVTWFHAIHVSGTNGTKRFDNPVLPFNDGVYFASTEKSNIIRGWIFGTTLDSKTQSLLIVNNATNVVIKVCEFQFCNDPFLGVYYHKNNKSWMESEFRVYSSANNCTFEYVSQPFLMDLEGKQGNFKNLREFVFKNIDGYFKIYSKHTPINLVRDLPQGFSALEPLVDLPIGINITRFQTLLALHRSYLTPGDSSSGWTAGAAAYYVGYLQPRTFLLKYNENGTITDAVDCALDPLSETKCTLKSFTVEKGIYQTSNFRVQPTESIVRFPNITNLCPFGEVFNATRFTSVYAWNRKRISNCVADYSVLYNSASFSTFKCYGVSPTKLNDLCFTNVYADSFVIRGDEVRQIAPGQTGKIADYNYKLPDDFTGCVIAWNSNNLDSKVGGNYNYLYRLFRKSNLKPFERDISTEIYQAGSTPCNGVEGFNCYFPLQSYGFQPTNGVGYQPYRVVVLSFELLHAPATVCGPKKSTNLVKNKCVNFNFNGLTGTGVLTESNKKFLPFQQFGRDIADTTDAVRDPQTLEILDITPCSFGGVSVITPGTNTSNQVAVLYQDVNCTEVPVAIHADQLTPTWRVYSTGSNVFQTRAGCLIGAEHVNNSYECDIPIGAGICASYQTQTNSPRRARSVASQSIIAYTMSLGAENSVAYSNNSIAIPTNFTISVTTEILPVSMTKTSVDCTMYICGDSTECSNLLLQYGSFCTQLNRALTGIAVEQDKNTQEVFAQVKQIYKTPPIKDFGGFNFSQILPDPSKPSKRSFIEDLLFNKVTLADAGFIKQYGDCLGDIAARDLICAQKFNGLTVLPPLLTDEMIAQYCSALLAGTITSGWTFGAGAALQIPFAMQMAYRFNGIGVTQNVLYENQKLIANQFNSAIGKIQDSLSSTASALGKLQDVVNQNAQALNTLVKQLSSNFGAISSVLNDILSRLDKVEAEVQIDRLITGRLQSLQTYVTQQLIRAAEIRASANLAATKMSECVLGQSKRVDFCGKGYHLMSFPQCAPHGVVFLHVTYVPAQEKNFTTAPAICHDGKAHFPREGVFVSNGTHWFVTQRNFYEPQIITTDNTFVSGNCDVVIGIVNNTVYDPLQPELDS

SEQ ID NO: 3605 - protein, 1147 aa, Artificial Sequence
  SARS-CoV-2/Portugal/PT0035/2020__EPI_ISL_418020 spike protein (1-1147)(T874C_S1055C)
MFVFLVLLPLVSSQCVNLTTRTQLPPAYTNSFTRGVYYPDKVFRSSVLHSTQDLFLPFFSNVTWFHAIHVSGTNGTKRFDNPVLPFNDGVYFASTEKSNIIRGWIFGTTLDSKTQSLLIVNNATNVVIKVCEFQFCNDPFLGVYYHKNNKSWMESEFRVYSSANNCTFEYVSQPFLMDLEGKQGNFKNLREFVFKNIDGYFKIYSKHTPINLVRDLPQGFSALEPLVDLPIGINITRFQTLLALHRSYLTPGDSSSGWTAGAAAYYVGYLQPRTFLLKYNENGTITDAVDCALDPLSETKCTLKSFTVEKGIYQTSNFRVQPTESIVRFPNITNLCPFGEVFNATRFASVYAWNRKRISNCVADYSVLYNSASFSTFKCYGVSPTKLNDLCFTNVYADSFVIRGDEVRQIAPGQTGKIADYNYKLPDDFTGCVIAWNSNNLDSKVGGNYNYLYRLFRKSNLKPFERDISTEIYQAGSTPCNGVEGFNCYFPLQSYGFQPTNGVGYQPYRVVVLSFELLHAPATVCGPKKSTNLVKNKCVNFNFNGLTGTGVLTESNKKFLPFQQFGRDIADTTDAVRDPQTLEILDITPCSFGGVSVITPGTNTSNQVAVLYQDVNCTEVPVAIHADQLTPTWRVYSTGSNVFQTRAGCLIGAEHVNNSYECDIPIGAGICASYQTQTNSPRRARSVASQSIIAYTMSLGAENSVAYSNNSIAIPTNFTISVTTEILPVSMTKTSVDCTMYICGDSTECSNLLLQYGSFCTQLNRALTGIAVEQDKNTQEVFAQVKQIYKTPPIKDFGGFNFSQILPDPSKPSKRSFIEDLLFNKVTLADAGFIKQYGDCLGDISARDLICAQKFNGLTVLPPLLTDEMIAQYCSALLAGTITSGWTFGAGAALQIPFAMQMAYRFNGIGVTQNVLYENQKLIANQFNSAIGKIQDSLSSTASALGKLQDVVNQNAQALNTLVKQLSSNFGAISSVLNDILSRLDKVEAEVQIDRLITGRLQSLQTYVTQQLIRAAEIRASANLAATKMSECVLGQSKRVDFCGKGYHLMSFPQCAPHGVVFLHVTYVPAQEKNFTTAPAICHDGKAHFPREGVFVSNGTHWFVTQRNFYEPQIITTDNTFVSGNCDVVIGIVNNTVYDPLQPELDS

SEQ ID NO: 3606 - protein, 1147 aa, Artificial Sequence
  SARS-CoV-2/USA/NY-NYUMC7/2020__EPI_ISL_418192 spike protein (1-1147)(T874C_S1055C)
MFVFLVLLPLVSSQCVNLTTRTQLPPAYTNSFTRGVYYPDKVFRSSVLHSTQDLFLPFFSNVTWFHAIHVSGTNGTKRFDNPVLPFNDGVYFASTEKSNIIRGWIFGTTLDSKTQSLLIVNNATNVVIKVCEFQFCNDPFLGVYHHKNNKSWMESEFRVYSSANNCTFEYVSQPFLMDLEGKQGNFKNLREFVFKNIDGYFKIYSKHTPINLVRDLPQGFSALEPLVDLPIGINITRFQTLLALHRSYLTPGDSSSGWTAGAAAYYVGYLQPRTFLLKYNENGTITDAVDCALDPLSETKCTLKSFTVEKGIYQTSNFRVQPTESIVRFPNITNLCPFGEVFNATRFASVYAWNRKRISNCVADYSVLYNSASFSTFKCYGVSPTKLNDLCFTNVYADSFVIRGDEVRQIAPGQTGKIADYNYKLPDDFTGCVIAWNSNNLDSKVGGNYNYLYRLFRKSNLKPFERDISTEIYQAGSTPCNGVEGFNCYFPLQSYGFQPTNGVGYQPYRVVVLSFELLHAPATVCGPKKSTNLVKNKCVNFNFNGLTGTGVLTESNKKFLPFQQFGRDIADTTDAVRDPQTLEILDITPCSFGGVSVITPGTNTSNQVAVLYQGVNCTEVPVAIHADQLTPTWRVYSTGSNVFQTRAGCLIGAEHVNNSYECDIPIGAGICASYQTQTNSPRRARSVASQSIIAYTMSLGAENSVAYSNNSIAIPTNFTISVTTEILPVSMTKTSVDCTMYICGDSTECSNLLLQYGSFCTQLNRALTGIAVEQDKNTQEVFAQVKQIYKTPPIKDFGGFNFSQILPDPSKPSKRSFIEDLLFNKVTLADAGFIKQYGDCLGDIAARDLICAQKFNGLTVLPPLLTDEMIAQYCSALLAGTITSGWTFGAGAALQIPFAMQMAYRFNGIGVTQNVLYENQKLIANQFNSAIGKIQDSLSSTASALGKLQDVVNQNAQALNTLVKQLSSNFGAISSVLNDILSRLDKVEAEVQIDRLITGRLQSLQTYVTQQLIRAAEIRASANLAATKMSECVLGQSKRVDFCGKGYHLMSFPQCAPHGVVFLHVTYVPAQEKNFTTAPAICHDGKAHFPREGVFVSNGTHWFVTQRNFYEPQIITTDNTFVSGNCDVVIGIVNNTVYDPLQPELDS

SEQ ID NO: 3607 - protein, 1147 aa, Artificial Sequence
  SARS-CoV-2/Iceland/189/2020__EPI_ISL_417709 spike protein (1-1147)(T874C_S1055C)
MFVFLVLLPLVSSQCVNLTTRTQLPPAYTNSFTRGVYYPDKVFRSSVLHSTQDLFLPFFSNVTWFHAIHVSGTNGTKRFDNPVLPFNDGVYFASTEKSNIIRGWIFGTTLDSKTQSLLIVNNATNVVIKVCEFQFCNDPFLGVYYHKNNKSWMESEFRVYSSANNCTFEYVSQPFLMDLEGKQGNFKNLREFVFKNIDGYFKIYSKHTPINLVRDLPQGFSALEPLVDLPIGINITRFQTLLALHRSYLTPGDSSSGWTAGAAAYYVGYLQPRTFLLKYNENGTITDAVDCALDPLSETKCTLKSFTVEKGIYQTSNFRVQPTESIVRFPNITNLCPFGEVFNATRFASVYAWNRKRISNCVADYSVLYNSASFSTFKCYGVSPTKLNDLCFTNVYADSFVIRGDEVRQIAPGQTGKIADYNYKLPDDFTGCVIAWNSNNLDSKVGGNYNYLYRLFRKSNLKPFERDISTEIYQAGSTPCNGVEGFNCYFPLQSYGFQPTNGVGYQPYRVVVLSFELLHAPATVCGPKKSTNLVKNKCVNFNFNGLTGTGVLTESNKKFLPFQQFGRDIADTTDAVRDPQTLEILDITPCSFGGVSVITPGTNTSNQVAVLYQGVNCTEVPVAIHADQLTPTWRVYSTGSNVFQTRAGCLIGAEHVNNSYECDIPIGAGICASYQTQTNSPRRARSVASQSIIAYTMSLGAENSVAYSNNSIAIPTNFTISVTTEILPVSMTKTSVDCTMYICGDSTECSNLLLQYGSFCTQLNRALTGIAVEQDKNTQEVFAQVKQIYKTPPIKDFGGFNFSQILPDPSKPSKRSFIEDLLFNKVTLADAGFTKQYGDCLGDIAARDLICAQKFNGLTVLPPLLTDEMIAQYCSALLAGTITSGWTFGAGAALQIPFAMQMAYRFNGIGVTQNVLYENQKLIANQFNSAIGKIQDSLSSTASALGKLQDVVNQNAQALNTLVKQLSSNFGAISSVLNDILSRLDKVEAEVQIDRLITGRLQSLQTYVTQQLIRAAEIRASANLAATKMSECVLGQSKRVDFCGKGYHLMSFPQCAPHGVVFLHVTYVPAQEKNFTTAPAICHDGKAHFPREGVFVSNGTHWFVTQRNFYEPQIITTDNTFVSGNCDVVIGIVNNTVYDPLQPELDS

SEQ ID NO: 3608 - protein, 1147 aa, Artificial Sequence
  SARS-CoV-2/Australia/NSW56/2020__EPI_ISL_417408 spike protein (1-1147)(T874C_S1055C)
MFVFLVLLPLVSSQCVNLTTRTQLPPAYTNSFTRGVYYPDKVFRSSVLHSTQDLFLPFFSNVTWFHAIHVSGTNGTKRFDNPVLPFNDGVYFASTEKSNIIRGWIFGTTLDSKTQSLLIVNNATNVVIKVCEFQFCNDPFLGVYYHKNNKSWMESEFRVYSSANNCTFEYVSQPFLMDLEGKQGNFKNLREFVFKNIDGYFKIYSKHTPINLVRDLPQGFSALEPLVDLPIGINITRFQTLLALHRSYLTPGDSSSGWTAGAAAYYVGYLQPRTFLLKYNENGTITDAVDCALDPLSETKCTLKSFTVEKGIYQTSNFRVQPTESIVRFPNITNLCPFGEVFNATRFASVYAWNRKRISNCVADYSVLYNSASFSTFKCYGVSPTKLNDLCFTNVYADSFVIRGDEVRQIAPGQTGKIADYNYKLPDDFTGCVIAWNSNNLDSKVGGNYNYLYRLFRKSNLKPFERDISTEIYQAGSTPCNGVEGFNCYFPLQSYGFQPTNGVGYQPYRVVVLSFELLHAPATVCGPKKSTNLVKNKCVNFNFNGLTGTGVLTESNKKFLPFQQFGRDIADTTDAVRDPQTLEILDITPCSFGGVSVITPGTNTSNQVAVLYQDVNCTEVPVAIHADQLTPTWRVYSTGSNVFQTRAGCLIGAEHVNNSYECDIPIGAGICASYQTQTNSPRRARSVASQSIIAYTMSLGAENSVAYSNNSIAIPTNFTISVTTEILPVSMTKTSVDCTMYICGDSTECSNLLLQYGSFCTQLNRALTGIAVEQDKNTQEVFAQVKQIYKTPPIKDFGGFNFSQILPDSSKPSKRSFIEDLLFNKVTLADAGFIKQYGDCLGDIAARDLICAQKFNGLTVLPPLLTDEMIAQYCSALLAGTITSGWTFGAGAALQIPFAMQMAYRFNGIGVTQNVLYENQKLIANQFNSAIGKIQDSLSSTASALGKLQDVVNQNAQALNTLVKQLSSNFGAISSVLNDILSRLDKVEAEVQIDRLITGRLQSLQTYVTQQLIRAAEIRASANLAATKMSECVLGQSKRVDFCGKGYHLMSFPQCAPHGVVFLHVTYVPAQEKNFTTAPAICHDGKAHFPREGVFVSNGTHWFVTQRNFYEPQIITTDNTFVSGNCDVVIGIVNNTVYDPLQPELDS

SEQ ID NO: 3609 - protein, 1147 aa, Artificial Sequence
  SARS-CoV-2/Iceland/280/2020__EPI_ISL_417608 spike protein (1-1147)(T874C_S1055C)
MFVFLVLLPLVSSQCVNLTTRTQLPPAYTNSFTRGVYYPDKVFRSSVLHSTQDLFLPFFSNVTWFHAIHVSGTNGTKRFDNPVLPFNDGVYFASTEKSNIIRGWIFGTTLDSKTQSLLIVNNATNVVIKVCEFQFCNDPFLGVYYHKNNKSWMESEFRVYSSANNCTFEYVSQPFLMDLEGKQGNFKNLREFVFKNIDGYFKIYSKHTPINLVRDLPQGFSALEPLVDLPIGINITRFQTLLALHRSYLTPGDSSSGWTAGAAAYYVGYLQPRTFLLKYNENGTITDAVDCALDPLSETKCTLKSFTVEKGIYQTSNFRVQPTESIVRFPNITNLCPFGEVFNATRFASVYAWNRKRISNCVADYSVLYNSASFSTFKCYGVSPTKLNDLCFTNVYADSFVIRGDEVRQIAPGQTGKIADYNYKLPDDFTGCVIAWNSNNLDSKVGGNYNYLYRLFRKSNLKPFERDISTEIYQAGSTPCNGVEGFNCYFPLQSYGFQPTNGVGYQPYRVVVLSFELLHAPATVCGPKKSTNLVKNKCVNFNFNGLTGTGVLTESNKKFLPFQQFGRDIADTTDAVRDPQTLEILDITPCSFGGVSVITPGTNTSNQVAVLYQGVNCTEVPVAIHADQLTPTWRVYSTGSNVFQTRAGCLIGAEHVNNSYECDIPIGAGICASYHTQTNSPRRARSVASQSIIAYTMSLGAENSVAYSNNSIAIPTNFTISVTTEILPVSMTKTSVDCTMYICGDSTECSNLLLQYGSFCTQLNRALTGIAVEQDKNTQEVFAQVKQIYKTPPIKDFGGFNFSQILPDPSKPSKRSFIEDLLFNKVTLADAGFIKQYGDCLGDIAARDLICAQKFNGLTVLPPLLTDEMIAQYCSALLAGTITSGWTFGAGAALQIPFAMQMAYRFNGIGVTQNVLYENQKLIANQFNSAIGKIQDSLSSTASALGKLQDVVNQNAQALNTLVKQLSSNFGAISSVLNDILSRLDKVEAEVQIDRLITGRLQSLQTYVTQQLIRAAEIRASANLAATKMSECVLGQSKRVDFCGKGYHLMSFPQCAPHGVVFLHVTYVPAQEKNFTTAPAICHDGKAHFPREGVFVSNGTHWFVTQRNFYEPQIITTDNTFVSGNCDVVIGIVNNTVYDPLQPELDS

SEQ ID NO: 3610 - protein, 1147 aa, Artificial Sequence; identical to SEQ ID NO: 3565
  SARS-CoV-2/Iceland/247/2020__EPI_ISL_417575 spike protein (1-1147)(T874C_S1055C)

SEQ ID NO: 3611 - protein, 1147 aa, Artificial Sequence
  SARS-CoV-2/Iceland/238/2020__EPI_ISL_417566 spike protein (1-1147)(T874C_S1055C)
MFVFLVLLPLVSSQCVNLTTRTQLPPAYTNSFTRGVYYPDKVFRSSVLHSTQDLFLPFFSNVTWFHAIHVSGTNGTKRFDNPVLPFNDGVYFASTEKSNIIRGWIFGTTLDSKTQSLLIVNNATNVVIKVCEFQFCNDPFLGVYYHKNNKSWMESEFRVYSSANNCTFEYVSQPFLMDLEGKQGNFKNLREFVFKNIDGYFKIYSKHTPINLVRDLPQGFSALEPLVDLPIGINITRFQTLLALHRSYLTPGDSSSGWTAGAAAYYVGYLQPRTFLLKYNENGTITDAVDCALDPLSETKCTLKSFTVEKGIYQTSNFRVQPTESIVRFPNITNLCPFGEVFNATRFASVYAWNRKRISNCVADYSVLYNSASFSTFKCYGVSPTKLNDLCFTNVYADSFVIRGDEVRQIAPGQTGKIADYNYKLPDDFTGCVIAWNSNNLDSKVGGNYNYLYRLFRKSNLKPFERDISTEIYQAGSTPCNGVEGFNCYFPLQSYGFQPTNGVGYQPYRVVVLSFELLHAPATVCGPKKSTNLVKNKCVNFNFNGLTGTGVLTESNKKFLPFQQFGRDIADTTDAVRDPQTLEILDITPCSFGGVSVITPGTNTSNQVAVLYQGVNCTEVPVAIHADQLTPTWRVYSTGSNVFQTRAGCLIGAEHVNNSYECDIPIGAGICASYQTQTNSPRRARSVASQSIIAYTMSLGAENSVAYSNNSIAIPTNFTISVTTEILPVSMTKTSVDCTMYICGDSTECSNLLLQYGSFCTQLNRALTGIAVEQDKNTQEVFAQVKQIYKTPPIKDFGGFNFSQILPDPSKPSKRSFIEDLLFNKVTLADVGFIKQYGDCLGDIAARDLICAQKFNGLTVLPPLLTDEMIAQYCSALLAGTITSGWTFGAGAALQIPFAMQMAYRFNGIGVTQNVLYENQKLIANQFNSAIGKIQDSLSSTASALGKLQDVVNQNAQALNTLVKQLSSNFGAISSVLNDILSRLDKVEAEVQIDRLITGRLQSLQTYVTQQLIRAAEIRASANLAATKMSECVLGQSKRVDFCGKGYHLMSFPQCAPHGVVFLHVTYVPAQEKNFTTAPAICHDGKAHFPREGVFVSNGTHWFVTQRNFYEPQIITTDNTFVSGNCDVVIGIVNNTVYDPLQPELDS

SEQ ID NO: 3612 - protein, 1147 aa, Artificial Sequence
  SARS-CoV-2/Greece/16/2020__EPI_ISL_418265 spike protein (1-1147)(T874C_S1055C)
MFVFLVLLPLVSSQCVNLTTRTQLPPAYTNSFTRGVYYPDKVFRSSVLHSTQDLFLPFFSNVTWFHAIHVSGTNGTKRFDNPVLPFNDGVYFASTEKSNIIRGWIFGTTLDSKTQSLLIVNNATNVVIKVCEFQFCNDPFLGVYYHKNNKSWMESEFRVYSSANNCTFEYVSQPFLMDLEGKQGNFKNLREFVFKNVDGYFKIYSKHTPINLVRDLPQGFSALEPLVDLPIGINITRFQTLLALHRSYLTPGDSSSGWTAGAAAYYVGYLQPRTFLLKYNENGTITDAVDCALDPLSETKCTLKSFTVEKGIYQTSNFRVQPTESIVRFPNITNLCPFGEVFNATRFASVYAWNRKRISNCVADYSVLYNSASFSTFKCYGVSPTKLNDLCFTNVYADSFVIRGDEVRQIAPGQTGKIADYNYKLPDDFTGCVIAWNSNNLDSKVGGNYNYLYRLFRKSNLKPFERDISTEIYQAGSTPCNGVEGFNCYFPLQSYGFQPTNGVGYQPYRVVVLSFELLHAPATVCGPKKSTNLVKNKCVNFNFNGLTGTGVLTESNKKFLPFQQFGRDIADTTDAVRDPQTLEILDITPCSFGGVSVITPGTNTSNQVAVLYQDVNCTEVPVAIHADQLTPTWRVYSTGSNVFQTRAGCLIGAEHVNNSYECDIPIGAGICASYQTQTNSPRRARSVASQSIIAYTMSLGAENSVAYSNNSIAIPTNFTISVTTEILPVSMTKTSVDCTMYICGDSTECSNLLLQYGSFCTQLNRALTGIAVEQDKNTQEVFAQVKQIYKTPPIKDFGGFNFSQILPDPSKPSKRSFIEDLLFNKVTLADAGFIKQYGDCLGDIAARDLICAQKFNGLTVLPPLLTDEMIAQYCSALLAGTITSGWTFGAGAALQIPFAMQMAYRFNGIGVTQNVLYENQKLIANQFNSAIGKIQDSLSSTASALGKLQDVVNQNAQALNTLVKQLSSNFGAISSVLNDILSRLDKVEAEVQIDRLITGRLQSLQTYVTQQLIRAAEIRASANLAATKMSECVLGQSKRVDFCGKGYHLMSFPQCAPHGVVFLHVTYVPAQEKNFTTAPAICHDGKAHFPREGVFVSNGTHWFVTQRNFYEPQIITTDNTFVSGNCDVVIGIVNNTVYDPLQPELDS

SEQ ID NO: 3613 - protein, 1147 aa, Artificial Sequence
  SARS-CoV-2/Iceland/319/2020__EPI_ISL_417648 spike protein (1-1147)(T874C_S1055C)
MFVFLVLLPLVSSQCVNLTTRTQLPPAYTNSFTRGVYYPDKVFRSSVLHSTQDLFLPFFSNVTWFHAIHVSGTNGTKRFDNPVLPFNDGVYFASTEKSNIIRGWIFGTTLDSKTQSLLIVNNATNVVIKVCEFQFCNDPFLGVYYHKNNKSWMESEFRVYSSANNCTFEYVSQPFLIDLEGKQGNFKNLREFVFKNIDGYFKIYSKHTPINLVRDLPQGFSALEPLVDLPIGINITRFQTLLALHRSYLTPGDSSSGWTAGAAAYYVGYLQPRTFLLKYNENGTITDAVDCALDPLSETKCTLKSFTVEKGIYQTSNFRVQPTESIVRFPNITNLCPFGEVFNATRFASVYAWNRKRISNCVADYSVLYNSASFSTFKCYGVSPTKLNDLCFTNVYADSFVIRGDEVRQIAPGQTGKIADYNYKLPDDFTGCVIAWNSNNLDSKVGGNYNYLYRLFRKSNLKPFERDISTEIYQAGSTPCNGVEGFNCYFPLQSYGFQPTNGVGYQPYRVVVLSFELLHAPATVCGPKKSTNLVKNKCVNFNFNGLTGTGVLTESNKKFLPFQQFGRDIADTTDAVRDPQTLEILDITPCSFGGVSVITPGTNTSNQVAVLYQGVNCTEVPVAIHADQLTPTWRVYSTGSNVFQTRAGCLIGAEHVNNSYECDIPIGAGICASYQTQTNSPRRARSVASQSIIAYTMSLGAENSVAYSNNSIAIPTNFTISVTTEILPVSMTKTSVDCTMYICGDSTECSNLLLQYGSFCTQLNRALTGIAVEQDKNTQEVFAQVKQIYKTPPIKDFGGFNFSQILPDPSKPSKRSFIEDLLFNKVTLADAGFIKQYGDCLGDIAARDLICAQKFNGLTVLPPLLTDEMIAQYCSALLAGTITSGWTFGAGAALQIPFAMQMAYRFNGIGVTQNVLYENQKLIANQFNSAIGKIQDSLSSTASALGKLQDVVNQNAQALNTLVKQLSSNFGAISSVLNDILSRLDKVEAEVQIDRLITGRLQSLQTYVTQQLIRAAEIRASANLAATKMSECVLGQSKRVDFCGKGYHLMSFPQCAPHGVVFLHVTYVPAQEKNFTTAPAICHDGKAHFPREGVFVSNGTHWFVTQRNFYEPQIITTDNTFVSGNCDVVIGIVNNTVYDPLQPELDS

SEQ ID NO: 3614 - protein, 1147 aa, Artificial Sequence
  SARS-CoV-2/Congo/94/2020__EPI_ISL_417947 spike protein (1-1147)(T874C_S1055C)
MFVFLVLLPLVSSQCVNLTTRTQLPPAYTNSFTRGVYYPDKVFRSSVLHSTQDLFLPFFSNVTWFHAIHVSGTNGTKRFDNPVLPFNDGVYFASTEKSNIIRGWIFGTTLDSKTQSLLIVNNATNVVIKVCEFQFCNDPFLGVYYHKNNKSWMESEFRVYSSANNCTFEYVSQPFLMDLEGKQGNFKNLREFVFKNIDGYFKIYSKHTPINLVRDLPQGFSALEPLVDLPIGINITRFQTLLALHRSYLTPGDSSSGWTAGAAAYYVGYLQPRTFLLKYNENGTITDAVDCALDPLSETKCTLKSFTVEKGIYQTSNFRVQPTESIVRFPNITNLCPFGEVFNATRFASVYAWNRKRISNCVADYSVLYNSASFSTFKCYGVSPTKLNDLCFTNVYADSFVIRGDEVRQIAPGQTGKIADYNYKLPDDFTGCVIAWNSNNLDSKVGGNYNYLYRLFRKSNLKPFERDISTEIYQAGSTPCNGVEGFNCYFPLQSYGFQPTNGVGYQPYRVVVLSFELLHAPATVCGPKKSTNLVKNKCVNFNFNGLTGTGVLTESNKKFLPFQQFGRDIADTTDAVRDPQTLEILDITPCSFGGVSVITPGTNTSNQVAVLYQGVNCTEVPVAIHADQLTPTWRVYSTGSNVFQTRAGCLIGAEHVNNSYECDIPIGAGICASYQTQTNSPRRARSVASQSIIAYTMSLGAENSVAYSNNSIAIPTNFTISVTTEILPVSMTKTSVDCTMYICGDSTECSNLLLQYGSFCTQLNRALTGIAVEQDKNTQEVFAQVKQIYKTPPIKDFGGFNFSQILPDPSKPSKRSFIEDILFNKVTLADAGFIKQYGDCLGDIAARDLICAQKFNGLTVLPPLLTDEMIAQYCSALLAGTITSGWTFGAGAALQIPFAMQMAYRFNGIGVTQNVLYENQKLIANQFNSAIGKIQDSLSSTASALGKLQDVVNQNAQALNTLVKQLSSNFGAISSVLNDILSRLDKVEAEVQIDRLITGRLQSLQTYVTQQLIRAAEIRASANLAATKMSECVLGQSKRVDFCGKGYHLMSFPQCAPHGVVFLHVTYVPAQEKNFTTAPAICHDGKAHFPREGVFVSNGTHWFVTQRNFYEPQIITTDNTFVSGNCDVVIGIVNNTVYDPLQPELDS

SEQ ID NO: 3615 - protein, 1147 aa, Artificial Sequence
  SARS-CoV-2/Congo/158/2020__EPI_ISL_417950 spike protein (1-1147)(T874C_S1055C)
MFVFLVLLPLVSSQCVNLTTRTQLPPAYTNSFTRGVYYPDKVFRSSVLHSTQDLFLPFFSNVTWFHAIHVSGTNGTKRFDNPVLPFNDGVYFASTEKSNIIRGWIFGTTLDSKTQSLLIVNNATNVVIKVCEFQFCNDPFLGVYYHKNNKSWMESEFRVYSSANNCTFEYVSQPFLMDLEGKQGNFKNLREFVFKNIDGYFKIYSKHTPINLVRDLPQGFSALEPLVDLPIGINITRFQTLLALHRSYLTPGDSSSGWTAGAAAYYVGYLQPRTFLLKYNENGTITDAVDCALDPLSETKCTLKSFTVEKGIYQTSNFRVQPTESIVRFPNITNLCPFGEVFNATRFASVYAWNRKRISNCVADYSVLYNSASFSTFKCYGVSPTKLNDLCFTNVYADSFVIRGDEVRQIAPGQTGKIADYNYKLPDDFTGCVIAWNSNNLDSKVGGNYNYLYRLFRKSNLKPFERDISTEIYQAGSTPCNGVEGFNCYFPLQSYGFQPTNGVGYQPYRVVVLSFELLHAPATVCGPKKSTNLVKNKCVNFNFNGLTGTGVLTESNKKFLPFQQFGRDIADTTDAVRDPQTLEILDITPCSFGGVSVITPGTNTSNQVAVLYQDVNCTEVPVAIHADQLTPTWRVYSTGSNVFQTRAGCLIGAEHVNNSYECDIPIGAGICASYQTQTNSPRRARSVASQSIIAYTMSLGAENSVAYSNNSIAIPTNFTISVTTEILPVSMTKTSVDCTMYICGDSTECSNLLLQYGSFCTQLNRALTGIAVEQDKNTQEVFAQVKQIYKTPPIKDFGGFNFSQILPDPSKPSKRSFIEDLLFNKVTLADAGFIKQYGDCLGDIAARDLICAQKFNGLTVLPPLLTDEMIAQYCSALLAGTITSGWTFGAGAALQIPFAMQMAYRFNGIGVTQNVLYENQKLIANQFNSAIGKIQDSLSSTASALGKLQDVVNQNAQALNTLVKQLSSNFGAISSVLNDILSRLDKVEAEVQIDRLITGRLQSLQTYVTQQLIRAAEIRASANLAATKMSECVLGQSKRVDFCGKGYHLMSFPQCAPHGVVFLHVTYVPAQEKNFTTAPAICHDGKAHFPREGVFVSNGTHWFVTQRNFYEPQIITTDNTFLSGNCDVVIGIVNNTVYDPLQPELDS

SEQ ID NO: 3616 - protein, 1147 aa, Artificial Sequence
  SARS-CoV-2/USA/UT-00034/2020__EPI_ISL_417977 spike protein (1-1147)(T874C_S1055C)
MFVFLVLLPLVSSQCVNLTTRTQLPPAYTNSFTRGVYYPDKVFRSSVLHSTQDLFLPFFSNVTWFHAIHVSGTNGTKRFDNPVLPFNDGVYFASTEKSNIIRGWIFGTTLDSKTQSLLIVNNATNVVIKVCEFQFCNDPFLGVYYYKNNKSWMESEFRVYSSANNCTFEYVSQPFLMDLEGKQGNFKNLREFVFKNIDGYFKIYSKHTPINLVRDLPQGFSALEPLVDLPIGINITRFQTLLALHRSYLTPGDSSSGWTAGAAAYYVGYLQPRTFLLKYNENGTITDAVDCALDPLSETKCTLKSFTVEKGIYQTSNFRVQPTESIVRFPNITNLCPFGEVFNATRFASVYAWNRKRISNCVADYSVLYNSASFSTFKCYGVSPTKLNDLCFTNVYADSFVIRGDEVRQIAPGQTGKIADYNYKLPDDFTGCVIAWNSNNLDSKVGGNYNYLYRLFRKSNLKPFERDISTEIYQAGSTPCNGVEGFNCYFPLQSYGFQPTNGVGYQPYRVVVLSFELLHAPATVCGPKKSTNLVKNKCVNFNFNGLTGTGVLTESNKKFLPFQQFGRDIADTTDAVRDPQTLEILDITPCSFGGVSVITPGTNTSNQVAVLYQGVNCTEVPVAIHADQLTPTWRVYSTGSNVFQTRAGCLIGAEHVNNSYECDIPIGAGICASYQTQTNSPRRARSVASQSIIAYTMSLGAENSVAYSNNSIAIPTNFTISVTTEILPVSMTKTSVDCTMYICGDSTECSNLLLQYGSFCTQLNRALTGIAVEQDKNTQEVFAQVKQIYKTPPIKDFGGFNFSQILPDPSKPSKRSFIEDLLFNKVTLADAGFIKQYGDCLGDIAARDLICAQKFNGLTVLPPLLTDEMIAQYCSALLAGTITSGWTFGAGAALQIPFAMQMAYRFNGIGVTQNVLYENQKLIANQFNSAIGKIQDSLSSTASALGKLQDVVNQNAQALNTLVKQLSSNFGAISSVLNDILSRLDKVEAEVQIDRLITGRLQSLQTYVTQQLIRAAEIRASANLAATKMSECVLGQSKRVDFCGKGYHLMSFPQCAPHGVVFLHVTYVPAQEKNFTTAPAICHDGKAHFPREGVFVSNGTHWFVTQRNFYEPQIITTDNTFVSGNCDVVIGIVNNTVYDPLQPELDS

SEQ ID NO: 3617 - protein, 1147 aa, Artificial Sequence
  SARS-CoV-2/USA/UT-00033/2020__EPI_ISL_417976 spike protein (1-1147)(T874C_S1055C)
MFVFLVLLPLVSSQCVNLTTRTQLPPAYTNSFTRGVYYPDKVFRSSVLHSTQDLFLPFFSNVTWFHAIHVSGTNGTKRFDNPVLPFNDGVYFASTEKSNIIRGWIFGTTLDSKTQSLLIVNNATNVVIKVCEFQFCNDPFLGVYYHKNNKSWMESEFRVYSSANNCTFEYVSQPFLMDLEGKQGNFKNLREFVFKNIDGYFKIYSKHTPINLVRDLPQGFSALEPLVDLPIGINITRFQTLLALHRSYLTPGDSSSGLTAGAAAYYVGYLQPRTFLLKYNENGTITDAVDCALDPLSETKCTLKSFTVEKGIYQTSNFRVQPTESIVRFPNITNLCPFGEVFNATRFASVYAWNRKRISNCVADYSVLYNSASFSTFKCYGVSPTKLNDLCFTNVYADSFVIRGDEVRQIAPGQTGKIADYNYKLPDDFTGCVIAWNSNNLDSKVGGNYNYLYRLFRKSNLKPFERDISTEIYQAGSTPCNGVEGFNCYFPLQSYGFQPTNGVGYQPYRVVVLSFELLHAPATVCGPKKSTNLVKNKCVNFNFNGLTGTGVLTESNKKFLPFQQFGRDIADTTDAVRDPQTLEILDITPCSFGGVSVITPGTNTSNQVAVLYQGVNCTEVPVAIHADQLTPTWRVYSTGSNVFQTRAGCLIGAEHVNNSYECDIPIGAGICASYQTQTNSPRRARSVASQSIIAYTMSLGAENSVAYSNNSIAIPTNFTISVTTEILPVSMTKTSVDCTMYICGDSTECSNLLLQYGSFCTQLNRALTGIAVEQDKNTQEVFAQVKQIYKTPPIKDFGGFNFSQILPDPSKPSKRSFIEDLLFNKVTLADAGFIKQYGDCLGDIAARDLICAQKFNGLTVLPPLLTDEMIAQYCSALLAGTITSGWTFGAGAALQIPFAMQMAYRFNGIGVTQNVLYENQKLIANQFNSAIGKIQDSLSSTASALGKLQDVVNQNAQALNTLVKQLSSNFGAISSVLNDILSRLDKVEAEVQIDRLITGRLQSLQTYVTQQLIRAAEIRASANLAATKMSECVLGQSKRVDFCGKGYHLMSFPQCAPHGVVFLHVTYVPAQEKNFTTAPAICHDGKAHFPREGVFVSNGTHWFVTQRNFYEPQIITTDNTFVSGNCDVVIGIVNNTVYDPLQPELDS

SEQ ID NO: 3618 - protein, 1147 aa, Artificial Sequence
  SARS-CoV-2/USA/WI-13/2020__EPI_ISL_417516 spike protein (1-1147)(T874C_S1055C)
MFVFLVLLPLVSSQCVNLTTRTQLPPAYTNSFTRGVYYPDKVFRSSVLHSTQDLFLPFFSNVTWFHAIHVSGTNGTKRFDNPVLPFNDGVYFASTEKSNIIRGWIFGTTLDSKTQSLLIVNNATNVVIKVCEFQFCNDPFLGVYYHKNNKSWMESEFRVYSSANNCTFEYVSQPFLMDLEGKQGNFKNLREFVFKNIDGYFKIYSKHTPINLVRDLPQGFSALEPLVDLPIGINITRFQTLLALHRSYLTPGDSSSGWTAGAAAYYVGYLQPRTFLLKYNENGTITDAVDCALDPLSETKCTLKSFTVEKGIYQTSNFRVLPTESIVRFPNITNLCPFGEVFNATRFASVYAWNRKRISNCVADYSVLYNSASFSTFKCYGVSPTKLNDLCFTNVYADSFVIRGDEVRQIAPGQTGKIADYNYKLPDDFTGCVIAWNSNNLDSKVGGNYNYLYRLFRKSNLKPFERDISTEIYQAGSTPCNGVEGFNCYFPLQSYGFQPTNGVGYQPYRVVVLSFELLHAPATVCGPKKSTNLVKNKCVNFNFNGLTGTGVLTESNKKFLPFQQFGRDIADTTDAVRDPQTLEILDITPCSFGGVSVITPGTNTSNQVAVLYQGVNCTEVPVAIHADQLTPTWRVYSTGSNVFQTRAGCLIGAEHVNNSYECDIPIGAGICASYQTQTNSPRRARSVASQSIIAYTMSLGAENSVAYSNNSIAIPTNFTISVTTEILPVSMTKTSVDCTMYICGDSTECSNLLLQYGSFCTQLNRALTGIAVEQDKNTQEVFAQVKQIYKTPPIKDFGGFNFSQILPDPSKPSKRSFIEDLLFNKVTLADAGFIKQYGDCLGDIAARDLICAQKFNGLTVLPPLLTDEMIAQYCSALLAGTITSGWTFGAGAALQIPFAMQMAYRFNGIGVTQNVLYENQKLIANQFNSAIGKIQDSLSSTASALGKLQDVVNQNAQALNTLVKQLSSNFGAISSVLNDILSRLDKVEAEVQIDRLITGRLQSLQTYVTQQLIRAAEIRASANLAATKMSECVLGQSKRVDFCGKGYHLMSFPQCAPHGVVFLHVTYVPAQEKNFTTAPAICHDGKAHFPREGVFVSNGTHWFVTQRNFYEPQIITTDNTFVSGNCDVVIGIVNNTVYDPLQPELDS

SEQ ID NO: 3619 - protein, 1146 aa, Artificial Sequence
  SARS-CoV-2/India/1-27/2020__EPI_ISL_413522 spike protein (1-1146)(T873C_S1054C)
MFVFLVLLPLVSSQCVNLTTRTQLPPAYTNSFTRGVYYPDKVFRSSVLHSTQDLFLPFFSNVTWFHAIHVSGTNGTKRFDNPVLPFNDGVYFASTEKSNIIRGWIFGTTLDSKTQSLLIVNNATNVVIKVCEFQFCNDPFLGVYHKNNKSWMESEFRVYSSANNCTFEYVSQPFLMDLEGKQGNFKNLREFVFKNIDGYFKIYSKHTPINLVRDLPQGFSALEPLVDLPIGINITRFQTLLALHRSYLTPGDSSSGWTAGAAAYYVGYLQPRTFLLKYNENGTITDAVDCALDPLSETKCTLKSFTVEKGIYQTSNFRVQPTESIVRFPNITNLCPFGEVFNATRFASVYAWNRKRISNCVADYSVLYNSASFSTFKCYGVSPTKLNDLCFTNVYADSFVIRGDEVIQIAPGQTGKIADYNYKLPDDFTGCVIAWNSNNLDSKVGGNYNYLYRLFRKSNLKPFERDISTEIYQAGSTPCNGVEGFNCYFPLQSYGFQPTNGVGYQPYRVVVLSFELLHAPATVCGPKKSTNLVKNKCVNFNFNGLTGTGVLTESNKKFLPFQQFGRDIADTTDAVRDPQTLEILDITPCSFGGVSVITPGTNTSNQVAVLYQDVNCTEVPVAIHADQLTPTWRVYSTGSNVFQTRAGCLIGAEHVNNSYECDIPIGAGICASYQTQTNSPRRARSVASQSIIAYTMSLGAENSVAYSNNSIAIPTNFTISVTTEILPVSMTKTSVDCTMYICGDSTECSNLLLQYGSFCTQLNRALTGIAVEQDKNTQEVFAQVKQIYKTPPIKDFGGFNFSQILPDPSKPSKRSFIEDLLFNKVTLADAGFIKQYGDCLGDIAARDLICAQKFNGLTVLPPLLTDEMIAQYCSALLAGTITSGWTFGAGAALQIPFAMQMAYRFNGIGVTQNVLYENQKLIANQFNSAIGKIQDSLSSTASALGKLQDVVNQNAQALNTLVKQLSSNFGAISSVLNDILSRLDKVEAEVQIDRLITGRLQSLQTYVTQQLIRAAEIRASANLAATKMSECVLGQSKRVDFCGKGYHLMSFPQCAPHGVVFLHVTYVPAQEKNFTTAPAICHDGKAHFPREGVFVSNGTHWFVTQRNFYEPQIITTDNTFVSGNCDVVIGIVNNTVYDPLQPELDS

SEQ ID NO: 3620 - protein, 1141 aa, Artificial Sequence
  SARS-CoV-2/pangolin/Guangxi/P4L/2017__EPI_ISL_410538 spike protein (1-1141)(T868C_S1049C)
MFVFLFVLPLVSSQCVNLTTRTGIPPGYTNSSTRGVYYPDKVFRSSILHLTQDLFLPFFSNVTWFNTINYQGGFKKFDNPVLPFNDGVYFASTEKSNIIRGWIFGTTLDARTQSLLIVNNATNVVIKVCEFQFCTDPFLGVYYHNNNKTWVENEFRVYSSANNCTFEYISQPFLMDLEGKQGNFKNLREFVFKNVDGYFKIYSKHTPIDLVRDLPRGFAALEPLVDLPIGINITRFQTLLALHRSYLTPGNLESGWTTGAAAYYVGYLQQRTFLLSYNQNGTITDAVDCSLDPLSETKCTLKSLTVEKGIYQTSNFRVQPTISIVRFPNITNLCPFGEVFNASKFASVYAWNRKRISNCVADYSVLYNSTSFSTFKCYGVSPTKLNDLCFTNVYADSFVVKGDEVRQIAPGQTGVIADYNYKLPDDFTGCVIAWNSVKQDALTGGNYGYLYRLFRKSKLKPFERDISTEIYQAGSTPCNGQVGLNCYYPLERYGFHPTTGVNYQPFRVVVLSFELLNGPATVCGPKLSTTLVKDKCVNFNFNGLTGTGVLTTSKKQFLPFQQFGRDISDTTDAVRDPQTLEILDITPCSFGGVSVITPGTNTSNQVAVLYQDVNCTEVPMAIHAEQLTPAWRVYSAGANVFQTRAGCLVGAEHVNNSYECDIPVGAGICASYHSMSSLRSVNQRSIIAYTMSLGAENSVAYSNNSIAIPTNFTISVTTEILPVSMTKTSVDCTMYICGDSIECSNLLLQYGSFCTQLNRALTGIAVEQDKNTQEVFAQVKQIYKTPPIKDFGGFNFSQILPDPSKPSKRSFIEDLLFNKVTLADAGFIKQYGDCLGDIAARDLICAQKFNGLTVLPPLLTDEMIAQYCSALLAGTITSGWTFGAGAALQIPFAMQMAYRFNGIGVTQNVLYENQKLIANQFNSAIGKIQDSLSSTASALGKLQDVVNQNAQALNTLVKQLSSNFGAISSVLNDILSRLDKVEAEVQIDRLITGRLQSLQTYVTQQLIRAAEIRASANLAATKMSECVLGQSKRVDFCGKGYHLMSFPQCAPHGVVFLHVTYVPAQEKNFTTAPAICHEGKAHFPREGVFVSNGTHWFITQRNFYEPQIITTDNTFVSGSCDVVIGIVNNTVYDPLQPELDS

SEQ ID NO: 3621 - protein, 1141 aa, Artificial Sequence
  SARS-CoV-2/pangolin/Guangxi/P5L/2017__EPI_ISL_410540 spike protein (1-1141)(T868C_S1049C)
MFVFLFVLPLVSSQCVNLTTRTGIPPGYTNSSTRGVYYPDKVFRSSILHLTQDLFLPFFSNVTWFNTINYQGGFKKFDNPVLPFNDGVYFASTEKSNIIRGWIFGTTLDARTQSLLIVNNATNVVIKVCEFQFCTDPFLGVYYHNNNKTWVENEFRVYSSANNCTFEYISQPFLMDLEGKQGNFKNLREFVFKNVDGYFKIYSKHTPIDLVRDLPRGFAALEPLVDLPIGINITRFQTLLALHRSYLTPGKLESGWTTGAAAYYVGYLQQRTFLLSYNQNGTITDAVDCSLDPLSETKCTLKSLTVEKGIYQTSNFRVQPTISIVRFPNITNLCPFGEVFNASKFASVYAWNRKRISNCVADYSVLYNSTSFSTFKCYGVSPTKLNDLCFTNVYADSFVVKGDEVRQIAPGQTGVIADYNYKLPDDFTGCVIAWNSVKQDALTGGNYGYLYRLFRKSKLKPFERDISTEIYQAGSTPCNGQVGLNCYYPLERYGFHPTTGVNYQPFRVVVLSFELLNGPATVCGPKLSTTLVKDKCVNFNFNGLTGTGVLTTSKKQFLPFQQFGRDISDTTDAVRDPQTLEILDITPCSFGGVSVITPGTNTSNQVAVLYQDVNCTEVPMAIHAEQLTPAWRVYSAGANVFQTRAGCLVGAEHVNNSYECDIPVGAGICASYHSMSSFRSVNQRSIIAYTMSLGAENSVAYSNNSIAIPTNFTISVTTEILPVSMTKTSVDCTMYICGDSIECSNLLLQYGSFCTQLNRALTGIAVEQDKNTQEVFAQVKQIYKTPPIKDFGGFNFSQILPDPSKPSKRSFIEDLLFNKVTLADAGFIKQYGDCLGDIAARDLICAQKFNGLTVLPPLLTDEMIAQYCSALLAGTITSGWTFGAGAALQIPFAMQMAYRFNGIGVTQNVLYENQKLIANQFNSAIGKIQDSLSSTASALGKLQDVVNQNAQALNTLVKQLSSNFGAISSVLNDILSRLDKVEAEVQIDRLITGRLQSLQTYVTQQLIRAAEIRASANLAATKMSECVLGQSKRVDFCGKGYHLMSFPQCAPHGVVFLHVTYVPAQEKNFTTAPAICHEGKAHFPREGVFVSNGTHWFITQRNFYEPQIITTDNTFVSGSCDVVIGIVNNTVYDPLQPELDS

SEQ ID NO: 3622 - protein, 1141 aa, Artificial Sequence
  SARS-CoV-2/pangolin/Guangxi/P5E/2017__EPI_ISL_410541 spike protein (1-1141)(T868C_S1049C)
MFVFLFVLPLVSSQCVNLTTRTGIPPGYTNSSTRGVYYPDKVFRSSILHLTQDLFLPFFSNVTWFNTITYQGGSKKFDNPVLPFNDGVYFASTEKSNIIRGWIFGTTLDARTQSLLIVNNATNVVIKVCEFQFCTDPFLGVYYHNNNKTWVENEFRVYSSANNCTFEYISQPFLMDLEGKQGNFKNLREFVFKNVDGYFKIYSKHTPIDLVRDLPRGFAALEPLVDLPIGINITRFQTLLALHRSYLTPGKLESGWTTGAAAYYVGYLQQRTFLLSYNQNGTITDAVDCSLDPLSETKCTLKSLTVEKGIYQTSNFRVQPTISIVRFPNITNLCPFGEVFNASKFASVYAWNRKRISNCVADYSVLYNSTSFSTFKCYGVSPTKLNDLCFTNVYADSFVVKGDEVRQIAPGQTGVIADYNYKLPDDFTGCVIAWNSVKQDALTGDNYGYLYRLFRKSKLKPFERDISTEIYQAGSTPCNGQVGLNCYYPLERYGFHPTTGVNYQPFRVVVLSFELLNGPATVCGPKLSTTLVKDKCVNFNFNGLTGTGVLTTSKKQFLPFQQFGRDISDTTDAVRDPQTLEILDITPCSFGGVSVITPGTNTSNQVAVLYQDVNCTEVPMAIHAEQLTPAWRVYSAGANVFQTRAGCLVGAEHVNNSYECDIPVGAGICASYHSMSSFRSVNQRSIIAYTMSLGAENSVAYSNNSIAIPTNFTISVTTEILPVSMTKTSVDCTMYICGDSIECSNLLLQYGSFCTQLNRALTGIAVEQDKNTQEVFAQVKQIYKTPPIKDFGGFNFSQILPDPSKPSKRSFIEDLLFNKVTLADAGFIKQYGDCLGDIAARDLICAQKFNGLTVLPPLLTDEMIAQYCSALLAGTITSGWTFGAGAALQIPFAMQMAYRFNGIGVTQNVLYENQKLIANQFNSAIGKIQDSLSSTASALGKLQDVVNQNAQALNTLVKQLSSNFGAISSVLNDILSRLDKVEAEVQIDRLITGRLQSLQTYVTQQLIRAAEIRASANLAATKMSECVLGQSKRVDFCGKGYHLMSFPQCAPHGVVFLHVTYVPAQEKNFTTAPAICHEGKAHFPREGVFVSNGTHWFITQRNFYEPQIITTDNTFVSGSCDVVIGIVNNTVYDPLQPELDS

SEQ ID NO: 3623 - protein, 1139 aa, Artificial Sequence
  SARS-CoV-2/pangolin/Guangxi/P1E/2017__EPI_ISL_410539 spike protein (1-1139)(T866C_S1047C)
MFVFLFVLPLVSSQCVNLTTRTGIQPGYTNSSTRGVYYPDKVFRSSILHLTQDLFLPFFSNVTWFNTINYQGGFKKFDNPVLPFNDGVYFASTEKSNIIRGWIFGTTLDARTQSLLIVNNATNVVIKVCEFQFCTDPFLGVYYHNNNKTWVENEFRVYSSANNCTFEYISQPFLMDLEGKQGNFKNLREFVFKNVDGYFKIYSKHTPIDLVRDLPRGFAALEPLVDLPIGINITRFQTLLALHRSYLTPGKLESGWTTGAAAYYVGYLQQRTFLLSYNQNGTITDAVDCSLDPLSETKCTLKSLTVEKGIYQTSNFRVQPTISIVRFPNITNLCPFGEVFNASKFASVYAWNRKRISNCVADYSVLYNSTSFSTFKCYGVSPTKLNDLCFTNVYADSFVVKGDEVRQIAPGQTGVIADYNYKLPDDFTGCVIAWNSVKQDALTGGNYLYRLFRKSKLKPFERDISTEIYQAGSTPCNGQVGLNCYYPLERYGFHPTTGVNYQPFRVVVLSFELLNGPATVCGPKLSTTLVKDKCVNFNFNGLTGTGVLTTSKKQFLPFQQFGRDISDTTDAVRDPQTLEILDITPCSFGGVSVITPGTNTSNQVAVLYQDVNCTEVPMAIHAEQLTPAWRVYSAGANVFQTRAGCLVGAEHVNNSYECDIPVGAGICASYHSMSSLRSVNQRSIIAYTMSLGAENSVAYSNNSIAIPTNFTISVTTEILPVSMTKTSVDCTMYICGDSIECSNLLLQYGSFCTQLNRALTGIAVEQDKNTQEVFAQVKQIYKTPPIKDFGGFNFSQILPDPSKPSKRSFIEDLLFNKVTLADAGFIKQYGDCLGDIAARDLICAQKFNGLTVLPPLLTDEMIAQYCSALLAGTITSGWTFGAGAALQIPFAMQMAYRFNGIGVTQNVLYENQKLIANQFNSAIGKIQDSLSSTASALGKLQDVVNQNAQALNTLVKQLSSNFGAISSVLNDILSRLDKVEAEVQIDRLITGRLQSLQTYVTQQLIRAAEIRASANLAATKMSECVLGQSKRVDFCGKGYHLMSFPQCAPHGVVFLHVTYVPAQEKNFTTAPAICHEGKAHFPREGVFVSNGTHWFITQRNFYEPQIITTDNTFVSGSCDVVIGIVNNTVYDPLQPELDS

SEQ ID NO: 3624 - protein, 1371 aa, Artificial Sequence; identical to SEQ ID NO: 58
  SARS-CoV-2/Wuhan/WIV05/2019__EPI_ISL_402128 spike protein (1-1211) LumSynth construct

SEQ ID NO: 3625 - protein, 1367 aa, Artificial Sequence; identical to SEQ ID NO: 59
  SARS-CoV-2/bat/Yunnan/RaTG13/2013__EPI_ISL_402131 spike protein (1-1207) LumSynth construct

SEQ ID NO: 3626 - protein, 1371 aa, Artificial Sequence; identical to SEQ ID NO: 60
  SARS-CoV-2/Wuhan/HBCDC-HB-01/2019__EPI_ISL_402132 spike protein (1-1211) LumSynth construct

SEQ ID NO: 3627 - protein, 1371 aa, Artificial Sequence; identical to SEQ ID NO: 61
  SARS-CoV-2/Guangdong/20SF028/2020__EPI_ISL_403936 spike protein (1-1211) LumSynth construct

SEQ ID NO: 3628 - protein, 1371 aa, Artificial Sequence; identical to SEQ ID NO: 62
  SARS-CoV-2/Shenzhen/SZTH-001/2020__EPI_ISL_406592 spike protein (1-1211) LumSynth construct

SEQ ID NO: 3629 - protein, 1371 aa, Artificial Sequence; identical to SEQ ID NO: 63
  SARS-CoV-2/Shenzhen/SZTH-004/2020__EPI_ISL_406595 spike protein (1-1211) LumSynth construct

SEQ ID NO: 3630 - protein, 1371 aa, Artificial Sequence; identical to SEQ ID NO: 64
  SARS-CoV-2/France/IDF0372/2020__EPI_ISL_406596 spike protein (1-1211) LumSynth construct

SEQ ID NO: 3631 - protein, 1371 aa, Artificial Sequence; identical to SEQ ID NO: 65
  SARS-CoV-2/Australia/VIC01/2020__EPI_ISL_406844 spike protein (1-1211) LumSynth construct

SEQ ID NO: 3632 - protein, 1371 aa, Artificial Sequence; identical to SEQ ID NO: 66
  SARS-CoV-2/Germany/BavPat1/2020__EPI_ISL_406862 spike protein (1-1211) LumSynth construct

SEQ ID NO: 3633 - protein, 1371 aa, Artificial Sequence
  SARS-CoV-2/Wuhan/HBCDC-HB-02/2020__EPI_ISL_412978 spike protein (1-1211) LumSynth construct
MFVFLVLLPLVSSQCVNLTTRTQLPPAYTNSFTRGVYYPDKVFRSSVLHSTQDLFLPFFSNVTWFHAIHVSGTNGTKRFDNPVLPFNDGVYFASTEKSNIIRGWIFGTTLDSKTQSLLIVNNATNVVIKVCEFQFCNDPFLGVYYHKNNKSWMESEFRVYSSANNCTFEYVSQPFLMDLEGKQGNFKNLREFVFKNIDGYFKIYSKHTPINLVRDLPQGFSALEPLVDLPIGINITRFQTLLALHRSYLTPGDSSSGWTAGAAAYYVGYLQPRTFLLKYNENGTITDAVDCALDPLSETKCTLKSFTVEKGIYQTSNFRVQPTESIVRFPNITNLCPFGEVFNATRFASVYAWNRKRISNCVADYSVLYNSASFSTFKCYGVSPTKLNDLCFTNVYADSFVIRGDEVRQIAPGQTGKIADYNYKLPDDFTGCVIAWNSNNLDSKVGGNYNYLYRLFRKSNLKPFERDISTEIYQAGSTPCNGVEGFNCYFPLQSYGFQPTNGVGYQPYRVVVLSFELLHAPATVCGPKKSTNLVKNKCVNFNFNGLTGTGVLTESNKKFLPFQQFGRDIADTTDAVRDPQTLEILDITPCSFGGVSVITPGTNTSNQVAVLYQDVNCTEVPVAIHADQLTPTWRVYSTGSNVFQTRAGCLIGAEHVNNSYECDIPIGAGICASYQTQTNSPRRARSVASQSIIAYTMSLGAENSVAYSNNSIAIPTNFTISVTTEILPVSMTKTSVDCTMYICGDSTECSNFLLQYGSFCTQLNRALTGIAVEQDKNTQEVFAQVKQIYKTPPIKDFGGFNFSQILPDPSKPSKRSFIEDLLFNKVTLADAGFIKQYGDCLGDIAARDLICAQKFNGLTVLPPLLTDEMIAQYTSALLAGTITSGWTFGAGAALQIPFAMQMAYRFNGIGVTQNVLYENQKLIANQFNSAIGKIQDSLSSTASALGKLQDVVNQNAQALNTLVKQLSSNFGAISSVLNDILSRLDKVEAEVQIDRLITGRLQSLQTYVTQQLIRAAEIRASANLAATKMSECVLGQSKRVDFCGKGYHLMSFPQSAPHGVVFLHVTYVPAQEKNFTTAPAICHDGKAHFPREGVFVSNGTHWFVTQRNFYEPQIITTDNTFVSGNCDVVIGIVNNTVYDPLQPELDSFKEELDKYFKNHTSPDVDLGDISGINASVVNIQKEIDRLNEVAKNLNESLIDLQELGKYEQYIKGGGSGGGQIYEGKLTAEGLRFGIVASRFNHALVDRLVEGAIDAIVRHGGREEDITLVRVPGSWEIPVAAGELARKEDIDAVIAIGVLIRGATPHFDYIASEVSKGLADLSLELRKPITFGVITADTLEQAIERAGTKHGNKGWEAALSAIEMANLFKSLR

SEQ ID NO: 3634 - protein, 1371 aa, Artificial Sequence
  SARS-CoV-2/Australia/QLD02/2020__EPI_ISL_407896 spike protein (1-1211) LumSynth construct
MFVFLVLLPLVSSQCVNLTTRTQLPPAYTNSFTRGVYYPDKVFRSSVLHSTQDLFLPFFSNVTWFHAIHVSGTNGTKRFDNPVLPFNDGVYFASTEKSNIIRGWIFGTTLDSKTQSLLIVNNATNVVIKVCEFQFCNDPFLGVYYHKNNKSWMESEFRVYSSANNCTFEYVSQPFLMDLEGKQGNFKNLREFVFKNIDGYFKIYSKHTPINLVRDLPQGFSALEPLVDLPIGINITRFQTLLALHRSYLTPGDSSSGWTAGAAAYYVGYLQPRTFLLKYNENGTITDAVDCALDPLSETKCTLKSFTVEKGIYQTSNFRVQPTESIVRFPNITNLCPFGEVFNATRFASVYAWNRKRISNCVADYSVLYNSASFSTFKCYGVSPTKLNDLCFTNVYADSFVIRGDEVRQIAPGQTGKIADYNYKLPDDFTGCVIAWNSNNLDSKVGGNYNYLYRLFRKSNLKPFERDISTEIYQAGSTPCNGVEGFNCYFPLQSYGFQPTNGVGYQPYRVVVLSFELLHAPATVCGPKKSTNLVKNKCVNFNFNGLTGTGVLTESNKKFLPFQQFGRDIADTTDAVRDPQTLEILDITPCSFGGVSVITPGTNTSNQVAVLYQDVNCTEVPVAIHADQLTPTWRVYSTGSNVFQTRAGCLIGAEHVNNSYECDIPIGAGICASYQTQTNSPRRARSVASQSIIAYTMSLGAENSVAYSNNSIAIPTNFTISVTTEILPVSMTKTSVDCTMYICGDSTECSNLLLQYGSFCTQLNRALTGIAVEQDKNTQEVFAQVKQIYKTPPIKDFGGFNFSQILPDPSKPSKRSFIEDLLFNKVTLADAGFIKQYGDCLGDIAARDLICAQKFNGLTVLPPLLTDEMIAQYTSALLAGTITSGWTFGAGAALQIPFAMQMAYRFNGIGVTQNVLYENQKLIANQFNSAIGKIQDSLSSTASALGKLQDVVNQNAQALNTLVKQLSSNFGAISSVLNDILSRLDKVEAEVQIDRLITGRLQSLQTYVTQQLIRAAEIRASANLAATKMSECVLGQSKRVDFCGKGYHLMSFPQSAPHGVVFLHVTYVPAQEKNFTTAPAICHDGKAHFPREGVFVSNGTHWFVTQRNFYEPQIITTDNTFVSGNCDVVIGIVNNTVYDPLQLELDSFKEELDKYFKNHTSPDVDLGDISGINASVVNIQKEIDRLNEVAKNLNESLIDLQELGKYEQYIKGGGSGGGQIYEGKLTAEGLRFGIVASRFNHALVDRLVEGAIDAIVRHGGREEDITLVRVPGSWEIPVAAGELARKEDIDAVIAIGVLIRGATPHFDYIASEVSKGLADLSLELRKPITFGVITADTLEQAIERAGTKHGNKGWEAALSAIEMANLFKSLR

SEQ ID NO: 3635 - protein, 1371 aa, Artificial Sequence
  SARS-CoV-2/India/1-31/2020__EPI_ISL_413523 spike protein (1-1211) LumSynth construct
MFVFLVLLPLVSSQCVNLTTRTQLPPAYTNSFTRGVYYPDKVFRSSVLHSTQDLFLPFFSNVTWFHAIHVSGTNGTKRFDNPVLPFNDGVYFASTEKSNIIRGWIFGTTLDSKTQSLLIVNNATNVVIKVCEFQFCNDPFLGVYYHKNNKSWMESEFRVYSSANNCTFEYVSQPFLMDLEGKQGNFKNLREFVFKNIDGYFKIYSKHTPINLVRDLPQGFSALEPLVDLPIGINITRFQTLLALHRSYLTPGDSSSGWTAGAAAYYVGYLQPRTFLLKYNENGTITDAVDCALDPLSETKCTLKSFTVEKGIYQTSNFRVQPTESIVRFPNITNLCPFGEVFNATRFASVYAWNRKRISNCVADYSVLYNSASFSTFKCYGVSPTKLNDLCFTNVYADSFVIRGDEVRQIAPGQTGKIADYNYKLPDDFTGCVIAWNSNNLDSKVGGNYNYLYRLFRKSNLKPFERDISTEIYQAGSTPCNGVEGFNCYFPLQSYGFQPTNGVGYQPYRVVVLSFELLHAPATVCGPKKSTNLVKNKCVNFNFNGLTGTGVLTESNKKFLPFQQFGRDIADTTDAVRDPQTLEILDITPCSFGGVSVITPGTNTSNQVAVLYQDVNCTEVPVAIHADQLTPTWRVYSTGSNVFQTRAGCLIGAEHVNNSYECDIPIGAGICASYQTQTNSPRRARSVASQSIIAYTMSLGAENSVAYSNNSIAIPTNFTISVTTEILPVSMTKTSVDCTMYICGDSTECSNLLLQYGSFCTQLNRALTGIAVEQDKNTQEVFAQVKQIYKTPPIKDFGGFNFSQILPDPSKPSKRSFIEDLLFNKVTLADAGFIKQYGDCLGDIAARDLICAQKFNGLTVLPPLLTDEMIAQYTSALLAGTITSGWTFGAGAALQIPFAMQMAYRFNGIGVTQNVLYENQKLIANQFNSVIGKIQDSLSSTASALGKLQDVVNQNAQALNTLVKQLSSNFGAISSVLNDILSRLDKVEAEVQIDRLITGRLQSLQTYVTQQLIRAAEIRASANLAATKMSECVLGQSKRVDFCGKGYHLMSFPQSAPHGVVFLHVTYVPAQEKNFTTAPAICHDGKAHFPREGVFVSNGTHWFVTQRNFYEPQIITTDNTFVSGNCDVVIGIVNNTVYDPLQPELDSFKEELDKYFKNHTSPDVDLGDISGINASVVNIQKEIDRLNEVAKNLNESLIDLQELGKYEQYIKGGGSGGGQIYEGKLTAEGLRFGIVASRFNHALVDRLVEGAIDAIVRHGGREEDITLVRVPGSWEIPVAAGELARKEDIDAVIAIGVLIRGATPHFDYIASEVSKGLADLSLELRKPITFGVITADTLEQAIERAGTKHGNKGWEAALSAIEMANLFKSLR

SEQ ID NO: 3636 - protein, 1371 aa, Artificial Sequence
  SARS-CoV-2/Guangdong/GD2020087-P0008/2020__EPI_ISL_413863 spike protein (1-1211) LumSynth construct
MFVFLVLLPLVSSQCVNLTTRTQLPPAYTNSFTRGVYYPDKVFRSSVLHSTQDLFLPFFSNVTWFHAIHVSGTNGTKRFDNPVLPFNDGVYFASTEKSNIIRGWIFGTTLDSKTQSLLIVNNATNVVIKVCEFQFCNDPFLGVYYHKNNKSWMESEFRVYSSANNCTFEYVSQPFLMDLEGKQGNFKNLREFVFKNIDGYFKIYSKHTPINLVRDLPQGFSALEPLVDLPIGINITRFQTLLALHRSYLTPGDSSSGWTAGAAAYYVGYLQPRTFLLKYNENGTITDAVDCALDPLSETKCTLKSFTVEKGIYQTSNFRVQPTESIVRFPNITNLCPFGEVFNATRFASVYAWNRKRISNCVADYSVLYNSASFSTFKCYGVSPTKLNDLCFTNVYADSFVIRGDEVREIAPGQTGKIADYNYKLPDDFTGCVIAWNSNNLDSKVGGNYNYLYRLFRKSNLKPFERDISTEIYQAGSTPCNGVEGFNCYFPLQSYGFQPTNGVGYQPYRVVVLSFELLHAPATVCGPKKSTNLVKNKCVNFNFNGLTGTGVLTESNKKFLPFQQFGRDIADTTDAVRDPQTLEILDITPCSFGGVSVITPGTNTSNQVAVLYQDVNCTEVPVAIHADQLTPTWRVYSTGSNVFQTRAGCLIGAEHVNNSYECDIPIGAGICASYQTQTNSPRRARSVASQSIIAYTMSLGAENSVAYSNNSIAIPTNFTISVTTEILPVSMTKTSVDCTMYICGDSTECSNLLLQYGSFCTQLNRALTGIAVEQDKNTQEVFAQVKQIYKTPPIKDFGGFNFSQILPDPSKPSKRSFIEDLLFNKVTLADAGFIKQYGDCLGDIAARDLICAQKFNGLTVLPPLLTDEMIAQYTSALLAGTITSGWTFGAGAALQIPFAMQMAYRFNGIGVTQNVLYENQKLIANQFNSAIGKIQDSLSSTASALGKLQDVVNQNAQALNTLVKQLSSNFGAISSVLNDILSRLDKVEAEVQIDRLITGRLQSLQTYVTQQLIRAAEIRASANLAATKMSECVLGQSKRVDFCGKGYHLMSFPQSAPHGVVFLHVTYVPAQEKNFTTAPAICHDGKAHFPREGVFVSNGTHWFVTQRNFYEPQIITTDNTFVSGNCDVVIGIVNNTVYDPLQPELDSFKEELDKYFKNHTSPDVDLGDISGINASVVNIQKEIDRLNEVAKNLNESLIDLQELGKYEQYIKGGGSGGGQIYEGKLTAEGLRFGIVASRFNHALVDRLVEGAIDAIVRHGGREEDITLVRVPGSWEIPVAAGELARKEDIDAVIAIGVLIRGATPHFDYIASEVSKGLADLSLELRKPITFGVITADTLEQAIERAGTKHGNKGWEAALSAIEMANLFKSLR

SEQ ID NO: 3637 - protein, 1371 aa, Artificial Sequence
  SARS-CoV-2/Sweden/01/2020__EPI_ISL_411951 spike protein (1-1211) LumSynth construct
MFVFLVLLPLVSSQCVNLTTRTQLPPAYTNSFTRGVYYPDKVFRSSVLHSTQDLFLPFFSNVTWFHAIHVSGTNGTKRFDNPVLPFNDGVYFASTEKSNIIRGWIFGTTLDSKTQSLLIVNNATNVVIKVCEFQFCNDPFLGVYYHKNNKSWMESEFRVYSSANNCTFEYVSQPFLMDLEGKQGNFKNLREFVFKNIDGYFKIYSKHTPINLVRDLPQGFSALEPLVDLPIGINITRFQTLLALHRSYLTPGDSSSGWTAGAAAYYVGYLQPRTFLLKYNENGTITDAVDCALDPLSETKCTLKSFTVEKGIYQTSNFRVQPTESIVRFPNITNLCPFGEVFNATRFASVYAWNRKRISNCVADYSVLYNSASFSTFKCYGVSPTKLNDLCFTNVYADSFVIRGDEVRQIAPGQTGKIADYNYKLPDDFTGCVIAWNSNNLDSKVGGNYNYLYRLFRKSNLKPFERDISTEIYQAGSTPCNGVEGFNCYFPLQSYGFQPTNGVGYQPYRVVVLSFELLHAPATVCGPKKSTNLVKNKCVNFNFNGLTGTGVLTESNKKFLPFQQFGRDIADTTDAVRDPQTLEILDITPCSFGGVSVITPGTNTSNQVAVLYQDVNCTEVPVAIHADQLTPTWRVYSTGSNVFQTRAGCLIGAEHVNNSYECDIPIGAGICASYQTQTNSPRRARSVASQSIIAYTMSLGAENSVAYSNNSIAIPTNFTISVTTEILPVSMTKTSVDCTMYICGDSTECSNLLLQYGSFCTQLNRALTGIAVEQDKNTQEVFAQVKQIYKTPPIKDCGGFNFSQILPDPSKPSKRSFIEDLLFNKVTLADAGFIKQYGDCLGDIAARDLICAQKFNGLTVLPPLLTDEMIAQYTSALLAGTITSGWTFGAGAALQIPFAMQMAYRFNGIGVTQNVLYENQKLIANQFNSAIGKIQDSLSSTASALGKLQDVVNQNAQALNTLVKQLSSNFGAISSVLNDILSRLDKVEAEVQIDRLITGRLQSLQTYVTQQLIRAAEIRASANLAATKMSECVLGQSKRVDFCGKGYHLMSFPQSAPHGVVFLHVTYVPAQEKNFTTAPAICHDGKAHFPREGVFVSNGTHWFVTQRNFYEPQIITTDNTFVSGNCDVVIGIVNNTVYDPLQPELDSFKEELDKYFKNHTSPDVDLGDISGINASVVNIQKEIDRLNEVAKNLNESLIDLQELGKYEQYIKGGGSGGGQIYEGKLTAEGLRFGIVASRFNHALVDRLVEGAIDAIVRHGGREEDITLVRVPGSWEIPVAAGELARKEDIDAVIAIGVLIRGATPHFDYIASEVSKGLADLSLELRKPITFGVITADTLEQAIERAGTKHGNKGWEAALSAIEMANLFKSLR

SEQ ID NO: 3638 - protein, 1371 aa, Artificial Sequence
  SARS-CoV-2/Tianmen/HBCDC-HB-07/2020__EPI_ISL_412983 spike protein (1-1211) LumSynth construct
MFVFLVLLPLVSSQCVNLTTRTQLPPAYTNSFTRGVYYPDKVFRSSVLHSTQDLFLPFFSNVTWFHAIHVSGTNGTKRFDNPVLPFNDGVYFASTEKSNIIRGWIFGTTLDSKTQSLLIVNNATNVVIKVCEFQFCNDPFLGVYYHKNNKSWMESEFRVYSSANNCTFEYVSQPFLMDLEGKQGNFKNLREFVFKNIDGYFKIYSKHTPINLVRDLPQGFSALEPLVDLPIGINITRFQTLLALHRSYLTPGDSSSGWTAGAAAYYVGYLQPRTFLLKYNENGTITDAVDCALDPLSETKCTLKSFTVEKGIYQTSNFRVQPTESIVRFPNITNLCPFGEVFNATRFASVYAWNRKRISNCVADYSVLYNSASFSTFKCYGVSPTKLNDLCFTNVYADSFVIRGDEVRQIAPGQTGKIADYNYKLPDDFTGCVIAWNSNNLDSKVGGNYNYLYRLFRKSNLKPFERDISTEIYQAGSTPCNGVEGFNCYFPLQSYGFQPTNGVGYQPYRVVVLSFELLHAPATVCGPKKSTNLVKNKCVNFNFNGLTGTGVLTESNKKFLPFQQFGRDIADTTDAVRDPQTLEILDITPCSFGGVSVITPGTNTSNQVAVLYQDLNCTEVPVAIHADQLTPTWRVYSTGSNVFQTRAGCLIGAEHVNNSYECDIPIGAGICASYQTQTNSPRRARSVASQSIIAYTMSLGAENSVAYSNNSIAIPTNFTISVTTEILPVSMTKTSVDCTMYICGDSTECSNLLLQYGSFCTQLNRALTGIAVEQDKNTQEVFAQVKQIYKTPPIKDFGGFNFSQILPDPSKPSKRSFIEDLLFNKVTLADAGFIKQYGDCLGDIAARDLICAQKFNGLTVLPPLLTDEMIAQYTSALLAGTITSGWTFGAGAALQIPFAMQMAYRFNGIGVTQNVLYENQKLIANQFNSAIGKIQDSLSSTASALGKLQDVVNQNAQALNTLVKQLSSNFGAISSVLNDILSRLDKVEAEVQIDRLITGRLQSLQTYVTQQLIRAAEIRASANLAATKMSECVLGQSKRVDFCGKGYHLMSFPQSAPHGVVFLHVTYVPAQEKNFTTAPAICHDGKAHFPREGVFVSNGTHWFVTQRNFYEPQIITTDNTFVSGNCDVVIGIVNNTVYDPLQPELDSFKEELDKYFKNHTSPDVDLGDISGINASVVNIQKEIDRLNEVAKNLNESLIDLQELGKYEQYIKGGGSGGGQIYEGKLTAEGLRFGIVASRFNHALVDRLVEGAIDAIVRHGGREEDITLVRVPGSWEIPVAAGELARKEDIDAVIAIGVLIRGATPHFDYIASEVSKGLADLSLELRKPITFGVITADTLEQAIERAGTKHGNKGWEAALSAIEMANLFKSLR

SEQ ID NO: 3639 - protein, 1371 aa, Artificial Sequence
  SARS-CoV-2/Hong Kong/case42_VM20002493/2020__EPI_ISL_414527 spike protein (1-1211) LumSynth construct
MFVFLVLLPLVSSQCVNLTTRTQLPPAYTNSFTRGVYYPDKVFRSSVLHSTQDLFLPFFSNVTWFHAIHVSGTNGTKRFDNPVLPFNDGVYFASTEKSNIIRGWIFGTTLDSKTQSLLIVNNATNVVIKVCEFQFCNDPFLGVYYHKNNKSWMESEFRVYSSANNCTFEYVSQPFLMDLEGKQGNFKNLREFVFKNIDGYFKIYSKHTPINLVRDLPQGFSALEPLVDLPIGINITRFQTLLALHRSYLTPGDSSSGWTAGAAAYYVGYLQPRTFLLKYNENGTITDAVDCALDPLSETKCTLKSFTVEKGIYQTSNFRVQPTESIVRFPNITNLCPFGEVFNATRFASVYAWNRKRISNCVADYSVLYNSASFSTFKCYGVSPTKLNDLCFTNVYADSFVIRGDEVRQIAPGQTGKIADYNYKLPDDFTGCVIAWNSNNLDSKVGGNYNYLYRLFRKSNLKPFERDISTEIYQAGSTPCNGVEGFNCYFPLQSYGFQPTNGVGYQPYRVVVLSFELLHAPATVCGPKKSTNLVKNKCVNFNFNGLTGTGVLTESNKKFLPFQQFGRDIADTTDAVRDPQTLEILDITPCSFGGVSVITPGTNTSNQVAVLYQDVNCTEVPVAIHADQLTPTWRVYSTGSNVFQTRAGCLIGAEHVNNSYECDIPIGAGICASYQTQTNSPRRARSVASQSIIAYTMSLGAENSVAYSNNSIAIPTNFAISVTTEILPVSMTKTSVDCTMYICGDSTECSNLLLQYGSFCTQLNRALTGIAVEQDKNTQEVFAQVKQIYKTPPIKDFGGFNFSQILPDPSKPSKRSFIEDLLFNKVTLADAGFIKQYGDCLGDIAARDLICAQKFNGLTVLPPLLTDEMIAQYTSALLAGTITSGWTFGAGAALQIPFAMQMAYRFNGIGVTQNVLYENQKLIANQFNSAIGKIQDSLSSTASALGKLQDVVNQNAQALNTLVKQLSSNFGAISSVLNDILSRLDKVEAEVQIDRLITGRLQSLQTYVTQQLIRAAEIRASANLAATKMSECVLGQSKRVDFCGKGYHLMSFPQSAPHGVVFLHVTYVPAQEKNFTTAPAICHDGKAHFPREGVFVSNGTHWFVTQRNFYEPQIITTDNTFVSGNCDVVIGIVNNTVYDPLQPELDSFKEELDKYFKNHTSPDVDLGDISGINASVVNIQKEIDRLNEVAKNLNESLIDLQELGKYEQYIKGGGSGGGQIYEGKLTAEGLRFGIVASRFNHALVDRLVEGAIDAIVRHGGREEDITLVRVPGSWEIPVAAGELARKEDIDAVIAIGVLIRGATPHFDYIASEVSKGLADLSLELRKPITFGVITADTLEQAIERAGTKHGNKGWEAALSAIEMANLFKSLR

SEQ ID NO: 3640 - protein, 1371 aa, Artificial Sequence
  SARS-CoV-2/USA/CruiseA-23/2020__EPI_ISL_414482 spike protein (1-1211) LumSynth construct
MFVFLVLLPLVSSQCVNLTTRTQLPPAYTNSFTRGVYYPDKVFRSSVLHSTQDLFLPFFSNVTWFHAIHVSGTNGTKRFDNPVLPFNDGVYFASTEKSNIIRGWIFGTTLDSKTQSLLIVNNATNVVIKVCEFQFCNDPFLGVYYHKNNKSWMESEFRVYSSANNCTFEYVSQPFLMDLEVKQGNFKNLREFVFKNIDGYFKIYSKHTPINLVRDLPQGFSALEPLVDLPIGINITRFQTLLALHRSYLTPGDSSSGWTAGAAAYYVGYLQPRTFLLKYNENGTITDAVDCALDPLSETKCTLKSFTVEKGIYQTSNFRVQPTESIVRFPNITNLCPFGEVFNATRFASVYAWNRKRISNCVADYSVLYNSASFSTFKCYGVSPTKLNDLCFTNVYADSFVIRGDEVRQIAPGQTGKIADYNYKLPDDFTGCVIAWNSNNLDSKVGGNYNYLYRLFRKSNLKPFERDISTEIYQAGSTPCNGVEGFNCYFPLQSYGFQPTNGVGYQPYRVVVLSFELLHAPATVCGPKKSTNLVKNKCVNFNFNGLTGTGVLTESNKKFLPFQQFGRDIADTTDAVRDPQTLEILDITPCSFGGVSVITPGTNTSNQVAVLYQDVNCTEVPVAIHADQLTPTWRVYSTGSNVFQTRAGCLIGAEHVNNSYECDIPIGAGICASYQTQTNSPRRARSVASQSIIAYTMSLGAENSVAYSNNSIAIPTNFTISVTTEILPVSMTKTSVDCTMYICGDSTECSNLLLQYGSFCTQLNRALTGIAVEQDKNTQEVFAQVKQIYKTPPIKDFGGFNFSQILPDPSKPSKRSFIEDLLFNKVTLADAGFIKQYGDCLGDIAARDLICAQKFNGLTVLPPLLTDEMIAQYTSALLAGTITSGWTFGAGAALQIPFAMQMAYRFNGIGVTQNVLYENQKLIANQFNSAIGKIQDSLSSTASALGKLQDVVNQNAQALNTLVKQLSSNFGAISSVLNDILSRLDKVEAEVQIDRLITGRLQSLQTYVTQQLIRAAEIRASANLAATKMSECVLGQSKRVDFCGKGYHLMSFPQSAPHGVVFLHVTYVPAQEKNFTTAPAICHDGKAHFPREGVFVSNGTHWFVTQRNFYEPQIITTDNTFVSGNCDVVIGIVNNTVYDPLQPELDSFKEELDKYFKNHTSPDVDLGDISGINASVVNIQKEIDRLNEVAKNLNESLIDLQELGKYEQYIKGGGSGGGQIYEGKLTAEGLRFGIVASRFNHALVDRLVEGAIDAIVRHGGREEDITLVRVPGSWEIPVAAGELARKEDIDAVIAIGVLIRGATPHFDYIASEVSKGLADLSLELRKPITFGVITADTLEQAIERAGTKHGNKGWEAALSAIEMANLFKSLR

SEQ ID NO: 3641 - protein, 1371 aa, Artificial Sequence
  SARS-CoV-2/Hong Kong/case85_VM20002868/2020__EPI_ISL_414519 spike protein (1-1211) LumSynth construct
MFVFLVLVPLVSSQCVNLTTRTQLPPAYTNSFTRGVYYPDKVFRSSVLHSTQDLFLPFFSNVTWFHAIHVSGTNGTKRFDNPVLPFNDGVYFASTEKSNIIRGWIFGTTLDSKTQSLLIVNNATNVVIKVCEFQFCNDPFLGVYYHKNNKSWMESEFRVYSSANNCTFEYVSQPFLMDLEGKQGNFKNLREFVFKNIDGYFKIYSKHTPINLVRDLPQGFSALEPLVDLPIGINITRFQTLLALHRSYLTPGDSSSGWTAGAAAYYVGYLQPRTFLLKYNENGTITDAVDCALDPLSETKCTLKSFTVEKGIYQTSNFRVQPTESIVRFPNITNLCPFGEVFNATRFASVYAWNRKRISNCVADYSVLYNSASFSTFKCYGVSPTKLNDLCFTNVYADSFVIRGDEVRQIAPGQTGKIADYNYKLPDDFTGCVIAWNSNNLDSKVGGNYNYLYRLFRKSNLKPFERDISTEIYQAGSTPCNGVEGFNCYFPLQSYGFQPTNGVGYQPYRVVVLSFELLHAPATVCGPKKSTNLVKNKCVNFNFNGLTGTGVLTESNKKFLPFQQFGRDIADTTDAVRDPQTLEILDITPCSFGGVSVITPGTNTSNQVAVLYQDVNCTEVPVAIHADQLTPTWRVYSTGSNVFQTRAGCLIGAEHVNNSYECDIPIGAGICASYQTQTNSPRRARSVASQSIIAYTMSLGAENSVAYSNNSIAIPTNFTISVTTEILPVSMTKTSVDCTMYICGDSTECSNLLLQYGSFCTQLNRALTGIAVEQDKNTQEVFAQVKQIYKTPPIKDFGGFNFSQILPDPSKPSKRSFIEDLLFNKVTLADAGFIKQYGDCLGDIAARDLICAQKFNGLTVLPPLLTDEMIAQYTSALLAGTITSGWTFGAGAALQIPFAMQMAYRFNGIGVTQNVLYENQKLIANQFNSAIGKIQDSLSSTASALGKLQDVVNQNAQALNTLVKQLSSNFGAISSVLNDILSRLDKVEAEVQIDRLITGRLQSLQTYVTQQLIRAAEIRASANLAATKMSECVLGQSKRVDFCGKGYHLMSFPQSAPHGVVFLHVTYVPAQEKNFTTAPAICHDGKAHFPREGVFVSNGTHWFVTQRNFYEPQIITTDNTFVSGNCDVVIGIVNNTVYDPLQPELDSFKEELDKYFKNHTSPDVDLGDISGINASVVNIQKEIDRLNEVAKNLNESLIDLQELGKYEQYIKGGGSGGGQIYEGKLTAEGLRFGIVASRFNHALVDRLVEGAIDAIVRHGGREEDITLVRVPGSWEIPVAAGELARKEDIDAVIAIGVLIRGATPHFDYIASEVSKGLADLSLELRKPITFGVITADTLEQAIERAGTKHGNKGWEAALSAIEMANLFKSLR

SEQ ID NO: 3642 - protein, 1371 aa, Artificial Sequence; identical to SEQ ID NO: 66
  SARS-CoV-2/England/200990660/2020__EPI_ISL_414523 spike protein (1-1211) LumSynth construct

SEQ ID NO: 3643 - protein, 1371 aa, Artificial Sequence
  SARS-CoV-2/Australia/NSW09/2020__EPI_ISL_413595 spike protein (1-1211) LumSynth construct
MFVFLVLLPLVSSQCVNLTTRTQLPPAYTNSFTRGVYYPDKVFRSSVLHSTQDLFLPFFSNVTWFHAIHVSGTNGTKRFDNPVLPFNDGVYFASTEKSNIIRGWIFGTTLDSKTQSLLIVNNATNVVIKVCEFQFCNDPFLGVYYHKNNKSWMESEFRVYSSANNCTFEYVSQPFLMDLEGKQGNFKNLREFVFKNIDGYFKIYSKHTPINLVRDLPQGFSALEPLVDLPIGINITRFQTLLALHRSYLTPGDSSSGWTAGAAAYYVGYLQPRTFLLKYNENGTITDAVDCALDPLSETKCTLKSFTVEKGIYQTSNFRVQPTESIVRFPNITNLCPFGEVFNATRFASVYAWNRKRISNCVADYSVLYNSASFSTFKCYGVSPTKLNDLCFTNVYADSFVIRGDEVRQIAPGQTGKIADYNYKLPDDFTGCVIAWNSNNLDSKVGGNYNYLYRLFRKSNLKPFERDISTEIYQAGSTPCNGVEGFNCYFPLQSYGFQPTNGVGYQPYRVVVLSFELLHAPATVCGPKKSTNLVKNKCVNFNFNGLTGTGVLTESNKKFLPFQQFGRDIADTTDAVRDPQTLEILDITPCSFGGVSVITPGTNTSNQVAVLYQDVNCTEVPVAIHADQLTPTWRVYSTGSNVFQTRAGCLIGAEHVNNSYECDIPIGAGICASYQTQTNSPRRARSVASQSIIAYTMSLGAENSVAYSNNSIAIPTNFTISVTTEILPVSMTKTSVDCTMYICGDSTECSNLLLQYGSFCTQLNRALTGIAVEQDKNTQEVFAQVKQIYKTPPIKDFGGFNFSQILPDPSKPSKRSFIEDLLFNKVTLADAGFIKQYGDCLGDIAARDLICAQKFNGLTVLPPLLTDEMIAQYTSALLAGTITSGWTFGAGAALQIPFAMQMAYRFNGIGVTQNVLYENQKLIANQFNSAIGKIQDSLSFTASALGKLQDVVNQNAQALNTLVKQLSSNFGAISSVLNDILSRLDKVEAEVQIDRLITGRLQSLQTYVTQQLIRAAEIRASANLAATKMSECVLGQSKRVDFCGKGYHLMSFPQSAPHGVVFLHVTYVPAQEKNFTTAPAICHDGKAHFPREGVFVSNGTHWFVTQRNFYEPQIITTDNTFVSGNCDVVIGIVNNTVYDPLQPELDSFKEELDKYFKNHTSPDVDLGDISGINASVVNIQKEIDRLNEVAKNLNESLIDLQELGKYEQYIKGGGSGGGQIYEGKLTAEGLRFGIVASRFNHALVDRLVEGAIDAIVRHGGREEDITLVRVPGSWEIPVAAGELARKEDIDAVIAIGVLIRGATPHFDYIASEVSKGLADLSLELRKPITFGVITADTLEQAIERAGTKHGNKGWEAALSAIEMANLFKSLR

SEQ ID NO: 3644 - protein, 1371 aa, Artificial Sequence; identical to SEQ ID NO: 58
  SARS-CoV-2/Australia/NSW10/2020__EPI_ISL_413596 spike protein (1-1211) LumSynth construct

SEQ ID NO: 3645 - protein, 1371 aa, Artificial Sequence
  SARS-CoV-2/Switzerland/1000477797/2020__EPI_ISL_413023 spike protein (1-1211) LumSynth construct
MFVFLVLLPLVSSQCVNLTTRTQLPPAYTNSFTRGVYYPDKVFRSSVLHSTQDLFLPFFSNVTWFHAIHVSGTNGTKRFDNPVLPFNDGVYFASTEKSNIIRGWIFGTTLDSKTQSLLIVNNATNVVIKVCEFQFCNDPFLGVYYHKNNKSWMESEFRVYSSANNCTFEYVSQPFLMDLEGKQGNFKNLREFVFKNIDGYFNIYSKHTPINLVRDLPQGFSALEPLVDLPIGINITRFQTLLALHRSYLTPGDSSSGWTAGAAAYYVGYLQPRTFLLKYNENGTITDAVDCALDPLSETKCTLKSFTVEKGIYQTSNFRVQPTESIVRFPNITNLCPFGEVFNATRFASVYAWNRKRISNCVADYSVLYNSASFSTFKCYGVSPTKLNDLCFTNVYADSFVIRGDEVRQIAPGQTGKIADYNYKLPDDFTGCVIAWNSNNLDSKVGGNYNYLYRLFRKSNLKPFERDISTEIYQAGSTPCNGVEGFNCYFPLQSYGFQPTNGVGYQPYRVVVLSFELLHAPATVCGPKKSTNLVKNKCVNFNFNGLTGTGVLTESNKKFLPFQQFGRDIADTTDAVRDPQTLEILDITPCSFGGVSVITPGTNTSNQVAVLYQGVNCTEVPVAIHADQLTPTWRVYSTGSNVFQTRAGCLIGAEHVNNSYECDIPIGAGICASYQTQTNSPRRARSVASQSIIAYTMSLGAENSVAYSNNSIAIPTNFTISVTTEILPVSMTKTSVDCTMYICGDSTECSNLLLQYGSFCTQLNRALTGIAVEQDKNTQEVFAQVKQIYKTPPIKDFGGFNFSQILPDPSKPSKRSFIEDLLFNKVTLADAGFIKQYGDCLGDIAARDLICAQKFNGLTVLPPLLTDEMIAQYTSALLAGTITSGWTFGAGAALQIPFAMQMAYRFNGIGVTQNVLYENQKLIANQFNSAIGKIQDSLSSTASALGKLQDVVNQNAQALNTLVKQLSSNFGAISSVLNDILSRLDKVEAEVQIDRLITGRLQSLQTYVTQQLIRAAEIRASANLAATKMSECVLGQSKRVDFCGKGYHLMSFPQSAPHGVVFLHVTYVPAQEKNFTTAPAICHDGKAHFPREGVFVSNGTHWFVTQRNFYEPQIITTDNTFVSGNCDVVIGIVNNTVYDPLQPELDSFKEELDKYFKNHTSPDVDLGDISGINASVVNIQKEIDRLNEVAKNLNESLIDLQELGKYEQYIKGGGSGGGQIYEGKLTAEGLRFGIVASRFNHALVDRLVEGAIDAIVRHGGREEDITLVRVPGSWEIPVAAGELARKEDIDAVIAIGVLIRGATPHFDYIASEVSKGLADLSLELRKPITFGVITADTLEQAIERAGTKHGNKGWEAALSAIEMANLFKSLR

SEQ ID NO: 3646 - protein, 1371 aa, Artificial Sequence
  SARS-CoV-2/Belgium/BA-02291/2020__EPI_ISL_415159 spike protein (1-1211) LumSynth construct
MFVFLVLLPLVSSQCVNLTTRTQLPPAYTNSFTRGVYYPDKVFRSSVLHSTQDLFLPFFSNVTWFHAIHVSGTNGTKRFDNPVLPFNDGVYFASTEKSNIIRGWIFGTTLDSKTQSLLIVNNATNVVIKVCEFQFCNDPFLGVYYHKNNKSWMESEFRVYSSANNCTFEYVSQPFLMDLEGKQGNFKNLREFVFKNIDGYFKIYSKHTPINLVRDLPQGFSALEPLVDLPIGINITRFQTLLALHRSYLTPGDSSSGWTAGAAAYYVGYLQPRTFLLKYNENGTITDAVDCALDPLSETKCTLKSFTVEKGIYQTSNFRVQPTESIVRFPNITNLCPFGEVFNATRFASVYAWNRKRISNCVADYSVLYNSASFSTFKCYGVSPTKLNDLCFTNVYADSFVIRGDEVRQIAPGQTGKIADYNYKLPDDFTGCVIAWNSNNLDSKVGGNYNYLYRLFRRSNLKPFERDISTEIYQAGSTPCNGVEGFNCYFPLQSYGFQPTNGVGYQPYRVVVLSFELLPAPATVCGPKKSTNLVKNKCVNFNFNGLTGTGVLTESNKKFLPFQQFGRDIADTTDAVRDPQTLEILDITPCSFGGVSVITPGTNTSNQVAVLYQGVNCTEVPVAIHADQLTPTWRVYSTGSNVFQTRAGCLIGAEHVNNSYECDIPIGAGICASYQTQTNSPRRARSVASQSIIAYTMSLGAENSVAYSNNSIAIPTNFTISVTTEILPVSMTKTSVDCTMYICGDSTECSNLLLQYGSFCTQLNRALTGIAVEQDKNTQEVFAQVKQIYKTPPIKDFGGFNFSQILPDPSKPSKRSFIEDLLFNKVTLADAGFIKQYGDCLGDIAARDLICAQKFNGLTVLPPLLTDEMIAQYTSALLAGTITSGWTFGAGAALQIPFAMQMAYRFNGIGVTQNVLYENQKLIANQFNSAIGKIQDSLSSAAPALGKLQDVVNQNAQALNTLVKQLSSNFGAISSVLNDILSRLDKVEAEVQIDRLITGRLQSLQTYVTQQLIRAAEIRASANLAATKMSECVLGQSKRVDFCGKGYHLMSFPQSAPHGVVFLHVTYVPAQEKNFTTAPAICHDGKAHFPREGVFVSNGTHWFVTQRNFYEPQIITTDNTFVSGNCDVVIGIVNNTVYDPLQPELDSFKEELDKYFKNHTSPDVDLGDISGINASVVNIQKEIDRLNEVAKNLNESLIDLQELGKYEQYIKGGGSGGGQIYEGKLTAEGLRFGIVASRFNHALVDRLVEGAIDAIVRHGGREEDITLVRVPGSWEIPVAAGELARKEDIDAVIAIGVLIRGATPHFDYIASEVSKGLADLSLELRKPITFGVITADTLEQAIERAGTKHGNKGWEAALSAIEMANLFKSLR

SEQ ID NO: 3647 - protein, 1371 aa, Artificial Sequence
  SARS-CoV-2/USA/WA8-UW5/2020__EPI_ISL_413486 spike protein (1-1211) LumSynth construct
MFVFLVLLPLVSSQCVNLTTRTQLPPAYTNSFTRGVYYPDKVFRSSVLHSTQDLFLPFFSNVTWFHAIHVSGTNGTKRFDNPVLPFNDGVYFASTEKSNIIRGWIFGTTLDSKTQSLLIVNNATNVVIKVCEFQFCNDPFLGVYYHKNNKSWMESEFRVYSSANNCTFEYVSQPFLMDLEGKQGNFKNLREFVFKNIDGYFKIYSKHTPINLVRDLPQGFSALEPLVDLPIGINITRFQTLLALHRSYLTPGDSSSGWTAGAAAYYVGYLQPRTFLLKYNENGTITDAVDCALDPLSETKCTLKSFTVEKGIYQTSNFRVQPTESIVRFPNITNLCPFGEVFNATRFASVYAWNRKRISNCVADYSVLYNSASFSTFKCYGVSPTKLNDLCFTNVYADSFVIRGDEVRQIAPGQTGKIADYNYKLPDDFTGCVIAWNSNNLDSKVGGNYNYLYRLFRKSNLKPFERDISTEIYQAGSTPCNGVEGFNCYFPLQSYGFQPTNGVGYQPYRVVVLSFELLHAPATVCGPKKSTNLVKNKCVNFNFNGLTGTGVLTESNKKFLPFQQFGRDIADTTDAVRDPQTLEILDITPCSFGGVSVITPGTNTSNQVAVLYQDVNCTEVPVAIHADQLTPTWRVYSTGSNVFQTRAGCLIGAEYVNNSYECDIPIGAGICASYQTQTNSPRRARSVASQSIIAYTMSLGAENSVAYSNNSIAIPTNFTISVTTEILPVSMTKTSVDCTMYICGDSTECSNLLLQYGSFCTQLNRALTGIAVEQDKNTQEVFAQVKQIYKTPPIKDFGGFNFSQILPDPSKPSKRSFIEDLLFNKVTLADAGFIKQYGDCLGDIAARDLICAQKFNGLTVLPPLLTDEMIAQYTSALLAGTITSGWTFGAGAALQIPFAMQMAYRFNGIGVTQNVLYENQKLIANQFNSAIGKIQDSLSSTASALGKLQDVVNQNAQALNTLVKQLSSNFGAISSVLNDILSRLDKVEAEVQIDRLITGRLQSLQTYVTQQLIRAAEIRASANLAATKMSECVLGQSKRVDFCGKGYHLMSFPQSAPHGVVFLHVTYVPAQEKNFTTAPAICHDGKAHFPREGVFVSNGTHWFVTQRNFYEPQIITTDNTFVSGNCDVVIGIVNNTVYDPLQPELDSFKEELDKYFKNHTSPDVDLGDISGINASVVNIQKEIDRLNEVAKNLNESLIDLQELGKYEQYIKGGGSGGGQIYEGKLTAEGLRFGIVASRFNHALVDRLVEGAIDAIVRHGGREEDITLVRVPGSWEIPVAAGELARKEDIDAVIAIGVLIRGATPHFDYIASEVSKGLADLSLELRKPITFGVITADTLEQAIERAGTKHGNKGWEAALSAIEMANLFKSLR

SEQ ID NO: 3648 - protein, 1371 aa, Artificial Sequence
  SARS-CoV-2/England/20102000506/2020__EPI_ISL_415147 spike protein (1-1211) LumSynth construct
MFVFLVLLPLVSSQCVNLTTRTQLPPAYTNSFTRGVYYPDKVFRSSVLHSTQDLFLPFFSNVTWFHAIHVSGTNGTKRFDNPVLPFNDGVYFASTEKSNIIRGWIFGTTLDSKTQSLLIVNNATNVVIKVCEFQFCNDPFLGVYYHKNNKSWMESEFRVYSSANNCTFEYVSQPFLMDLEGKQGNFKNLREFVFKNIDGYFKIYSKHTPINLVRDLPQGFSALEPLVDLPIGINITRFQTLLALHRSYLTPGDSSSGWTAGAAAYYVGYLQPRTFLLKYNENGTITDAVDCALDPLSETKCTLKSFTVEKGIYQTSNFRVQPTESIVRFPNITNLCPFGEVFNATRFASVYAWNRKRISNCVADYSVLYNSASFSTFKCYGVSPTKLNDLCFTNVYADSFVIRGDEVRQIAPGQTGKIADYNYKLPDDFTGCVIAWNSNNLDSKVGGNYNYLYRLFRKSNLKPFERDISTEIYQAGSTPCNGVEGFNCYFPLQSYGFQPTNGVGYQPYRVVVLSFELLHAPATVCGPKKSTNLVKNKCVNFNFNGLTGTGVLTESNKKFLPFQQFGRDIADTTDAVRDPQTLEILDITPCSFGGVSVITPGTNTSNQVAVLYQGVNCTEVPVAIHADQLTPTWRVYSTGSNVFQTRAGCLIGAEHVNNSYECDIPIGAGICASYQTQTNSPRRARSVASQSIIAYTMSLGAENSVAYSNNSIAIPTNFTISVTTEILPVSMTKTSVDCTMYICGDSTECSNLLLQYGSFCTQLNRALTGIAVEQDKNTQEVFAQVKQIYKTPPIKDFGGFNFSQILPDPSKPSKRSFIEDLLFNKVTLADAGFIKQYGYCLGDIAARDLICAQKFNGLTVLPPLLTDEMIAQYTSALLAGTITSGWTFGAGAALQIPFAMQMAYRFNGIGVTQNVLYENQKLIANQFNSAIGKIQDSLSSTASALGKLQDVVNQNAQALNTLVKQLSSNFGAISSVLNDILSRLDKVEAEVQIDRLITGRLQSLQTYVTQQLIRAAEIRASANLAATKMSECVLGQSKRVDFCGKGYHLMSFPQSAPHGVVFLHVTYVPAQEKNFTTAPAICHDGKAHFPREGVFVSNGTHWFVTQRNFYEPQIITTDNTFVSGNCDVVIGIVNNTVYDPLQPELDSFKEELDKYFKNHTSPDVDLGDISGINASVVNIQKEIDRLNEVAKNLNESLIDLQELGKYEQYIKGGGSGGGQIYEGKLTAEGLRFGIVASRFNHALVDRLVEGAIDAIVRHGGREEDITLVRVPGSWEIPVAAGELARKEDIDAVIAIGVLIRGATPHFDYIASEVSKGLADLSLELRKPITFGVITADTLEQAIERAGTKHGNKGWEAALSAIEMANLFKSLR

SEQ ID NO: 3649 - protein, 1371 aa, Artificial Sequence
  SARS-CoV-2/Belgium/VAG-03013/2020__EPI_ISL_415155 spike protein (1-1211) LumSynth construct
MFVFLVLLPLVSSQCVNLTTRTQLPPAYTNSFTRGVYYPDKVFRSSVLHSTQDLFLPFFSNVTWFHAIHVSGTNGTKRFDNPVLPFNDGVYFASTEKSNIIRGWIFGTTLDSKTQSLLIVNNATNVVIKVCEFQFCNDPFLGVYYHKNNKSWMESEFRVYSSANNCTFEYVSQPFLMDLEGKQGNFKNLREFVFKNIDGYFKIYSKHTPINLVRDLPQGFSALEPLVDLPIGINITRFQTLLALHRSYLTPGDSSSGWTAGAAAYYVGYLQPRTFLLKYNENGTITDAVDCALDPLSETKCTLKSFTVEKGIYQTSNFRVQPTESIVRFPNITNLCPFGEVFNATRFASVYAWNRKRISNCVADYSVLYNSASFSTFKCYGVSPTKLNDLCFTNVYADSFVIRGDEVRQIAPGQTGKIADYNYKLPDDFTGCVIAWNSNNLDSKVGGNYNYLYRLFRKSNLKPFERDISTEIYQAGSTPCNGVEGFNCYFPLQSYGFQPTNGVGYQPYRVVVLSFELLHAPATVCGPKKSTNLVKNKCVNFNFNGLTGTGVLTESNKKFLPFQQFGRDIADTTDAVRDPQTLEILDITPCSFGGVSVITPGTNTSNQVAVLYQGVNCTEVPVAIHADQLTPTWRVYSTGSNVFQTRAGCLIGAEHVNNSYECDIPIGAGICASYQTQTNSPRRARSVASQSIIAYTMSLGAENSVAYSNNSIAIPTNFTISVTTEILPVSMTKTSVDCTMYICGDSTECSNLLLQYGSFCTQLNRALTGIAVEQDKNTQEVFAQVKQIYKTPPIKDFGGFNFSQILPDPSKPSKRSFIEDLLFNKVTLADAGFIKQYGDCLGDIAARDLICAQKFNGLTVLPPLLTDEMIAQYTSALLAGTITSGWTFGAGAALQIPFAMQMAYRFNGIGVTQNVLYENQKLIANQFNSAIGKIQDSLSSTATALGKLQDVVNQNAQALNTLVKQLSSNFGAISSVLNDILSRLDKVEAEVQIDRLITGRLQSLQTYVTQQLIRAAEIRASANLAATKMSECVLGQSKRVDFCGKGYHLMSFPQSAPHGVVFLHVTYVPAQEKNFTTAPAICHDGKAHFPREGVFVSNGTHWFVTQRNFYEPQIITTDNTFVSGNCDVVIGIVNNTVYDPLQPELDSFKEELDKYFKNHTSPDVDLGDISGINASVVNIQKEIDRLNEVAKNLNESLIDLQELGKYEQYIKGGGSGGGQIYEGKLTAEGLRFGIVASRFNHALVDRLVEGAIDAIVRHGGREEDITLVRVPGSWEIPVAAGELARKEDIDAVIAIGVLIRGATPHFDYIASEVSKGLADLSLELRKPITFGVITADTLEQAIERAGTKHGNKGWEAALSAIEMANLFKSLR

SEQ ID NO: 3650 - protein, 1371 aa, Artificial Sequence
  SARS-CoV-2/Belgium/BC-03016/2020__EPI_ISL_415157 spike protein (1-1211) LumSynth construct
MFVFLVLLPLVSSQCVNLTTRTQLPPAYTNSFTRGVYYPDKVFRSSVLHSTQDLFLPFFSNVTWFHAIHVSGTNGTKRFDNPVLPFNDGVYFASTEKSNIIRGWIFGTTLDSKTQSLLIVNNATNVVIKVCEFQFCNDPFLGVYYHKNNKSWMESEFRVYSSANNCTFEYVSQPFLMDLEGKQGNFKNLREFVFKNIDGYFKIYSKHTPINLVRDLPQGFSALEPLVDLPIGINITRFQTLLALHRSYLTPGDSSSGWTAGAAAYYVGYLQPRTFLLKYNENGTITDAVDCALDPLSETKCTLKSFTVEKGIYQTSNFRVQPTESIVRFPNITNLCPFGEVFNATRFASVYAWNRKRISNCVADYSVLYNSASFSTFKCYGVSPTKLNDLCFTNVYADSFVIRGDEVRQIAPGQTGKIADYNYKLPDDFTGCVIAWNSNNLDSKVGGNYNYLYRLFRKSNLKPFERDISTEIYQAGSTPCNGVEGFNCYFPLQSYGFQPTNGVGYQPYRVVVLSFELLHAPATVCGPKKSTNLVKNKCVNFNFNGLTGTGVLTESNKKFLPFQQFGRDIADTTDAVRDPQTLEILDITPCSFGGVSVITPGTNTSNQVAVLYQGVNCTEVPVAIHADQLTPTWRVYSTGSNVFQTRAGCLIGAEHVNNSYECDIPIGAGICASYQTQTNSPRRARSVASQSIIAYTMSLGAENSVAYSNNSIAIPTNFTISVTTEILPVSMTKTSVDCTMYICGDSTECSNLLLQYGSFCTQLNRALTGIAVEQDKNTQEVFAQVKQIYKTPPIKDFGGFNFSQILPDPSKPSKRSFIEDLLFNKVTLADAGFIKQYGDCLGDIAARDLICAQKFNGLTVLPPLLTDEMIAQYTSALLAGTITSGWTFGAGAALQIPFAMQMAYRFNGIGVTQNVLYENQKLIANQFNSAIGKIQDSLSSTAPALGKLQDVVNQNAQALNTLVKQLSSNFGAISSVLNDILSRLDKVEAEVQIDRLITGRLQSLQTYVTQQLIRAAEIRASANLAATKMSECVLGQSKRVDFCGKGYHLMSFPQSAPHGVVFLHVTYVPAQEKNFTTAPAICHDGKAHFPREGVFVSNGTHWFVTQRNFYEPQIITTDNTFVSGNCDVVIGIVNNTVYDPLQPELDSFKEELDKYFKNHTSPDVDLGDISGINASVVNIQKEIDRLNEVAKNLNESLIDLQELGKYEQYIKGGGSGGGQIYEGKLTAEGLRFGIVASRFNHALVDRLVEGAIDAIVRHGGREEDITLVRVPGSWEIPVAAGELARKEDIDAVIAIGVLIRGATPHFDYIASEVSKGLADLSLELRKPITFGVITADTLEQAIERAGTKHGNKGWEAALSAIEMANLFKSLR

SEQ ID NO: 3651 - protein, 1371 aa, Artificial Sequence
  SARS-CoV-2/Germany/BavPat3/2020__EPI_ISL_414521 spike protein (1-1211) LumSynth construct
MFVFLVLLPLVSSQCVNLTTRTQLPPAYTNSFTRGVYYPDKVFRSSVLHSTQDLFLPFFSNVTWFHAIHVSGTNGTKRFDNPVLPFNDGVYFASTEKSNIIRGWIFGTTLDSKTQSLLIVNNATNVVIKVCEFQFCNDPFLGVYYHKNNKSWMESEFRVYSSANNCTFEYVSQPFLMDLEGKQGNFKNLREFVFKNIDGYFKIYSKHTPINLVRDLPQGFSALEPLVDLPIGINITRFQTLLALHRSYLTPGDSSSGWTAGAAAYYVGYLQPRTFLLKYNENGTITDAVDCALDPLSETKCTLKSFTVEKGIYQTSNFRVQPTESIVRFPNITNLCPFGEVFNATRFASVYAWNRKRISNCVADYSVLYNSASFSTFKCYGVSPTKLNDLCFTNVYADSFVIRGDEVRQIAPGQTGKIADYNYKLPDDFTGCVIAWNSNNLDSKVGGNYNYLYRLFRKSNLKPFERDISTEIYQAGSTPCNGVEGFNCYFPLQSYGFQPTNGVGYQPYRVVVLSFELLHAPATVCGPKKSTNLVKNKCVNFNFNGLTGTGVLTESNKKFLPFQQFGRDIADTTDAVRDPQTLEILDITPCSFGGVSVITPGTNTSNQVAVLYQDVNCTEVPVAIHADQLTPTWRVYSTGSNVFQTRAGCLIGAEHVNNSYECDIPIGAGICASYQTQTNSPRRARSVASQSIIAYTMSLGAENSVAYSNNSIAIPTNFTISVTTEILPVSMTKTSVDCTMYICGDSTECSNLLLQYGSFCTQLNRALTGIAVEQDKNTQQVFAQVKQIYKTPPIKDFGGFNFSQILPDPSKPSKRSFIEDLLFNKVTLADAGFIKQYGDCLGDIAARDLICAQKFNGLTVLPPLLTDEMIAQYTSALLAGTITSGWTFGAGAALQIPFAMQMAYRFNGIGVTQNVLYENQKLIANQFNSAIGKIQDSLSSTASALGKLQDVVNQNAQALNTLVKQLSSNFGAISSVLNDILSRLDKVEAEVQIDRLITGRLQSLQTYVTQQLIRAAEIRASANLAATKMSECVLGQSKRVDFCGKGYHLMSFPQSAPHGVVFLHVTYVPAQEKNFTTAPAICHDGKAHFPREGVFVSNGTHWFVTQRNFYEPQIITTDNTFVSGNCDVVIGIVNNTVYDPLQPELDSFKEELDKYFKNHTSPDVDLGDISGINASVVNIQKEIDRLNEVAKNLNESLIDLQELGKYEQYIKGGGSGGGQIYEGKLTAEGLRFGIVASRFNHALVDRLVEGAIDAIVRHGGREEDITLVRVPGSWEIPVAAGELARKEDIDAVIAIGVLIRGATPHFDYIASEVSKGLADLSLELRKPITFGVITADTLEQAIERAGTKHGNKGWEAALSAIEMANLFKSLR

SEQ ID NO: 3652 - protein, 1371 aa, Artificial Sequence
  SARS-CoV-2/France/HF1805/2020__EPI_ISL_414628 spike protein (1-1211) LumSynth construct
MFVFLVLLPLVSSQCVNLTTRTQLPPAYTNSFTRGVYYPDKVFRSSVLHSTQDLFLPFFSNVTWFHAIHVSGTNGTKRFDNPVLPFNDGVYFASTEKSNIIRGWIFGTTLDSKTQSLLIVNNATNVVIKVCEFQFCNDPFLGVYYHKNNKSWMESEFRVYSSANNCTFEYVSQPFLMDLEGKQGNFKNLREFVFKNIDGYFKIYSKHTPINLVRDLPQGFSALEPLVDLPIGINITRFQTLLALHRSYLTPGDSSSGWTAGAAAYYVGYLQPRTFLLKYNENGTITDAVDCALDPLSETKCTLKSFTVEKGIYQTSNFRVQPTESIVRFPNITNLCPFGEVFNATRFASVYAWNRKRISNCVADYSVLYNSASFSTFKCYGVSPTKLNDLCFTNVYADSFVIRGDEVRQIAPGQTGKIADYNYKLPDDFTGCVIAWNSNNLDSKVGGNYNYLYRLFRKSNLKPFERDISTEIYQAGSTPCNGVEGFNCYFPLQSYGFQPTNGVGYQPYRVVVLSFELLHAPATVCGPKKSTNLVKNKCVNFNFNGLTGTGVLTESNKKFLPFQQFGRDIADTTDAVRDPQTLEILDITPCSFGGVSVITPGTNTSNQVAVLYQGVNCTEVPVAIHADQLTPTWRVYSTGSNVFQTRAGCLIGAEHVNNSYECDIPIGAGICASYQTQTNSPRRARSVASQSIIAYTMSLGAENSVAYSNNSIAIPTNFTISVTTEILPVSMTKTSVDCTMYICGDSTECSNLLLQYGSFCTQLNRALTGIAVEQDKNTQEVFAQVKQIYKTPPIKDFGGFNFSQILPDPSKPSKRSFIEDLLFNKVTLADAGFIKQYGDCLGDIAARDLICAQKFNGLTVLPPLLTDEMIAQYTSALLAGTITSGWTFGAGAALQIPFAMQMAYRFNGIGVTQNVLYENQKLIANQFNSAIGKIQDSLSSTASALGKLQDVVNQNAQALNTLVKQLSSNFGAISSVLNDILSRLDKVEAEVQIDRLITGRLQSLQTYVTQQLIRAAEIRASANLAATKMSECVLGQSKRVDFCGKGYHLMSFPQSAPHGVVFLHVTYVPAQEKNFTTAPAICHDGKAHFPREGVFVSNGTHWFVTQRNFYEPQIITTDNTFVSGNCDVVIGVVNNTVYDPLQPELDSFKEELDKYFKNHTSPDVDLGDISGINASVVNIQKEIDRLNEVAKNLNESLIDLQELGKYEQYIKGGGSGGGQIYEGKLTAEGLRFGIVASRFNHALVDRLVEGAIDAIVRHGGREEDITLVRVPGSWEIPVAAGELARKEDIDAVIAIGVLIRGATPHFDYIASEVSKGLADLSLELRKPITFGVITADTLEQAIERAGTKHGNKGWEAALSAIEMANLFKSLR

SEQ ID NO: 3653 - protein, 1371 aa, Artificial Sequence
  SARS-CoV-2/Netherlands/ZuidHolland_9/2020__EPI_ISL_414445 spike protein (1-1211) LumSynth construct
MFVFLVLLPLVSSQCVNLTTRTQLPPAYTNSFTRGVYYPDKVFRSSVLHSTQDLFLPFFSNVTWFHAIHVSGTNGTKRFDNPVLPFNDGVYFASTEKSNIIRGWIFGTTLDSKTQSLLIVNNATNVVIKVCEFQFCNDPFLGVYYHKNNKSWMESEFRVYSSANNCTFEYVSQPFLMDLEGKQGNFKNLREFVFKNIDGYFKIYSKHTPINLVRDLPQGFSALEPLVDLPIGINITRFQTLLALHRSYLTPGDSSSGWTAGAAAYYVGYLQPRTFLLKYNENGTITDAVDCALDPLSETKCTLKSFTVEKGIYQTSNFRVQPTESIVRFPNITNLCPFGEVFNATRFASVYAWNRKRISNCVADYSVLYNSASFSTFKCYGVSPTKLNDLCFTNVYADSFVIRGDEVRQIAPGQTGKIADYNYKLPDDFTGCVIAWNSNNLDSKVGGNYNYLYRLFRKSNLKPFERDISTEIYQAGSTPCNGVEGFNCYFPLQSYGFQPTNGVGYQPYRVVVLSFELLHAPATVCGPKKSTNLVKNKCVNFNFNGLTGTGVLTESNKKFLPFQQFGRDIADTTDAVRDPQTLEILDITPCSFGGVSVITPGTNTSNQVAVLYQGVNCTEVPVAIHADQLTPTWRVYSTGSNVFQTRAGCLIGAEHVNNSYECDIPIGAGICASYQTQTNSPRRARSVASQSIIAYTMSLGAENSVAYSNNSIAIPTNFTISVTTEILPVSMTKTSVDCTMYICGDSTECSNLLLQYGSFCTQLNRALTGIAVEQDKNTQEVFAQVKQIYKTPPIKDFGGFNFSQILPDPSKPSKRSFIEDLLFNKVTLADAGFIKQYGDCLGDIAARDLICVQKFNGLTVLPPLLTDEMIAQYTSALLAGTITSGWTFGAGAALQIPFAMQMAYRFNGIGVTQNVLYENQKLIANQFNSAIGKIQDSLSSTASALGKLQDVVNQNAQALNTLVKQLSSNFGAISSVLNDILSRLDKVEAEVQIDRLITGRLQSLQTYVTQQLIRAAEIRASANLAATKMSECVLGQSKRVDFCGKGYHLMSFPQSAPHGVVFLHVTYVPAQEKNFTTAPAICHDGKAHFPREGVFVSNGTHWFVTQRNFYEPQIITTDNTFVSGNCDVVIGIVNNTVYDPLQPELDSFKEELDKYFKNHTSPDVDLGDISGINASVVNIQKEIDRLNEVAKNLNESLIDLQELGKYEQYIKGGGSGGGQIYEGKLTAEGLRFGIVASRFNHALVDRLVEGAIDAIVRHGGREEDITLVRVPGSWEIPVAAGELARKEDIDAVIAIGVLIRGATPHFDYIASEVSKGLADLSLELRKPITFGVITADTLEQAIERAGTKHGNKGWEAALSAIEMANLFKSLR

SEQ ID NO: 3654 - protein, 1371 aa, Artificial Sequence
  SARS-CoV-2/Finland/FIN03032020A/2020__EPI_ISL_413602 spike protein (1-1211) LumSynth construct
MFVFLVLLPLVSSQCVNLTTRTQLPPAYTNSFTRGVYYPDKVFRSSVLHSTQDLFLPFFSNVTWFHAIHVSGTNGTKRFDNPVLPFNDGVYFASTEKSNIIRGWIFGTTLDSKTQSLLIVNNATNVVIKVCEFQFCNDPFLGVYYHKNNKSWMESEFRVYSSANNCTFEYVSQPFLMDLEGKQGNFKNLREFVFKNIDGYFKIYSKHTPINLVRDLPQGFSALEPLVDLPIGINITRFQTLLALHRSYLTPGDSSSGWTAGAAAYYVGYLQPRTFLLKYNENGTITDAVDCALDPLSETKCTLKSFTVEKGIYQTSNFRVQPTESIVRFPNITNLCPFGEVFNATRFASVYAWNRKRISNCVADYSVLYNSASFSTFKCYGVSPTKLNDLCFTNVYADSFVIRGDEVRQIAPGQTGKIADYNYKLPDDFTGCVISWNSNNLDSKVGGNYNYLYRLFRKSNLKPFERDISTEIYQAGSTPCNGVEGFNCYFPLQSYGFQPTNGVGYQPYRVVVLSFELLHAPATVCGPKKSTNLVKNKCVNFNFNGLTGTGVLTESNKKFLPFQQFGRDIADTTDAVRDPQTLEILDITPCSFGGVSVITPGTNTSNQVAVLYQGVNCTEVPVAIHADQLTPTWRVYSTGSNVFQTRAGCLIGAEHVNNSYECDIPIGAGICASYQTQTNSPRRARSVASQSIIAYTMSLGAENSVAYSNNSIAIPTNFTISVTTEILPVSMTKTSVDCTMYICGDSTECSNLLLQYGSFCTQLNRALTGIAVEQDKNTQEVFAQVKQIYKTPPIKDFGGFNFSQILPDPSKPSKRSFIEDLLFNKVTLADAGFIKQYGDCLGDIAARDLICAQKFNGLTVLPPLLTDEMIAQYTSALLAGTITSGWTFGAGAALQIPFAMQMAYRFNGIGVTQNVLYENQKLIANQFNSAIGKIQDSLSSTASALGKLQDVVNQNAQALNTLVKQLSSNFGAISSVLNDILSRLDKVEAEVQIDRLITGRLQSLQTYVTQQLIRAAEIRASANLAATKMSECVLGQSKRVDFCGKGYHLMSFPQSAPHGVVFLHVTYVPAQEKNFTTAPAICHDGKAHFPREGVFVSNGTHWFVTQRNFYEPQIITTDNTFVSGNCDVVIGIVNNTVYDPLQPELDSFKEELDKYFKNHTSPDVDLGDISGINASVVNIQKEIDRLNEVAKNLNESLIDLQELGKYEQYIKGGGSGGGQIYEGKLTAEGLRFGIVASRFNHALVDRLVEGAIDAIVRHGGREEDITLVRVPGSWEIPVAAGELARKEDIDAVIAIGVLIRGATPHFDYIASEVSKGLADLSLELRKPITFGVITADTLEQAIERAGTKHGNKGWEAALSAIEMANLFKSLR

SEQ ID NO: 3655 - protein, 1371 aa, Artificial Sequence
  SARS-CoV-2/France/GE1977/2020__EPI_ISL_414632 spike protein (1-1211) LumSynth construct
MFVFLVLLPLVSSQCVNLTTRTQLPPAYTNSFTRGVYYPDKVFRSSVLHSTQDLFLPFFSNVTWFHAIHVSGTNGTKRFDNPVLPFNDGVYFASTEKSNIIRGWIFGTTLDSKTQSLLIVNNATNVVIKVCEFQFCNDPFLGVYYHKNNKSWMESEFRVYSSANNCTFEYVSQPFLMDLEGKQGNFKNLREFVFKNIDGYFKIYSKHTPINLVRDLPQGFSALEPLVDLPIGINITRFQTLLALHRSYLTPGDSSSGWTAGAAAYYVGYLQPRTFLLKYNENGTITDAVDCALDPLSETKCTLKSFTVEKGIYQTSNFRVQPTESIVRFPNITNLCPFGEVFNATRFASVYAWNRKRISNCVADYSVLYNSASFSTFKCYGVSPTKLNDLCFTNVYADSFVIRGDEVRQIAPGQTGKIADYNYKLPDDFTGCVIAWNSNNLDSKVGGNYNYLYRLFRKSNLKPFERDISTEIYQAGSTPCNGVEGFNCYFPLQSYGFQPTNGVGYQPYRVVVLSFELLHAPATVCGPKKSTNLVKNKCVNFNFNGLTGTGVLTESNKKFLPFQQFGRDIADTTDAVRDPQTLEILDITPCSFGGVSVITPGTNTSNQVAVLYQGVNCTEVPVAIHADQLTPTWRVYSTGSNVFQTRAGCLIGAEHVNNSYECDIPIGAGICASYQTQTNSPRRARSVASQSIIAYTMSLGAENSVAYSNNSIAIPTNFTISVTTEILPVSMTKTSVDCTMYICGDSTECSNLLLQYGSFCTQLNRALTGIAVEQDKNTQEVFAQVKQIYKTPPIKDFGGFNFSQILPDPSKPSKRSFIEDLLFNKVTLADAGFIKQYGDCLGDIAARDLICAQKFNGLTVLPPLLTDEMIAQYTSALLAGTITSGWTFGAGAALQIPFAMQMAYRFNGIGVTQNVLYENQKLIANQFNSAIGKIQDSLFSTASALGKLQDVVNQNAQALNTLVKQLSSNFGAISSVLNDILSRLDKVEAEVQIDRLITGRLQSLQTYVTQQLIRAAEIRASANLAATKMSECVLGQSKRVDFCGKGYHLMSFPQSAPHGVVFLHVTYVPAQEKNFTTAPAICHDGKAHFPREGVFVSNGTHWFVTQRNFYEPQIITTDNTFVSGNCDVVIGIVNNTVYDPLQPELDSFKEELDKYFKNHTSPDVDLGDISGINASVVNIQKEIDRLNEVAKNLNESLIDLQELGKYEQYIKGGGSGGGQIYEGKLTAEGLRFGIVASRFNHALVDRLVEGAIDAIVRHGGREEDITLVRVPGSWEIPVAAGELARKEDIDAVIAIGVLIRGATPHFDYIASEVSKGLADLSLELRKPITFGVITADTLEQAIERAGTKHGNKGWEAALSAIEMANLFKSLR

SEQ ID NO: 3656 - protein, 1371 aa, Artificial Sequence
  SARS-CoV-2/Finland/FIN-313/2020__EPI_ISL_414641 spike protein (1-1211) LumSynth construct
MFVFLVLLPLVSSQCVNLTTRTQLPPAYTNSFTRGVYYPDKVFRSSVLHSTQDLFLPFFSNVTWFHAIHVSGTNGTKRFDNPVLPFNDGVYFASTEKSNIIRGWIFGTTLDSKTQSLLIVNNATNVVIKVCEFQFCNDPFLGVYYHKNNKSWMESEFRVYSSANNCTFEYVSQPFLMDLEGKQGNFKNLREFVFKNIDGYFKIYSKHTPINLVRDLPQGFSALEPLVDLPIGINITRFKTLLALHRSYLTPGDSSSGWTAGAAAYYVGYLQPRTFLLKYNENGTITDAVDCALDPLSETKCTLKSFTVEKGIYQTSNFRVQPTESIVRFPNITNLCPFGEVFNATRFASVYAWNRKRISNCVADYSVLYNSASFSTFKCYGVSPTKLNDLCFTNVYADSFVIRGDEVRQIAPGQTGKIADYNYKLPDDFTGCVIAWNSNNLDSKVGGNYNYLYRLFRKSNLKPFERDISTEIYQAGSTPCNGVEGFNCYFPLQSYGFQPTNGVGYQPYRVVVLSFELLHAPATVCGPKKSTNLVKNKCVNFNFNGLTGTGVLTESNKKFLPFQQFGRDIADTTDAVRDPQTLEILDITPCSFGGVSVITPGTNTSNQVAVLYQGVNCTEVPVAIHADQLTPTWRVYSTGSNVFQTRAGCLIGAEHVNNSYECDIPIGAGICASYQTQTNSPRRARSVASQSIIAYTMSLGAENSVAYSNNSIAIPTNFTISVTTEILPVSMTKTSVDCTMYICGDSTECSNLLLQYGSFCTQLNRALTGIAVEQDKNTQEVFAQVKQIYKTPPIKDFGGFNFSQILPDPSKPSKRSFIEDLLFNKVTLADAGFIKQYGDCLGDIAARDLICAQKFNGLTVLPPLLTDEMIAQYTSALLAGTITSGWTFGAGAALQIPFAMQMAYRFNGIGVTQNVLYENQKLIANQFNSAIGKIQDSLSSTASALGKLQDVVNQNAQALNTLVKQLSSNFGAISSVLNDILSRLDKVEAEVQIDRLITGRLQSLQTYVTQQLIRAAEIRASANLAATKMSECVLGQSKRVDFCGKGYHLMSFPQSAPHGVVFLHVTYVPAQEKNFTTAPAICHDGKAHFPREGVFVSNGTHWFVTQRNFYEPQIITTDNTFVSGNCDVVIGIVNNTVYDPLQPELDSFKEELDKYFKNHTSPDVDLGDISGINASVVNIQKEIDRLNEVAKNLNESLIDLQELGKYEQYIKGGGSGGGQIYEGKLTAEGLRFGIVASRFNHALVDRLVEGAIDAIVRHGGREEDITLVRVPGSWEIPVAAGELARKEDIDAVIAIGVLIRGATPHFDYIASEVSKGLADLSLELRKPITFGVITADTLEQAIERAGTKHGNKGWEAALSAIEMANLFKSLR

SEQ ID NO: 3657 - protein, 1371 aa, Artificial Sequence
  SARS-CoV-2/Netherlands/ZuidHolland_2/2020__EPI_ISL_414556 spike protein (1-1211) LumSynth construct
MFVFLVLLPLVSSQCVNLTTRTQLPPAYTNSFTRGVYYPDKVFRSSVLHSTQDLFLPFFSNVTWFHAIHVSGTNGTKRFDNPVLPFNDGVYFASTEKSNIIRGWIFGTTLDSKTQSLLIVNNATNVVIKVCEFQFCNDPFLGVYYHKNNKSWMESEFRVYSSANNCTFEYVSQPFLMDLEGKQGNFKNLREFVFKNIDGYFKIYSKHTPINLVRDLPQGFSALEPLVDLPIGINITRFQTLLALHRSYLTPGDSSSGWTAGAAAYYVGYLQPRTFLLKYNENGTITDAVDCALDPLSETKCTLKSFTVEKGIYQTSNFRVQPTESIVRFPNITNLCPFGEVFNATRFASVYAWNRKRISNCVADYSVLYNSASFSTFKCYGVSPTKLNDLCFTNVYADSFVIRGDEVRQIAPGQTGKIADYNYKLPDDFTGCVIAWNSNNLDSKVGGNYNYLYRLFRKSNLKPFERDISTEIYQAGSTPCNGVEGFNCYFPLQSYGFQPTNGVGYQPYRVVVLSFELLHAPATVCGPKKSTNLVKNKCVNFNFNGLTGTGVLTESNKKFLPFQQFGRDIADTTDAVRDPQTLEILDITPCSFGGVSVITPGTNTSNQVAVLYQGVNCTEVPVAIHADQLTPTWRVYSTGSNVFQTRAGCLIGAEHVNNSYECDIPIGAGICASYQTQTNSPRRARSVASQSIIAYTMSLGAENSVAYSNNSIAIPTNFTISVTTEILPVSMTKTSVDCTMYICGDSTECSNLLLQYGSFCTQLNRALTGIALEQDKNTQEVFAQVKQIYKTPPIKDFGGFNFSQILPDPSKPSKRSFIEDLLFNKVTLADAGFIKQYGDCLGDIAARDLICAQKFNGLTVLPPLLTDEMIAQYTSALLAGTITSGWTFGAGAALQIPFAMQMAYRFNGIGVTQNVLYENQKLIANQFNSAIGKIQDSLSSTASALGKLQDVVNQNAQALNTLVKQLSSNFGAISSVLNDILSRLDKVEAEVQIDRLITGRLQSLQTYVTQQLIRAAEIRASANLAATKMSECVLGQSKRVDFCGKGYHLMSFPQSAPHGVVFLHVTYVPAQEKNFTTAPAICHDGKAHFPREGVFVSNGTHWFVTQRNFYEPQIITTDNTFVSGNCDVVIGIVNNTVYDPLQPELDSFKEELDKYFKNHTSPDVDLGDISGINASVVNIQKEIDRLNEVAKNLNESLIDLQELGKYEQYIKGGGSGGGQIYEGKLTAEGLRFGIVASRFNHALVDRLVEGAIDAIVRHGGREEDITLVRVPGSWEIPVAAGELARKEDIDAVIAIGVLIRGATPHFDYIASEVSKGLADLSLELRKPITFGVITADTLEQAIERAGTKHGNKGWEAALSAIEMANLFKSLR

SEQ ID NO: 3658 - protein, 1371 aa, Artificial Sequence
  SARS-CoV-2/USA/WA-UW31/2020__EPI_ISL_414618 spike protein (1-1211) LumSynth construct
MFVFLVLLPLVSSQCVNLTTRTQLPPAYTNSFTRGVYYPDKVFRSSVLHSTQDLFLPFFSNVTWFHAIHVSGTNGTKRFDNPVLPFNDGVYFASTEKSNIIRGWIFGTTLDSKTQSLLIVNNATNVVIKVCEFQFCNDPFLGVYYHKNNKSWMESEFRVYSSANNCTFEYVSQPFLMDLEGKQGNFKNLREFVFKNIDGYFKIYSKHTPINLVRDLPQGFSALEPLVDLPIGINITRFQTLLALHRSYLTPGDSSSGWTAGAAAYYVGYLQPRTFLLKYNENGTITDAVDCALDPLSETKCTLKSFTVEKGIYQTSNFRVQPTESIVRFPNITNLCPFGEVFNATRFASVYAWNRKRISNCVADYSVLYNSASFSTFKCYGVSPTKLNDLCFTNVYADSFVIRGDEVRQIAPGQTGKIADYNYKLPDDFTGCVIAWNSNNLDSKVGGNYNYLYRLFRKSNLKPFERDISTEIYQAGSTPCNGAEGFNCYFPLQSYGFQPTNGVGYQPYRVVVLSFELLHAPATVCGPKKSTNLVKNKCVNFNFNGLTGTGVLTESNKKFLPFQQFGRDIADTTDAVRDPQTLEILDITPCSFGGVSVITPGTNTSNQVAVLYQDVNCTEVPVAIHADQLTPTWRVYSTGSNVFQTRAGCLIGAEHVNNSYECDIPIGAGICASYQTQTNSPRRARSVASQSIIAYTMSLGAENSVAYSNNSIAIPTNFTISVTTEILPVSMTKTSVDCTMYICGDSTECSNLLLQYGSFCTQLNRALTGIAVEQDKNTQEVFAQVKQIYKTPPIKDFGGFNFSQILPDPSKPSKRSFIEDLLFNKVTLADAGFIKQYGDCLGDIAARDLICAQKFNGLTVLPPLLTDEMIAQYTSALLAGTITSGWTFGAGAALQIPFAMQMAYRFNGIGVTQNVLYENQKLIANQFNSAIGKIQDSLSSTASALGKLQDVVNQNAQALNTLVKQLSSNFGAISSVLNDILSRLDKVEAEVQIDRLITGRLQSLQTYVTQQLIRAAEIRASANLAATKMSECVLGQSKRVDFCGKGYHLMSFPQSAPHGVVFLHVTYVPAQEKNFTTAPAICHDGKAHFPREGVFVSNGTHWFVTQRNFYEPQIITTDNTFVSGNCDVVIGIVNNTVYDPLQPELDSFKEELDKYFKNHTSPDVDLGDISGINASVVNIQKEIDRLNEVAKNLNESLIDLQELGKYEQYIKGGGSGGGQIYEGKLTAEGLRFGIVASRFNHALVDRLVEGAIDAIVRHGGREEDITLVRVPGSWEIPVAAGELARKEDIDAVIAIGVLIRGATPHFDYIASEVSKGLADLSLELRKPITFGVITADTLEQAIERAGTKHGNKGWEAALSAIEMANLFKSLR

SEQ ID NO: 3659 - protein, 1371 aa, Artificial Sequence
  SARS-CoV-2/South Korea/SNU01/2020__EPI_ISL_411929 spike protein (1-1211) LumSynth construct
MFVFLVLLPLVSSQCVNLTTRTQLPPAYTNSFTRGVYYPDKVFRSSVLHSTQDLFLPFFSNVTWFHAIHVSGTNGTKRFDNPVLPFNDGVYFASTEKSNIIRGWIFGTTLDSKTQSLLIVNNATNVVIKVCEFQFCNDPFLGVYYHKNNKSWMESEFRVYSSANNCTFEYVSQPFLMDLEGKQGNFKNLREFVFKNIDGYFKIYSKHTPINLVRDLPQGFWALEPLVDLPIGINITRFQTLLALHRSYLTPGDSSSGWTAGAAAYYVGYLQPRTFLLKYNENGTITDAVDCALDPLSETKCTLKSFTVEKGIYQTSNFRVQPTESIVRFPNITNLCPFGEVFNATRFASVYAWNRKRISNCVADYSVLYNSASFSTFKCYGVSPTKLNDLCFTNVYADSFVIRGDEVRQIAPGQTGKIADYNYKLPDDFTGCVIAWNSNNLDSKVGGNYNYLYRLFRKSNLKPFERDISTEIYQAGSTPCNGVEGFNCYFPLQSYGFQPTNGVGYQPYRVVVLSFELLHAPATVCGPKKSTNLVKNKCVNFNFNGLTGTGVLTESNKKFLPFQQFGRDIADTTDAVRDPQTLEILDITPCSFGGVSVITPGTNTSNQVAVLYQDVNCTEVPVAIHADQLTPTWRVYSTGSNVFQTRAGCLIGAEHVNNSYECDIPIGAGICASYQTQTNSPRRARSVASQSIIAYTMSLGAENSVAYSNNSIAIPTNFTISVTTEILPVSMTKTSVDCTMYICGDSTECSNLLLQYGSFCTQLNRALTGIAVEQDKNTQEVFAQVKQIYKTPPIKDFGGFNFSQILPDPSKPSKRSFIEDLLFNKVTLADAGFIKQYGDCLGDIAARDLICAQKFNGLTVLPPLLTDEMIAQYTSALLAGTITSGWTFGAGAALQIPFAMQMAYRFNGIGVTQNVLYENQKLIANQFNSAIGKIQDSLSSTASALGKLQDVVNQNAQALNTLVKQLSSNFGAISSVLNDILSRLDKVEAEVQIDRLITGRLQSLQTYVTQQLIRAAEIRASANLAATKMSECVLGQSKRVDFCGKGYHLMSFPQSAPHGVVFLHVTYVPAQEKNFTTAPAICHDGKAHFPREGVFVSNGTHWFVTQRNFYEPQIITTDNTFVSGNCDVVIGIVNNTVYDPLQPELDSFKEELDKYFKNHTSPDVDLGDISGINASVVNIQKEIDRLNEVAKNLNESLIDLQELGKYEQYIKGGGSGGGQIYEGKLTAEGLRFGIVASRFNHALVDRLVEGAIDAIVRHGGREEDITLVRVPGSWEIPVAAGELARKEDIDAVIAIGVLIRGATPHFDYIASEVSKGLADLSLELRKPITFGVITADTLEQAIERAGTKHGNKGWEAALSAIEMANLFKSLR

SEQ ID NO: 3660 - protein, 1371 aa, Artificial Sequence
  SARS-CoV-2/China/WF0004/2020__EPI_ISL_413694 spike protein (1-1211) LumSynth construct
MFVFLVLLPLVSSQCVNLTTRTQLPPAYTNSFTRGVYYPDKVFRSSVLHSTQDLFLPFFSNVTWFHAIHVSGTNGTKRFDNPVLPFNDGVYFASTEKSNIIRGWIFGTTLDSKTQSLLIVNNATNVVIKVCEFQFCNDPFLGVYYHKNNKSWTESEFRVYSSANNCTFEYVSQPFLMDLEGKQGNFKNLREFVFKNIDGYFKIYSKHTPINLVRDLPQGFSALEPLVDLPIGINITRFQTLLALHRSYLTPGDSSSGWTAGAAAYYVGYLQPRTFLLKYNENGTITDAVDCALDPLSETKCTLKSFTVEKGIYQTSNFRVQPTESIVRFPNITNLCPFGEVFNATRFASVYAWNRKRISNCVADYSVLYNSASFSTFKCYGVSPTKLNDLCFTNVYADSFVIRGDEVRQIAPGQTGKIADYNYKLPDDFTGCVIAWNSNNLDSKVGGNYNYLYRLFRKSNLKPFERDISTEIYQAGSTPCNGVEGFNCYFPLQSYGFQPTNGVGYQPYRVVVLSFELLHAPATVCGPKKSTNLVKNKCVNFNFNGLTGTGVLTESNKKFLPFQQFGRDIADTTDAVRDPQTLEILDITPCSFGGVSVITPGTNTSNQVAVLYQDVNCTEVPVAIHADQLTPTWRVYSTGSNVFQTRAGCLIGAEHVNNSYECDIPIGAGICASYQTQTNSPRRARSVASQSIIAYTMSLGAENSVAYSNNSIAIPTNFTISVTTEILPVSMTKTSVDCTMYICGDSTECSNLLLQYGSFCTQLNRALTGIAVEQDKNTQEVFAQVKQIYKTPPIKDFGGFNFSQILPDPSKPSKRSFIEDLLFNKVTLADAGFIKQYGDCLGDIAARDLICAQKFNGLTVLPPLLTDEMIAQYTSALLAGTITSGWTFGAGAALQIPFAMQMAYRFNGIGVTQNVLYENQKLIANQFNSAIGKIQDSLSSTASALGKLQDVVNQNAQALNTLVKQLSSNFGAISSVLNDILSRLDKVEAEVQIDRLITGRLQSLQTYVTQQLIRAAEIRASANLAATKMSECVLGQSKRFDFCGKGYHLMSFPQSAPHGVVFLHVTYVPAQEKNFTTAPAICHDGKAHFPREGVFVSNGTHWFVTQRNFYEPQIITTDNTFVSGNCDVVIGIVNNTVYDPLQPELDSFKEELDKYFKNHTSPDVDLGDISGINASVVNIQKEIDRLNEVAKNLNESLIDLQELGKYEQYIKGGGSGGGQIYEGKLTAEGLRFGIVASRFNHALVDRLVEGAIDAIVRHGGREEDITLVRVPGSWEIPVAAGELARKEDIDAVIAIGVLIRGATPHFDYIASEVSKGLADLSLELRKPITFGVITADTLEQAIERAGTKHGNKGWEAALSAIEMANLFKSLR

SEQ ID NO: 3661 - protein, 1371 aa, Artificial Sequence
  SARS-CoV-2/China/WF0028/2020__EPI_ISL_413791 spike protein (1-1211) LumSynth construct
MFVFLVLLPLVSSQCVNLTTRTQLPPAYTNSFTRGVYYPDKVFRSSVLHSTQDLFLPFFSNVTWFHAIHVSGTNGTKRFDNPVLPFNDGVYFASTEKSNIIRGWIFGTTLDSKTQSLLIVNNATNVVIKVCEFQFCNDPFLGVYYHKNNKSWMESEFRVYSSANNCTFEYVSQPFLMDLEGKQGNFKNLREFVFKNIDGYFKIYSKHTPINLVRDLPQGFSALEPLVDLPIGINITRFQTLLALHRSYLTPGDSSSGWTAGAAAYYVGYLQPRTFLLKYNENGTITDAVDCALDPLSETKCTLKSFTVEKGIYQTSNFRVQPTESIVRFPNITNLCPFGEVFNATRFASVYAWNRKRISNCVADYSVLYNSASFSTFKCYGVSPTKLNDLCFTNVYADSFVIRGDEVRQIAPGQTGKIADYNYKLPDDFTGCVIAWNSNNLDSKVGGNYNYLYRLFRKSNLKPFERDISTEIYQAGSTPCNGVEGFNCYFPLQSYGFQPTNGVGYQPYRVVVLSFELLHAPATVCGPKKSTNLVKNKCVNFNFNGLTGTGVLTESNKKFLPFQQFGRDIADTTDAVRDPQTLEILDITPCSFGGVSVITPGTNTSNQVAVLYQDVNCTEVPVAIHADQLTPTWRVYSTGSNVFQTRAGCLIGAEHVNNSYECDIPIGAGICASYQTQTNSPRRARSVASQSIIAYTMSLGAENSVAYSNNSIAIPTNFTISVTTEILPVSMTKTSVDCTMYICGDSTECSNLLLQYGSFCTQLNRALTGIAVEQDKNTQEVFAQVKQIYKTPPIKDFGGFNFSQILPDPSKPSKRSFIEDLLFNKVTLADAGFIKQYGDCLGDIAARDLICAQKFNGLTVLPPLLTDEMIAQYTSALLAGTITSGWTFGAGAALQIPFAMQMAYRFNGIGVTQNVLYENQKLIANQFNSAIGKIQDSLSSTASALGKLQDVVNQNAQALNTLVKQLSSNFGAISSVLNDILSRLDKVEAEVQIDRLITGRLQSLQTYVTQQLIRAAEIRASANLAATKMSECVLGQSKRVDFCGKGYHLMSFPQSAPHGVVFLHVTYVPAQEKNFTTAPAICHDGKAHFPREGVFVSNGTHWFVTQRNFYEPQIITTDNTFVSGNCDVVIGIVNNTVYDPLQPELESFKEELDKYFKNHTSPDVDLGDISGINASVVNIQKEIDRLNEVAKNLNESLIDLQELGKYEQYIKGGGSGGGQIYEGKLTAEGLRFGIVASRFNHALVDRLVEGAIDAIVRHGGREEDITLVRVPGSWEIPVAAGELARKEDIDAVIAIGVLIRGATPHFDYIASEVSKGLADLSLELRKPITFGVITADTLEQAIERAGTKHGNKGWEAALSAIEMANLFKSLR

SEQ ID NO: 3662 - protein, 1371 aa, Artificial Sequence
  SARS-CoV-2/2019-nCoV/USA-CruiseA-18/2020__MT159716.1 spike protein (1-1211) LumSynth construct
MFVFLVLLPLVSSQCVNLTTRTQLPPAYTNSFTRGVYYPDKVFRSSVLHSTQDLFLPFFSNVTWFHAIHVSGTNGTKRFDNPVLPFNDGVYFASTEKSNIIRGWIFGTTLDSKTQSLLIVNNATNVVIKVCEFQFCNDPFLGVYYHKNNKSWMESELRVYSSANNCTFEYVSQPFLMDLEGKQGNFKNLREFVFKNIDGYFKIYSKHTPINLVRDLPQGFSALEPLVDLPIGINITRFQTLLALHRSYLTPGDSSSGWTAGAAAYYVGYLQPRTFLLKYNENGTITDAVDCALDPLSETKCTLKSFTVEKGIYQTSNFRVQPTESIVRFPNITNLCPFGEVFNATRFASVYAWNRKRISNCVADYSVLYNSASFSTFKCYGVSPTKLNDLCFTNVYADSFVIRGDEVRQIAPGQTGKIADYNYKLPDDFTGCVIAWNSNNLDSKVGGNYNYLYRLFRKSNLKPFERDISTEIYQAGSTPCNGVEGFNCYFPLQSYGFQPTNGVGYQPYRVVVLSFELLHAPATVCGPKKSTNLVKNKCVNFNFNGLTGTGVLTESNKKFLPFQQFGRDIADTTDAVRDPQTLEILDITPCSFGGVSVITPGTNTSNQVAVLYQDVNCTEVPVAIHADQLTPTWRVYSTGSNVFQTRAGCLIGAEHVNNSYECDIPIGAGICASYQTQTNSPRRARSVASQSIIAYTMSLGAENSVAYSNNSIAIPTNFTISVTTEILPVSMTKTSVDCTMYICGDSTECSNLLLQYGSFCTQLNRALTGIAVEQDKNTQEVFAQVKQIYKTPPIKDFGGFNFSQILPDPSKPSKRSFIEDLLFNKVTLADAGFIKQYGDCLGDIAARDLICAQKFNGLTVLPPLLTDEMIAQYTSALLAGTITSGWTFGAGAALQIPFAMQMAYRFNGIGVTQNVLYENQKLIANQFNSAIGKIQDSLSSTASALGKLQDVVNQNAQALNTLVKQLSSNFGAISSVLNDILSRLDKVEAEVQIDRLITGRLQSLQTYVTQQLIRAAEIRASANLAATKMSECVLGQSKRVDFCGKGYHLMSFPQSAPHGVVFLHVTYVPAQEKNFTTAPAICHDGKAHFPREGVFVSNGTHWFVTQRNFYEPQIITTDNTFVSGNCDVVIGIVNNTVYDPLQPELDSFKEELDKYFKNHTSPDVDLGDISGINASVVNIQKEIDRLNEVAKNLNESLIDLQELGKYEQYIKGGGSGGGQIYEGKLTAEGLRFGIVASRFNHALVDRLVEGAIDAIVRHGGREEDITLVRVPGSWEIPVAAGELARKEDIDAVIAIGVLIRGATPHFDYIASEVSKGLADLSLELRKPITFGVITADTLEQAIERAGTKHGNKGWEAALSAIEMANLFKSLR

SEQ ID NO: 3663 - protein, 1371 aa, Artificial Sequence
  SARS-CoV-2/SARS-CoV-2/Yunnan-01/human/2020/CHN__MT049951.1 spike protein (1-1211) LumSynth construct
MFVFLVLLPLVSSQCVNLTTRTQLPPANTNSFTRGVYYPDKVFRSSVLHSTQDLFLPFFSNVTWFHAIHVSGTNGTKRFDNPVLPFNDGVYFASTEKSNIIRGWIFGTTLDSKTQSLLIVNNATNVVIKVCEFQFCNDPFLGVYYHKNNKSWMESEFRVYSSANNCTFEYVSQPFLMDLEGKQGNFKNLREFVFKNIDGYFKIYSKHTPINLVRDLPQGFSALEPLVDLPIGINITRFQTLLALHRSYLTPGDSSSGWTAGAAAYYVGYLQPRTFLLKYNENGTITDAVDCALDPLSETKCTLKSFTVEKGIYQTSNFRVQPTESIVRFPNITNLCPFGEVFNATRFASVYAWNRKRISNCVADYSVLYNSASFSTFKCYGVSPTKLNDLCFTNVYADSFVIRGDEVRQIAPGQTGKIADYNYKLPDDFTGCVIAWNSNNLDSKVGGNYNYLYRLFRKSNLKPFERDISTEIYQAGSTPCNGVEGFNCYFPLQSYGFQPTNGVGYQPYRVVVLSFELLHAPATVCGPKKSTNLVKNKCVNFNFNGLTGTGVLTESNKKFLPFQQFGRDIADTTDAVRDPQTLEILDITPCSFGGVSVITPGTNTSNQVAVLYQDVNCTEVPVAIHADQLTPTWRVYSTGSNVFQTRAGCLIGAEHVNNSYECDIPIGAGICASYQTQTNSPRRARSVASQSIIAYTMSLGAENSVAYSNNSIAIPTNFTISVTTEILPVSMTKTSVDCTMYICGDSTECSNLLLQYGSFCTQLNRALTGIAVEQDKNTQEVFAQVKQIYKTPPIKDFGGFNFSQILPDPSKPSKRSFIEDLLFNKVTLADAGFIKQYGDCLGDIAARDLICAQKFNGLTVLPPLLTDEMIAQYTSALLAGTITSGWTFGAGAALQIPFAMQMAYRFNGIGVTQNVLYENQKLIANQFNSAIGKIQDSLSSTASALGKLQDVVNQNAQALNTLVKQLSSNFGAISSVLNDILSRLDKVEAEVQIDRLITGRLQSLQTYVTQQLIRAAEIRASANLAATKMSECVLGQSKRVDFCGKGYHLMSFPQSAPHGVVFLHVTYVPAQEKNFTTAPAICHDGKAHFPREGVFVSNGTHWFVTQRNFYEPQIITTDNTFVSGNCDVVIGIVNNTVYDPLQPELDSFKEELDKYFKNHTSPDVDLGDISGINASVVNIQKEIDRLNEVAKNLNESLIDLQELGKYEQYIKGGGSGGGQIYEGKLTAEGLRFGIVASRFNHALVDRLVEGAIDAIVRHGGREEDITLVRVPGSWEIPVAAGELARKEDIDAVIAIGVLIRGATPHFDYIASEVSKGLADLSLELRKPITFGVITADTLEQAIERAGTKHGNKGWEAALSAIEMANLFKSLR

SEQ ID NO: 3664 - protein, 1371 aa, Artificial Sequence
  SARS-CoV-2/USA/WA-UW292/2020__EPI_ISL_418077 spike protein (1-1211) LumSynth construct
MFVFLVLLPLVSSQCVNLTTRTQLPPAYTNSFTRGVYYPDKVFRSSVLHSTQDLFLPFFSNVTWFHAIHVSGTNGTKRFDNPVLPFNDGVYFASTEKSNIIRGWIFGTTLDSKTQSLLIVNNATNVVIKVCEFQFCNDPFLGVYYHKNNKSWMESEFRVYSSANNCTFEYVSQPFLMDLEGKQGNFKNLREFVFKNIDGYFKIYSKHTPINLVRDLPQGFSALEPLVDLPIGINITRFQTLLALHRSYLTPGDSSSGWTAGAAAYYVGYLQPRTFLLKYNENGTITDAVDCALDPLSETKCTLKSFTVEKGIYQTSNFRVQPTESIVRFPNITNLCPFGEVFNATRFASVYAWNRKRISNCVADYSVLYNSASFSTFKCYGVSPTKLNDLCFTNVYADSFVIRGDEVRQIAPGQTGKIADYNYKLPDDFTGCVIAWNSNNLDSKVGGNYNYLYRLFRKSNLKPFERDISTEIYQASSTPCNGVEGFNCYFPLQSYGFQPTNGVGYQPYRVVVLSFELLHAPATVCGPKKSTNLVKNKCVNFNFNGLTGTGVLTESNKKFLPFQQFGRDIADTTDAVRDPQTLEILDITPCSFGGVSVITPGTNTSNQVAVLYQDVNCTEVPVAIHADQLTPTWRVYSTGSNVFQTRAGCLIGAEHVNNSYECDIPIGAGICASYQTQTNSPRRARSVASQSIIAYTMSLGAENSVAYSNNSIAIPTNFTISVTTEILPVSMTKTSVDCTMYICGDSTECSNLLLQYGSFCTQLNRALTGIAVEQDKNTQEVFAQVKQIYKTPPIKDFGGFNFSQILPDPSKPSKRSFIEDLLFNKVTLADAGFIKQYGDCLGDIAARDLICAQKFNGLTVLPPLLTDEMIAQYTSALLAGTITSGWTFGAGAALQIPFAMQMAYRFNGIGVTQNVLYENQKLIANQFNSAIGKIQDSLSSTASALGKLQDVVNQNAQALNTLVKQLSSNFGAISSVLNDILSRLDKVEAEVQIDRLITGRLQSLQTYVTQQLIRAAEIRASANLAATKMSECVLGQSKRVDFCGKGYHLMSFPQSAPHGVVFLHVTYVPAQEKNFTTAPAICHDGKAHFPREGVFVSNGTHWFVTQRNFYEPQIITTDNTFVSGNCDVVIGIVNNTVYDPLQPELDSFKEELDKYFKNHTSPDVDLGDISGINASVVNIQKEIDRLNEVAKNLNESLIDLQELGKYEQYIKGGGSGGGQIYEGKLTAEGLRFGIVASRFNHALVDRLVEGAIDAIVRHGGREEDITLVRVPGSWEIPVAAGELARKEDIDAVIAIGVLIRGATPHFDYIASEVSKGLADLSLELRKPITFGVITADTLEQAIERAGTKHGNKGWEAALSAIEMANLFKSLR

SEQ ID NO: 3665 - protein, 1371 aa, Artificial Sequence
  SARS-CoV-2/Iceland/192/2020__EPI_ISL_417819 spike protein (1-1211) LumSynth construct
MFVFFVLLPLVSSQCVNLTTRTQLPPAYTNSFTRGVYYPDKVFRSSVLHSTQDLFLPFFSNVTWFHAIHVSGTNGTKRFDNPVLPFNDGVYFASTEKSNIIRGWIFGTTLDSKTQSLLIVNNATNVVIKVCEFQFCNDPFLGVYYHKNNKSWMESEFRVYSSANNCTFEYVSQPFLMDLEGKQGNFKNLREFVFKNIDGYFKIYSKHTPINLVRDLPQGFSALEPLVDLPIGINITRFQTLLALHRSYLTPGDSSSGWTAGAAAYYVGYLQPRTFLLKYNENGTITDAVDCALDPLSETKCTLKSFTVEKGIYQTSNFRVQPTESIVRFPNITNLCPFGEVFNATRFASVYAWNRKRISNCVADYSVLYNSASFSTFKCYGVSPTKLNDLCFTNVYADSFVIRGDEVRQIAPGQTGKIADYNYKLPDDFTGCVIAWNSNNLDSKVGGNYNYLYRLFRKSNLKPFERDISTEIYQAGSTPCNGVEGFNCYFPLQSYGFQPTNGVGYQPYRVVVLSFELLHAPATVCGPKKSTNLVKNKCVNFNFNGLTGTGVLTESNKKFLPFQQFGRDIADTTDAVRDPQTLEILDITPCSFGGVSVITPGTNTSNQVAVLYQGVNCTEVPVAIHADQLTPTWRVYSTGSNVFQTRAGCLIGAEHVNNSYECDIPIGAGICASYQTQTNSPRRARSVASQSIIAYTMSLGAENSVAYSNNSIAIPTNFTISVTTEILPVSMTKTSVDCTMYICGDSTECSNLLLQYGSFCTQLNRALTGIAVEQDKNTQEVFAQVKQIYKTPPIKDFGGFNFSQILPDPSKPSKRSFIEDLLFNKVTLADAGFIKQYGDCLGDIAARDLICAQKFNGLTVLPPLLTDEMIAQYTSALLAGTITSGWTFGAGAALQIPFAMQMAYRFNGIGVTQNVLYENQKLIANQFNSAIGKIQDSLSSTASALGKLQDVVNQNAQALNTLVKQLSSNFGAISSVLNDILSRLDKVEAEVQIDRLITGRLQSLQTYVTQQLIRAAEIRASANLAATKMSECVLGQSKRVDFCGKGYHLMSFPQSAPHGVVFLHVTYVPAQEKNFTTAPAICHDGKAHFPREGVFVSNGTHWFVTQRNFYEPQIITTDNTFVSGNCDVVIGIVNNTVYDPLQPELDSFKEELDKYFKNHTSPDVDLGDISGINASVVNIQKEIDRLNEVAKNLNESLIDLQELGKYEQYIKGGGSGGGQIYEGKLTAEGLRFGIVASRFNHALVDRLVEGAIDAIVRHGGREEDITLVRVPGSWEIPVAAGELARKEDIDAVIAIGVLIRGATPHFDYIASEVSKGLADLSLELRKPITFGVITADTLEQAIERAGTKHGNKGWEAALSAIEMANLFKSLR

SEQ ID NO: 3666 - protein, 1371 aa, Artificial Sequence
  SARS-CoV-2/Belgium/ULG-6939/2020__EPI_ISL_417020 spike protein (1-1211) LumSynth construct
MFVFLVLLPLVSSQCVNLTTRTQLPPAYTNSFTRGVYYPDKVFRSSVLHSTQDLFLPFFSNVTWFHAIHVSGTNGTKRFDNPVLPFNDGVYFASTEKSNIIRGWIFGTTLDSKTQSLLIVNNATNVVIKVCEFQFCNDPFLGVYYHKNNKSWMESEFRVYSSANNCTFEYVSQPFLMDLEGKQGNFKNLREFVFKNIDGYFKIYSKHTPINLVRDLPQGFSALEPLVDLPIGINITRFQTLLALHRSYLTPGDSSSGWTAGAAAYYVGYLQPRTFLLKYNENGTITDAVDCALDPLSETKCTLKSFTVEKGIYQTSNFRVQPTESIVRFPNITNLCPFGEVFNATRFASVYAWNRKRISNCVADYSVLYNSASFSTFKCYGVSPTKLNDLCFTNVYADSFVIRGDEVRQIAPGQTGKIADYNYKLPDDFTGCVIAWNSNNLDSKVGGNYNYLYRLFRKSNLKPFERDISTEIYQAGSTPCNGVEGFNCYFPLQSYGFQPTNGVGYQPYRVVVLSFELLHAPATVCGPKKSTNLVKNKCVNFNFNGLTGTGVLTESNKKFLPFQQFGRDIADTTDAVRDPQTLEILDITPCSFGGVSVITPGTNTSNQVAVLYQGVNCTEVPVAIHADQLTPTWRVYSTGSNVFQTRAGCLIGAEHVNNSYECDIPIGAGICASYQTQTNSPRRARSVASQSIIAYTMSLGAENSVVYSNNSIAIPTNFTISVTTEILPVSMTKTSVDCTMYICGDSTECSNLLLQYGSFCTQLNRALTGIAVEQDKNTQEVFAQVKQIYKTPPIKDFGGFNFSQILPDPSKPSKRSFIEDLLFNKVTLADAGFIKQYGDCLGDIAARDLICAQKFNGLTVLPPLLTDEMIAQYTSALLAGTITSGWTFGAGAALQIPFAMQMAYRFNGIGVTQNVLYENQKLIANQFNSAIGKIQDSLSSTASALGKLQDVVNQNAQALNTLVKQLSSNFGAISSVLNDILSRLDKVEAEVQIDRLITGRLQSLQTYVTQQLIRAAEIRASANLAATKMSECVLGQSKRVDFCGKGYHLMSFPQSAPHGVVFLHVTYVPAQEKNFTTAPAICHDGKAHFPREGVFVSNGTHWFVTQRNFYEPQIITTDNTFVSGNCDVVIGIVNNTVYDPLQPELDSFKEELDKYFKNHTSPDVDLGDISGINASVVNIQKEIDRLNEVAKNLNESLIDLQELGKYEQYIKGGGSGGGQIYEGKLTAEGLRFGIVASRFNHALVDRLVEGAIDAIVRHGGREEDITLVRVPGSWEIPVAAGELARKEDIDAVIAIGVLIRGATPHFDYIASEVSKGLADLSLELRKPITFGVITADTLEQAIERAGTKHGNKGWEAALSAIEMANLFKSLR

SEQ ID NO: 3667 - protein, 1371 aa, Artificial Sequence
  SARS-CoV-2/France/HF2496/2020__EPI_ISL_418231 spike protein (1-1211) LumSynth construct
MFVFLVLLPLVSSQCVNLTTRTQLPPAYTNSFTRGVYYPDKVFRSSVLHSTQDLFLPFFSNVTWFHAIHVSGTNGTKRFDNPVLPFNDGVYFASTEKSNIIRGWIFGTTLDSKTQSLLIVNNATNVVIKVCEFQFCNDPFLGVYYHKNNKSWMESEFRVYSSANNCTFEYVSQPFLMDLEGKQGNFKNLREFVFKNIDGYFKIYSKHTPINLVRDLPQGFSALEPLVDLPIGINITRFQTLLALHRSYLTPGDSSSGWTAGAAAYYVGYLQPRTFLLKYNENGTITDAVDCALDPLSETKCTLKSFTVEKGIYQTSNFRVQPTESIVRFPNITNLCPFGEVFNATRFASVYAWNRKRISNCVADYSVLYNSASFSTFKCYGVSPTKLNDLCFTNVYADSFVIRGDEVRQIAPGQTGKIADYNYKLPDDFTGCVIAWNSNNLDSKVGGNYNYLYRLFRKSNLKPFERDISTEIYQAGSTPCNGVEGFNCYFPLQSYGFQPTNGVGYQPYRVVVLSFELLHAPATVCGPKKSTNLVKNKCVNFNFNGLTGTGVLTESNKKFLPFQQFGRDIADTTDAVRDPQTLEILDITPCSFGGVSVITPGTNTSNQVAVLYQGVNCTEVPVAIHADQLTPTWRVYSTGSNVFQTRAGCLIGAEHVNNSYECDIPIGAGICASYQTQTNSPRRARSVASQSIIAYTMSLGAENSVAYSNNSIAIPTNFTISVTTEILPVSMTKTSVDCTMYICGDSTECSNLLLQYGSFCTQLNRALTGIAVEQDKNTQEVFAQVKQIYKTPPIKDFGGFNFSQILPDPSKPSKRSFIEDLLFNKVTLADAGFIKQYGDCLGDIVARDLICAQKFNGLTVLPPLLTDEMIAQYTSALLAGTITSGWTFGAGAALQIPFAMQMAYRFNGIGVTQNVLYENQKLIANQFNSAIGKIQDSLSSTASALGKLQDVVNQNAQALNTLVKQLSSNFGAISSVLNDILSRLDKVEAEVQIDRLITGRLQSLQTYVTQQLIRAAEIRASANLAATKMSECVLGQSKRVDFCGKGYHLMSFPQSAPHGVVFLHVTYVPAQEKNFTTAPAICHDGKAHFPREGVFVSNGTHWFVTQRNFYEPQIITTDNTFVSGNCDVVIGIVNNTVYDPLQPELDSFKEELDKYFKNHTSPDVDLGDISGINASVVNIQKEIDRLNEVAKNLNESLIDLQELGKYEQYIKGGGSGGGQIYEGKLTAEGLRFGIVASRFNHALVDRLVEGAIDAIVRHGGREEDITLVRVPGSWEIPVAAGELARKEDIDAVIAIGVLIRGATPHFDYIASEVSKGLADLSLELRKPITFGVITADTLEQAIERAGTKHGNKGWEAALSAIEMANLFKSLR

SEQ ID NO: 3668 - protein, 1371 aa, Artificial Sequence
  SARS-CoV-2/USA/WA-UW291/2020__EPI_ISL_418076 spike protein (1-1211) LumSynth construct
MFVFLVLLPLVSSQCVNLTTRTQLPPAYTNSFTRGVYYPDKVFRSSVLHSTQDLFLPFFSNVTWFHAIHVSGTNGTKRFDNPVLPFNDGVYFASTEKSNIIRGWIFGTTLDSKTQSLLIVNNATNVVIKVCEFQFCNDPFLGVYYHKNNKSWMESEFRVYSSANNCTFEYVSQPFLMDLEGKQGNFKNLREFVFKNIDGYFKIYSKHTPINLVRDLPQGFSALEPLVDLPIGINITRFQTLLALHRSYLTPGDSSSGWTAGAAAYYVGYLQPRTFLLKYNENGTITDAVDCALDPLSETKCTLKSFTVEKGIYQTSNFRVQPTESIVRFPNITNLCPFGEVFNATRFASVYAWNRKRISNCVADYSVLYNSASFSTFKCYGVSPTKLNDLCFTNVYADSFVIRGDEVRQIAPGQTGKIADYNYKLPDDFTGCVIAWNSNNLDSKVGGNYNYLYRLFRKSNLKPFERDISTEIYQAGSTPCNGVEGFNCYFPLQSYGFQPTNGVGYQPYRVVVLSFELLHAPATVCGPKKSTNLVKNKCVNFNFNGLTGTGVLTESNKKFLPFQQFGRDIADTTDAVRDPQTLEILDITPCSFGGVSVITPGTNTSNQVAVLYQGVNCTEVPVAIHADQLTPTWRVYSTGSNVFQTRAGCLIGAEHVNNSYECDIPIGAGICASYQTQTNSPRRARSVASQSIIAYTMSLGAENSVAYSNNSIAIPTNFTISVTTEILPVSMTKTSVDCTMYICGDSTECSNLLLQYGSFCTQLNRALTGIAVEQDKNTQEVFAQVKQIYKTPPIKDFGGFNFSQILPDPSKPSKRSFIEDLLFNKVTLADAGFIKQYGDCLGDIAARDLICAQKFNGLTVLPPLLTDEMIAQYTSALLAGTITSGWTFGAGAALQIPFAMQMAYRFNGIGVTQNVLYENQKLIANQFNSAIGKIQYSLSSTASALGKLQDVVNQNAQALNTLVKQLSSNFGAISSVLNDILSRLDKVEAEVQIDRLITGRLQSLQTYVTQQLIRAAEIRASANLAATKMSECVLGQSKRVDFCGKGYHLMSFPQSAPHGVVFLHVTYVPAQEKNFTTAPAICHDGKAHFPREGVFVSNGTHWFVTQRNFYEPQIITTDNTFVSGNCDVVIGIVNNTVYDPLQPELDSFKEELDKYFKNHTSPDVDLGDISGINASVVNIQKEIDRLNEVAKNLNESLIDLQELGKYEQYIKGGGSGGGQIYEGKLTAEGLRFGIVASRFNHALVDRLVEGAIDAIVRHGGREEDITLVRVPGSWEIPVAAGELARKEDIDAVIAIGVLIRGATPHFDYIASEVSKGLADLSLELRKPITFGVITADTLEQAIERAGTKHGNKGWEAALSAIEMANLFKSLR

SEQ ID NO: 3669 - protein, 1371 aa, Artificial Sequence; identical to SEQ ID NO: 66
  SARS-CoV-2/Portugal/PT0034/2020__EPI_ISL_418019 spike protein (1-1211) LumSynth construct

SEQ ID NO: 3670 - protein, 1371 aa, Artificial Sequence
  SARS-CoV-2/Iceland/202/2020__EPI_ISL_417750 spike protein (1-1211) LumSynth construct
MFVFLVLLPLVSSQCVNLTTRTQLPPAYTNSFTRGVYYPDKVFRSSVLHSTQDLFLPFFSNVTWFHAIHVSGTNGTKRFDNPVLPFNDGVYFASTEKSNIIRGWIFGTTLDSKTQSLLIVNNATNVVIKVCEFQFCNDPFLGVYYHKNNKSWMESEFRVYSSANNCTFEYVSQPFLMDLEGKQGNFKNLREFVFKNIDGYFKIYSKHTPINLVRDLPQGFSALEPLVDLPIGINITRFQTLLALHRSYLTPGDSSSGWTAGAAAYYVGYLQPRTFLLKYNENGTITDAVDCALDPLSETKCTLKSFTVEKGIYQTSNFRVQPTESIVRFPNITNLCPFGEVFNATRFASVYAWNRKRISNCVADYSVLYNSASFSTFKCYGVSPTKLNDLCFTNVYADSFVIRGDEVRQIAPGQTGKIADYNYKLPDDFTGCVIAWNSNNLDSKVGGNYNYLYRLFRKSNLKPFERDISTEIYQAGSTPCNGVEGFNCYFPLQSYGFQPTNGVGYQPYRVVVLSFELLHAPATVCGPKKSTNLVKNKCVNFNFNGLTGTGVLTESNKKFLPFQQFGRDIADTTDAVRDPQTLEILDITPCSFGGVSVITPGTNTSNQVAVLYQDVNCTEVPVAIHADQLTPTWRVYSTGSNVFQTRAGCLIGAEHVNNSYECDIPIGAGICASYQTQTNSPRRARSVASQSIIAYTMSLGAENSVAYSNNSIAIPTNFTISVTTEILPVSMTKTSVDCTMYICGDSTECSNLLLQYGSFCTQLNRALTGIAVEQDKNTQEVFAQVKQIYKTPPIKDFGGFNFSQILPDPSKPSKRSFIEDLLFNKVTLADAGFIKQYGDCLGDIAARDLICAQKFNGLTVLPPLLTDEMIAQYTSALLAGTITSGWTFGAGAALQIPFAMQMAYRFNGIGVTQNVLYENQKLIANQFNSAIGKIQDSLSSTASALGKLQDVVNQNAQALNTLVKQLSSNFGAISSVLNDILSRLDKVEAEVQIDRLITGRLQSLQTYVTQQLIRAAEIRASANLAATKMSECVLGQSKRVDFCGKGYHLMSFPQSAPHGVVFLHVTYVPAQEKNFTTAPAICHDGKAHFPREGVFVSNGTHWFVTQRNFYEPQIITTDNTFVSGNCDVVIGIVNNTVYDPLQPELDSFKEELDKYFKNHTSPDVDLGDIPGINASVVNIQKEIDRLNEVAKNLNESLIDLQELGKYEQYIKGGGSGGGQIYEGKLTAEGLRFGIVASRFNHALVDRLVEGAIDAIVRHGGREEDITLVRVPGSWEIPVAAGELARKEDIDAVIAIGVLIRGATPHFDYIASEVSKGLADLSLELRKPITFGVITADTLEQAIERAGTKHGNKGWEAALSAIEMANLFKSLR

SEQ ID NO: 3671 - protein, 1371 aa, Artificial Sequence
  SARS-CoV-2/USA/WA-UW261/2020__EPI_ISL_418046 spike protein (1-1211) LumSynth construct
MFVFLVLLPLVSSQCVNLTTRTQLPPAYTNSFTRGVYYPDKVFRSSVLHSTQDLFLPFFSNVTWFHAIHVSGTNGTKRFDNPVLPFNDGVYFASTEKSNIIRGWIFGTTLDSKTQSLLIVNNATNVVIKVCEFQFCNDPFLGVYYHKNNKSWMESEFRVYSSANNCTFEYVSQPFLMDLEGKQGNFKNLREFVFKNIDGYFKIYSKHTPINLVRDLPQGFSALEPLVDLPIGINITRFQTLLALHRSYLTPGDSSSGWTAGAAAYYVGYLQPRTFLLKYNENGTITDAVDCALDPLSETKCTLKSFTVEKGIYQTSNFRVQPTESIVRFPNITNLCPFGEVFNATRFTSVYAWNRKRISNCVADYSVLYNSASFSTFKCYGVSPTKLNDLCFTNVYADSFVIRGDEVRQIAPGQTGKIADYNYKLPDDFTGCVIAWNSNNLDSKVGGNYNYLYRLFRKSNLKPFERDISTEIYQAGSTPCNGVEGFNCYFPLQSYGFQPTNGVGYQPYRVVVLSFELLHAPATVCGPKKSTNLVKNKCVNFNFNGLTGTGVLTESNKKFLPFQQFGRDIADTTDAVRDPQTLEILDITPCSFGGVSVITPGTNTSNQVAVLYQDVNCTEVPVAIHADQLTPTWRVYSTGSNVFQTRAGCLIGAEHVNNSYECDIPIGAGICASYQTQTNSPRRARSVASQSIIAYTMSLGAENSVAYSNNSIAIPTNFTISVTTEILPVSMTKTSVDCTMYICGDSTECSNLLLQYGSFCTQLNRALTGIAVEQDKNTQEVFAQVKQIYKTPPIKDFGGFNFSQILPDPSKPSKRSFIEDLLFNKVTLADAGFIKQYGDCLGDIAARDLICAQKFNGLTVLPPLLTDEMIAQYTSALLAGTITSGWTFGAGAALQIPFAMQMAYRFNGIGVTQNVLYENQKLIANQFNSAIGKIQDSLSSTASALGKLQDVVNQNAQALNTLVKQLSSNFGAISSVLNDILSRLDKVEAEVQIDRLITGRLQSLQTYVTQQLIRAAEIRASANLAATKMSECVLGQSKRVDFCGKGYHLMSFPQSAPHGVVFLHVTYVPAQEKNFTTAPAICHDGKAHFPREGVFVSNGTHWFVTQRNFYEPQIITTDNTFVSGNCDVVIGIVNNTVYDPLQPELDSFKEELDKYFKNHTSPDVDLGDISGINASVVNIQKEIDRLNEVAKNLNESLIDLQELGKYEQYIKGGGSGGGQIYEGKLTAEGLRFGIVASRFNHALVDRLVEGAIDAIVRHGGREEDITLVRVPGSWEIPVAAGELARKEDIDAVIAIGVLIRGATPHFDYIASEVSKGLADLSLELRKPITFGVITADTLEQAIERAGTKHGNKGWEAALSAIEMANLFKSLR

SEQ ID NO: 3672 - protein, 1371 aa, Artificial Sequence
  SARS-CoV-2/Portugal/PT0035/2020__EPI_ISL_418020 spike protein (1-1211) LumSynth construct
MFVFLVLLPLVSSQCVNLTTRTQLPPAYTNSFTRGVYYPDKVFRSSVLHSTQDLFLPFFSNVTWFHAIHVSGTNGTKRFDNPVLPFNDGVYFASTEKSNIIRGWIFGTTLDSKTQSLLIVNNATNVVIKVCEFQFCNDPFLGVYYHKNNKSWMESEFRVYSSANNCTFEYVSQPFLMDLEGKQGNFKNLREFVFKNIDGYFKIYSKHTPINLVRDLPQGFSALEPLVDLPIGINITRFQTLLALHRSYLTPGDSSSGWTAGAAAYYVGYLQPRTFLLKYNENGTITDAVDCALDPLSETKCTLKSFTVEKGIYQTSNFRVQPTESIVRFPNITNLCPFGEVFNATRFASVYAWNRKRISNCVADYSVLYNSASFSTFKCYGVSPTKLNDLCFTNVYADSFVIRGDEVRQIAPGQTGKIADYNYKLPDDFTGCVIAWNSNNLDSKVGGNYNYLYRLFRKSNLKPFERDISTEIYQAGSTPCNGVEGFNCYFPLQSYGFQPTNGVGYQPYRVVVLSFELLHAPATVCGPKKSTNLVKNKCVNFNFNGLTGTGVLTESNKKFLPFQQFGRDIADTTDAVRDPQTLEILDITPCSFGGVSVITPGTNTSNQVAVLYQDVNCTEVPVAIHADQLTPTWRVYSTGSNVFQTRAGCLIGAEHVNNSYECDIPIGAGICASYQTQTNSPRRARSVASQSIIAYTMSLGAENSVAYSNNSIAIPTNFTISVTTEILPVSMTKTSVDCTMYICGDSTECSNLLLQYGSFCTQLNRALTGIAVEQDKNTQEVFAQVKQIYKTPPIKDFGGFNFSQILPDPSKPSKRSFIEDLLFNKVTLADAGFIKQYGDCLGDISARDLICAQKFNGLTVLPPLLTDEMIAQYTSALLAGTITSGWTFGAGAALQIPFAMQMAYRFNGIGVTQNVLYENQKLIANQFNSAIGKIQDSLSSTASALGKLQDVVNQNAQALNTLVKQLSSNFGAISSVLNDILSRLDKVEAEVQIDRLITGRLQSLQTYVTQQLIRAAEIRASANLAATKMSECVLGQSKRVDFCGKGYHLMSFPQSAPHGVVFLHVTYVPAQEKNFTTAPAICHDGKAHFPREGVFVSNGTHWFVTQRNFYEPQIITTDNTFVSGNCDVVIGIVNNTVYDPLQPELDSFKEELDKYFKNHTSPDVDLGDISGINASVVNIQKEIDRLNEVAKNLNESLIDLQELGKYEQYIKGGGSGGGQIYEGKLTAEGLRFGIVASRFNHALVDRLVEGAIDAIVRHGGREEDITLVRVPGSWEIPVAAGELARKEDIDAVIAIGVLIRGATPHFDYIASEVSKGLADLSLELRKPITFGVITADTLEQAIERAGTKHGNKGWEAALSAIEMANLFKSLR

SEQ ID NO: 3673 - protein, 1371 aa, Artificial Sequence
  SARS-CoV-2/USA/NY-NYUMC7/2020__EPI_ISL_418192 spike protein (1-1211) LumSynth construct
MFVFLVLLPLVSSQCVNLTTRTQLPPAYTNSFTRGVYYPDKVFRSSVLHSTQDLFLPFFSNVTWFHAIHVSGTNGTKRFDNPVLPFNDGVYFASTEKSNIIRGWIFGTTLDSKTQSLLIVNNATNVVIKVCEFQFCNDPFLGVYHHKNNKSWMESEFRVYSSANNCTFEYVSQPFLMDLEGKQGNFKNLREFVFKNIDGYFKIYSKHTPINLVRDLPQGFSALEPLVDLPIGINITRFQTLLALHRSYLTPGDSSSGWTAGAAAYYVGYLQPRTFLLKYNENGTITDAVDCALDPLSETKCTLKSFTVEKGIYQTSNFRVQPTESIVRFPNITNLCPFGEVFNATRFASVYAWNRKRISNCVADYSVLYNSASFSTFKCYGVSPTKLNDLCFTNVYADSFVIRGDEVRQIAPGQTGKIADYNYKLPDDFTGCVIAWNSNNLDSKVGGNYNYLYRLFRKSNLKPFERDISTEIYQAGSTPCNGVEGFNCYFPLQSYGFQPTNGVGYQPYRVVVLSFELLHAPATVCGPKKSTNLVKNKCVNFNFNGLTGTGVLTESNKKFLPFQQFGRDIADTTDAVRDPQTLEILDITPCSFGGVSVITPGTNTSNQVAVLYQGVNCTEVPVAIHADQLTPTWRVYSTGSNVFQTRAGCLIGAEHVNNSYECDIPIGAGICASYQTQTNSPRRARSVASQSIIAYTMSLGAENSVAYSNNSIAIPTNFTISVTTEILPVSMTKTSVDCTMYICGDSTECSNLLLQYGSFCTQLNRALTGIAVEQDKNTQEVFAQVKQIYKTPPIKDFGGFNFSQILPDPSKPSKRSFIEDLLFNKVTLADAGFIKQYGDCLGDIAARDLICAQKFNGLTVLPPLLTDEMIAQYTSALLAGTITSGWTFGAGAALQIPFAMQMAYRFNGIGVTQNVLYENQKLIANQFNSAIGKIQDSLSSTASALGKLQDVVNQNAQALNTLVKQLSSNFGAISSVLNDILSRLDKVEAEVQIDRLITGRLQSLQTYVTQQLIRAAEIRASANLAATKMSECVLGQSKRVDFCGKGYHLMSFPQSAPHGVVFLHVTYVPAQEKNFTTAPAICHDGKAHFPREGVFVSNGTHWFVTQRNFYEPQIITTDNTFVSGNCDVVIGIVNNTVYDPLQPELDSFKEELDKYFKNHTSPDVDLGDISGINASVVNIQKEIDRLNEVAKNLNESLIDLQELGKYEQYIKGGGSGGGQIYEGKLTAEGLRFGIVASRFNHALVDRLVEGAIDAIVRHGGREEDITLVRVPGSWEIPVAAGELARKEDIDAVIAIGVLIRGATPHFDYIASEVSKGLADLSLELRKPITFGVITADTLEQAIERAGTKHGNKGWEAALSAIEMANLFKSLR

SEQ ID NO: 3674 - protein, 1371 aa, Artificial Sequence
  SARS-CoV-2/Iceland/189/2020__EPI_ISL_417709 spike protein (1-1211) LumSynth construct
MFVFLVLLPLVSSQCVNLTTRTQLPPAYTNSFTRGVYYPDKVFRSSVLHSTQDLFLPFFSNVTWFHAIHVSGTNGTKRFDNPVLPFNDGVYFASTEKSNIIRGWIFGTTLDSKTQSLLIVNNATNVVIKVCEFQFCNDPFLGVYYHKNNKSWMESEFRVYSSANNCTFEYVSQPFLMDLEGKQGNFKNLREFVFKNIDGYFKIYSKHTPINLVRDLPQGFSALEPLVDLPIGINITRFQTLLALHRSYLTPGDSSSGWTAGAAAYYVGYLQPRTFLLKYNENGTITDAVDCALDPLSETKCTLKSFTVEKGIYQTSNFRVQPTESIVRFPNITNLCPFGEVFNATRFASVYAWNRKRISNCVADYSVLYNSASFSTFKCYGVSPTKLNDLCFTNVYADSFVIRGDEVRQIAPGQTGKIADYNYKLPDDFTGCVIAWNSNNLDSKVGGNYNYLYRLFRKSNLKPFERDISTEIYQAGSTPCNGVEGFNCYFPLQSYGFQPTNGVGYQPYRVVVLSFELLHAPATVCGPKKSTNLVKNKCVNFNFNGLTGTGVLTESNKKFLPFQQFGRDIADTTDAVRDPQTLEILDITPCSFGGVSVITPGTNTSNQVAVLYQGVNCTEVPVAIHADQLTPTWRVYSTGSNVFQTRAGCLIGAEHVNNSYECDIPIGAGICASYQTQTNSPRRARSVASQSIIAYTMSLGAENSVAYSNNSIAIPTNFTISVTTEILPVSMTKTSVDCTMYICGDSTECSNLLLQYGSFCTQLNRALTGIAVEQDKNTQEVFAQVKQIYKTPPIKDFGGFNFSQILPDPSKPSKRSFIEDLLFNKVTLADAGFTKQYGDCLGDIAARDLICAQKFNGLTVLPPLLTDEMIAQYTSALLAGTITSGWTFGAGAALQIPFAMQMAYRFNGIGVTQNVLYENQKLIANQFNSAIGKIQDSLSSTASALGKLQDVVNQNAQALNTLVKQLSSNFGAISSVLNDILSRLDKVEAEVQIDRLITGRLQSLQTYVTQQLIRAAEIRASANLAATKMSECVLGQSKRVDFCGKGYHLMSFPQSAPHGVVFLHVTYVPAQEKNFTTAPAICHDGKAHFPREGVFVSNGTHWFVTQRNFYEPQIITTDNTFVSGNCDVVIGIVNNTVYDPLQPELDSFKEELDKYFKNHTSPDVDLGDISGINASVVNIQKEIDRLNEVAKNLNESLIDLQELGKYEQYIKGGGSGGGQIYEGKLTAEGLRFGIVASRFNHALVDRLVEGAIDAIVRHGGREEDITLVRVPGSWEIPVAAGELARKEDIDAVIAIGVLIRGATPHFDYIASEVSKGLADLSLELRKPITFGVITADTLEQAIERAGTKHGNKGWEAALSAIEMANLFKSLR

SEQ ID NO: 3675 - protein, 1371 aa, Artificial Sequence
  SARS-CoV-2/Australia/NSW56/2020__EPI_ISL_417408 spike protein (1-1211) LumSynth construct
MFVFLVLLPLVSSQCVNLTTRTQLPPAYTNSFTRGVYYPDKVFRSSVLHSTQDLFLPFFSNVTWFHAIHVSGTNGTKRFDNPVLPFNDGVYFASTEKSNIIRGWIFGTTLDSKTQSLLIVNNATNVVIKVCEFQFCNDPFLGVYYHKNNKSWMESEFRVYSSANNCTFEYVSQPFLMDLEGKQGNFKNLREFVFKNIDGYFKIYSKHTPINLVRDLPQGFSALEPLVDLPIGINITRFQTLLALHRSYLTPGDSSSGWTAGAAAYYVGYLQPRTFLLKYNENGTITDAVDCALDPLSETKCTLKSFTVEKGIYQTSNFRVQPTESIVRFPNITNLCPFGEVFNATRFASVYAWNRKRISNCVADYSVLYNSASFSTFKCYGVSPTKLNDLCFTNVYADSFVIRGDEVRQIAPGQTGKIADYNYKLPDDFTGCVIAWNSNNLDSKVGGNYNYLYRLFRKSNLKPFERDISTEIYQAGSTPCNGVEGFNCYFPLQSYGFQPTNGVGYQPYRVVVLSFELLHAPATVCGPKKSTNLVKNKCVNFNFNGLTGTGVLTESNKKFLPFQQFGRDIADTTDAVRDPQTLEILDITPCSFGGVSVITPGTNTSNQVAVLYQDVNCTEVPVAIHADQLTPTWRVYSTGSNVFQTRAGCLIGAEHVNNSYECDIPIGAGICASYQTQTNSPRRARSVASQSIIAYTMSLGAENSVAYSNNSIAIPTNFTISVTTEILPVSMTKTSVDCTMYICGDSTECSNLLLQYGSFCTQLNRALTGIAVEQDKNTQEVFAQVKQIYKTPPIKDFGGFNFSQILPDSSKPSKRSFIEDLLFNKVTLADAGFIKQYGDCLGDIAARDLICAQKFNGLTVLPPLLTDEMIAQYTSALLAGTITSGWTFGAGAALQIPFAMQMAYRFNGIGVTQNVLYENQKLIANQFNSAIGKIQDSLSSTASALGKLQDVVNQNAQALNTLVKQLSSNFGAISSVLNDILSRLDKVEAEVQIDRLITGRLQSLQTYVTQQLIRAAEIRASANLAATKMSECVLGQSKRVDFCGKGYHLMSFPQSAPHGVVFLHVTYVPAQEKNFTTAPAICHDGKAHFPREGVFVSNGTHWFVTQRNFYEPQIITTDNTFVSGNCDVVIGIVNNTVYDPLQPELDSFKEELDKYFKNHTSPDVDLGDISGINASVVNIQKEIDRLNEVAKNLNESLIDLQELGKYEQYIKGGGSGGGQIYEGKLTAEGLRFGIVASRFNHALVDRLVEGAIDAIVRHGGREEDITLVRVPGSWEIPVAAGELARKEDIDAVIAIGVLIRGATPHFDYIASEVSKGLADLSLELRKPITFGVITADTLEQAIERAGTKHGNKGWEAALSAIEMANLFKSLR

SEQ ID NO: 3676 - protein, 1371 aa, Artificial Sequence
  SARS-CoV-2/Iceland/280/2020__EPI_ISL_417608 spike protein (1-1211) LumSynth construct
MFVFLVLLPLVSSQCVNLTTRTQLPPAYTNSFTRGVYYPDKVFRSSVLHSTQDLFLPFFSNVTWFHAIHVSGTNGTKRFDNPVLPFNDGVYFASTEKSNIIRGWIFGTTLDSKTQSLLIVNNATNVVIKVCEFQFCNDPFLGVYYHKNNKSWMESEFRVYSSANNCTFEYVSQPFLMDLEGKQGNFKNLREFVFKNIDGYFKIYSKHTPINLVRDLPQGFSALEPLVDLPIGINITRFQTLLALHRSYLTPGDSSSGWTAGAAAYYVGYLQPRTFLLKYNENGTITDAVDCALDPLSETKCTLKSFTVEKGIYQTSNFRVQPTESIVRFPNITNLCPFGEVFNATRFASVYAWNRKRISNCVADYSVLYNSASFSTFKCYGVSPTKLNDLCFTNVYADSFVIRGDEVRQIAPGQTGKIADYNYKLPDDFTGCVIAWNSNNLDSKVGGNYNYLYRLFRKSNLKPFERDISTEIYQAGSTPCNGVEGFNCYFPLQSYGFQPTNGVGYQPYRVVVLSFELLHAPATVCGPKKSTNLVKNKCVNFNFNGLTGTGVLTESNKKFLPFQQFGRDIADTTDAVRDPQTLEILDITPCSFGGVSVITPGTNTSNQVAVLYQGVNCTEVPVAIHADQLTPTWRVYSTGSNVFQTRAGCLIGAEHVNNSYECDIPIGAGICASYHTQTNSPRRARSVASQSIIAYTMSLGAENSVAYSNNSIAIPTNFTISVTTEILPVSMTKTSVDCTMYICGDSTECSNLLLQYGSFCTQLNRALTGIAVEQDKNTQEVFAQVKQIYKTPPIKDFGGFNFSQILPDPSKPSKRSFIEDLLFNKVTLADAGFIKQYGDCLGDIAARDLICAQKFNGLTVLPPLLTDEMIAQYTSALLAGTITSGWTFGAGAALQIPFAMQMAYRFNGIGVTQNVLYENQKLIANQFNSAIGKIQDSLSSTASALGKLQDVVNQNAQALNTLVKQLSSNFGAISSVLNDILSRLDKVEAEVQIDRLITGRLQSLQTYVTQQLIRAAEIRASANLAATKMSECVLGQSKRVDFCGKGYHLMSFPQSAPHGVVFLHVTYVPAQEKNFTTAPAICHDGKAHFPREGVFVSNGTHWFVTQRNFYEPQIITTDNTFVSGNCDVVIGIVNNTVYDPLQPELDSFKEELDKYFKNHTSPDVDLGDISGINASVVNIQKEIDRLNEVAKNLNESLIDLQELGKYEQYIKGGGSGGGQIYEGKLTAEGLRFGIVASRFNHALVDRLVEGAIDAIVRHGGREEDITLVRVPGSWEIPVAAGELARKEDIDAVIAIGVLIRGATPHFDYIASEVSKGLADLSLELRKPITFGVITADTLEQAIERAGTKHGNKGWEAALSAIEMANLFKSLR

SEQ ID NO: 3677 - protein, 1371 aa, Artificial Sequence; identical to SEQ ID NO: 66
  SARS-CoV-2/Iceland/247/2020__EPI_ISL_417575 spike protein (1-1211) LumSynth construct

SEQ ID NO: 3678 - protein, 1371 aa, Artificial Sequence
  SARS-CoV-2/Iceland/238/2020__EPI_ISL_417566 spike protein (1-1211) LumSynth construct
MFVFLVLLPLVSSQCVNLTTRTQLPPAYTNSFTRGVYYPDKVFRSSVLHSTQDLFLPFFSNVTWFHAIHVSGTNGTKRFDNPVLPFNDGVYFASTEKSNIIRGWIFGTTLDSKTQSLLIVNNATNVVIKVCEFQFCNDPFLGVYYHKNNKSWMESEFRVYSSANNCTFEYVSQPFLMDLEGKQGNFKNLREFVFKNIDGYFKIYSKHTPINLVRDLPQGFSALEPLVDLPIGINITRFQTLLALHRSYLTPGDSSSGWTAGAAAYYVGYLQPRTFLLKYNENGTITDAVDCALDPLSETKCTLKSFTVEKGIYQTSNFRVQPTESIVRFPNITNLCPFGEVFNATRFASVYAWNRKRISNCVADYSVLYNSASFSTFKCYGVSPTKLNDLCFTNVYADSFVIRGDEVRQIAPGQTGKIADYNYKLPDDFTGCVIAWNSNNLDSKVGGNYNYLYRLFRKSNLKPFERDISTEIYQAGSTPCNGVEGFNCYFPLQSYGFQPTNGVGYQPYRVVVLSFELLHAPATVCGPKKSTNLVKNKCVNFNFNGLTGTGVLTESNKKFLPFQQFGRDIADTTDAVRDPQTLEILDITPCSFGGVSVITPGTNTSNQVAVLYQGVNCTEVPVAIHADQLTPTWRVYSTGSNVFQTRAGCLIGAEHVNNSYECDIPIGAGICASYQTQTNSPRRARSVASQSIIAYTMSLGAENSVAYSNNSIAIPTNFTISVTTEILPVSMTKTSVDCTMYICGDSTECSNLLLQYGSFCTQLNRALTGIAVEQDKNTQEVFAQVKQIYKTPPIKDFGGFNFSQILPDPSKPSKRSFIEDLLFNKVTLADVGFIKQYGDCLGDIAARDLICAQKFNGLTVLPPLLTDEMIAQYTSALLAGTITSGWTFGAGAALQIPFAMQMAYRFNGIGVTQNVLYENQKLIANQFNSAIGKIQDSLSSTASALGKLQDVVNQNAQALNTLVKQLSSNFGAISSVLNDILSRLDKVEAEVQIDRLITGRLQSLQTYVTQQLIRAAEIRASANLAATKMSECVLGQSKRVDFCGKGYHLMSFPQSAPHGVVFLHVTYVPAQEKNFTTAPAICHDGKAHFPREGVFVSNGTHWFVTQRNFYEPQIITTDNTFVSGNCDVVIGIVNNTVYDPLQPELDSFKEELDKYFKNHTSPDVDLGDISGINASVVNIQKEIDRLNEVAKNLNESLIDLQELGKYEQYIKGGGSGGGQIYEGKLTAEGLRFGIVASRFNHALVDRLVEGAIDAIVRHGGREEDITLVRVPGSWEIPVAAGELARKEDIDAVIAIGVLIRGATPHFDYIASEVSKGLADLSLELRKPITFGVITADTLEQAIERAGTKHGNKGWEAALSAIEMANLFKSLR

SEQ ID NO: 3679 - protein, 1371 aa, Artificial Sequence
  SARS-CoV-2/Greece/16/2020__EPI_ISL_418265 spike protein (1-1211) LumSynth construct
MFVFLVLLPLVSSQCVNLTTRTQLPPAYTNSFTRGVYYPDKVFRSSVLHSTQDLFLPFFSNVTWFHAIHVSGTNGTKRFDNPVLPFNDGVYFASTEKSNIIRGWIFGTTLDSKTQSLLIVNNATNVVIKVCEFQFCNDPFLGVYYHKNNKSWMESEFRVYSSANNCTFEYVSQPFLMDLEGKQGNFKNLREFVFKNVDGYFKIYSKHTPINLVRDLPQGFSALEPLVDLPIGINITRFQTLLALHRSYLTPGDSSSGWTAGAAAYYVGYLQPRTFLLKYNENGTITDAVDCALDPLSETKCTLKSFTVEKGIYQTSNFRVQPTESIVRFPNITNLCPFGEVFNATRFASVYAWNRKRISNCVADYSVLYNSASFSTFKCYGVSPTKLNDLCFTNVYADSFVIRGDEVRQIAPGQTGKIADYNYKLPDDFTGCVIAWNSNNLDSKVGGNYNYLYRLFRKSNLKPFERDISTEIYQAGSTPCNGVEGFNCYFPLQSYGFQPTNGVGYQPYRVVVLSFELLHAPATVCGPKKSTNLVKNKCVNFNFNGLTGTGVLTESNKKFLPFQQFGRDIADTTDAVRDPQTLEILDITPCSFGGVSVITPGTNTSNQVAVLYQDVNCTEVPVAIHADQLTPTWRVYSTGSNVFQTRAGCLIGAEHVNNSYECDIPIGAGICASYQTQTNSPRRARSVASQSIIAYTMSLGAENSVAYSNNSIAIPTNFTISVTTEILPVSMTKTSVDCTMYICGDSTECSNLLLQYGSFCTQLNRALTGIAVEQDKNTQEVFAQVKQIYKTPPIKDFGGFNFSQILPDPSKPSKRSFIEDLLFNKVTLADAGFIKQYGDCLGDIAARDLICAQKFNGLTVLPPLLTDEMIAQYTSALLAGTITSGWTFGAGAALQIPFAMQMAYRFNGIGVTQNVLYENQKLIANQFNSAIGKIQDSLSSTASALGKLQDVVNQNAQALNTLVKQLSSNFGAISSVLNDILSRLDKVEAEVQIDRLITGRLQSLQTYVTQQLIRAAEIRASANLAATKMSECVLGQSKRVDFCGKGYHLMSFPQSAPHGVVFLHVTYVPAQEKNFTTAPAICHDGKAHFPREGVFVSNGTHWFVTQRNFYEPQIITTDNTFVSGNCDVVIGIVNNTVYDPLQPELDSFKEELDKYFKNHTSPDVDLGDISGINASVVNIQKEIDRLNEVAKNLNESLIDLQELGKYEQYIKGGGSGGGQIYEGKLTAEGLRFGIVASRFNHALVDRLVEGAIDAIVRHGGREEDITLVRVPGSWEIPVAAGELARKEDIDAVIAIGVLIRGATPHFDYIASEVSKGLADLSLELRKPITFGVITADTLEQAIERAGTKHGNKGWEAALSAIEMANLFKSLR

SEQ ID NO: 3680 - protein, 1371 aa, Artificial Sequence
  SARS-CoV-2/Iceland/319/2020__EPI_ISL_417648 spike protein (1-1211) LumSynth construct
MFVFLVLLPLVSSQCVNLTTRTQLPPAYTNSFTRGVYYPDKVFRSSVLHSTQDLFLPFFSNVTWFHAIHVSGTNGTKRFDNPVLPFNDGVYFASTEKSNIIRGWIFGTTLDSKTQSLLIVNNATNVVIKVCEFQFCNDPFLGVYYHKNNKSWMESEFRVYSSANNCTFEYVSQPFLIDLEGKQGNFKNLREFVFKNIDGYFKIYSKHTPINLVRDLPQGFSALEPLVDLPIGINITRFQTLLALHRSYLTPGDSSSGWTAGAAAYYVGYLQPRTFLLKYNENGTITDAVDCALDPLSETKCTLKSFTVEKGIYQTSNFRVQPTESIVRFPNITNLCPFGEVFNATRFASVYAWNRKRISNCVADYSVLYNSASFSTFKCYGVSPTKLNDLCFTNVYADSFVIRGDEVRQIAPGQTGKIADYNYKLPDDFTGCVIAWNSNNLDSKVGGNYNYLYRLFRKSNLKPFERDISTEIYQAGSTPCNGVEGFNCYFPLQSYGFQPTNGVGYQPYRVVVLSFELLHAPATVCGPKKSTNLVKNKCVNFNFNGLTGTGVLTESNKKFLPFQQFGRDIADTTDAVRDPQTLEILDITPCSFGGVSVITPGTNTSNQVAVLYQGVNCTEVPVAIHADQLTPTWRVYSTGSNVFQTRAGCLIGAEHVNNSYECDIPIGAGICASYQTQTNSPRRARSVASQSIIAYTMSLGAENSVAYSNNSIAIPTNFTISVTTEILPVSMTKTSVDCTMYICGDSTECSNLLLQYGSFCTQLNRALTGIAVEQDKNTQEVFAQVKQIYKTPPIKDFGGFNFSQILPDPSKPSKRSFIEDLLFNKVTLADAGFIKQYGDCLGDIAARDLICAQKFNGLTVLPPLLTDEMIAQYTSALLAGTITSGWTFGAGAALQIPFAMQMAYRFNGIGVTQNVLYENQKLIANQFNSAIGKIQDSLSSTASALGKLQDVVNQNAQALNTLVKQLSSNFGAISSVLNDILSRLDKVEAEVQIDRLITGRLQSLQTYVTQQLIRAAEIRASANLAATKMSECVLGQSKRVDFCGKGYHLMSFPQSAPHGVVFLHVTYVPAQEKNFTTAPAICHDGKAHFPREGVFVSNGTHWFVTQRNFYEPQIITTDNTFVSGNCDVVIGIVNNTVYDPLQPELDSFKEELDKYFKNHTSPDVDLGDISGINASVVNIQKEIDRLNEVAKNLNESLIDLQELGKYEQYIKGGGSGGGQIYEGKLTAEGLRFGIVASRFNHALVDRLVEGAIDAIVRHGGREEDITLVRVPGSWEIPVAAGELARKEDIDAVIAIGVLIRGATPHFDYIASEVSKGLADLSLELRKPITFGVITADTLEQAIERAGTKHGNKGWEAALSAIEMANLFKSLR

SEQ ID NO: 3681 - protein, 1371 aa, Artificial Sequence
  SARS-CoV-2/Congo/94/2020__EPI_ISL_417947 spike protein (1-1211) LumSynth construct
MFVFLVLLPLVSSQCVNLTTRTQLPPAYTNSFTRGVYYPDKVFRSSVLHSTQDLFLPFFSNVTWFHAIHVSGTNGTKRFDNPVLPFNDGVYFASTEKSNIIRGWIFGTTLDSKTQSLLIVNNATNVVIKVCEFQFCNDPFLGVYYHKNNKSWMESEFRVYSSANNCTFEYVSQPFLMDLEGKQGNFKNLREFVFKNIDGYFKIYSKHTPINLVRDLPQGFSALEPLVDLPIGINITRFQTLLALHRSYLTPGDSSSGWTAGAAAYYVGYLQPRTFLLKYNENGTITDAVDCALDPLSETKCTLKSFTVEKGIYQTSNFRVQPTESIVRFPNITNLCPFGEVFNATRFASVYAWNRKRISNCVADYSVLYNSASFSTFKCYGVSPTKLNDLCFTNVYADSFVIRGDEVRQIAPGQTGKIADYNYKLPDDFTGCVIAWNSNNLDSKVGGNYNYLYRLFRKSNLKPFERDISTEIYQAGSTPCNGVEGFNCYFPLQSYGFQPTNGVGYQPYRVVVLSFELLHAPATVCGPKKSTNLVKNKCVNFNFNGLTGTGVLTESNKKFLPFQQFGRDIADTTDAVRDPQTLEILDITPCSFGGVSVITPGTNTSNQVAVLYQGVNCTEVPVAIHADQLTPTWRVYSTGSNVFQTRAGCLIGAEHVNNSYECDIPIGAGICASYQTQTNSPRRARSVASQSIIAYTMSLGAENSVAYSNNSIAIPTNFTISVTTEILPVSMTKTSVDCTMYICGDSTECSNLLLQYGSFCTQLNRALTGIAVEQDKNTQEVFAQVKQIYKTPPIKDFGGFNFSQILPDPSKPSKRSFIEDILFNKVTLADAGFIKQYGDCLGDIAARDLICAQKFNGLTVLPPLLTDEMIAQYTSALLAGTITSGWTFGAGAALQIPFAMQMAYRFNGIGVTQNVLYENQKLIANQFNSAIGKIQDSLSSTASALGKLQDVVNQNAQALNTLVKQLSSNFGAISSVLNDILSRLDKVEAEVQIDRLITGRLQSLQTYVTQQLIRAAEIRASANLAATKMSECVLGQSKRVDFCGKGYHLMSFPQSAPHGVVFLHVTYVPAQEKNFTTAPAICHDGKAHFPREGVFVSNGTHWFVTQRNFYEPQIITTDNTFVSGNCDVVIGIVNNTVYDPLQPELDSFKEELDKYFKNHTSPDVDLGDISGINASVVNIQKEIDRLNEVAKNLNESLIDLQELGKYEQYIKGGGSGGGQIYEGKLTAEGLRFGIVASRFNHALVDRLVEGAIDAIVRHGGREEDITLVRVPGSWEIPVAAGELARKEDIDAVIAIGVLIRGATPHFDYIASEVSKGLADLSLELRKPITFGVITADTLEQAIERAGTKHGNKGWEAALSAIEMANLFKSLR

SEQ ID NO: 3682 - protein, 1371 aa, Artificial Sequence
  SARS-CoV-2/Congo/158/2020__EPI_ISL_417950 spike protein (1-1211) LumSynth construct
MFVFLVLLPLVSSQCVNLTTRTQLPPAYTNSFTRGVYYPDKVFRSSVLHSTQDLFLPFFSNVTWFHAIHVSGTNGTKRFDNPVLPFNDGVYFASTEKSNIIRGWIFGTTLDSKTQSLLIVNNATNVVIKVCEFQFCNDPFLGVYYHKNNKSWMESEFRVYSSANNCTFEYVSQPFLMDLEGKQGNFKNLREFVFKNIDGYFKIYSKHTPINLVRDLPQGFSALEPLVDLPIGINITRFQTLLALHRSYLTPGDSSSGWTAGAAAYYVGYLQPRTFLLKYNENGTITDAVDCALDPLSETKCTLKSFTVEKGIYQTSNFRVQPTESIVRFPNITNLCPFGEVFNATRFASVYAWNRKRISNCVADYSVLYNSASFSTFKCYGVSPTKLNDLCFTNVYADSFVIRGDEVRQIAPGQTGKIADYNYKLPDDFTGCVIAWNSNNLDSKVGGNYNYLYRLFRKSNLKPFERDISTEIYQAGSTPCNGVEGFNCYFPLQSYGFQPTNGVGYQPYRVVVLSFELLHAPATVCGPKKSTNLVKNKCVNFNFNGLTGTGVLTESNKKFLPFQQFGRDIADTTDAVRDPQTLEILDITPCSFGGVSVITPGTNTSNQVAVLYQDVNCTEVPVAIHADQLTPTWRVYSTGSNVFQTRAGCLIGAEHVNNSYECDIPIGAGICASYQTQTNSPRRARSVASQSIIAYTMSLGAENSVAYSNNSIAIPTNFTISVTTEILPVSMTKTSVDCTMYICGDSTECSNLLLQYGSFCTQLNRALTGIAVEQDKNTQEVFAQVKQIYKTPPIKDFGGFNFSQILPDPSKPSKRSFIEDLLFNKVTLADAGFIKQYGDCLGDIAARDLICAQKFNGLTVLPPLLTDEMIAQYTSALLAGTITSGWTFGAGAALQIPFAMQMAYRFNGIGVTQNVLYENQKLIANQFNSAIGKIQDSLSSTASALGKLQDVVNQNAQALNTLVKQLSSNFGAISSVLNDILSRLDKVEAEVQIDRLITGRLQSLQTYVTQQLIRAAEIRASANLAATKMSECVLGQSKRVDFCGKGYHLMSFPQSAPHGVVFLHVTYVPAQEKNFTTAPAICHDGKAHFPREGVFVSNGTHWFVTQRNFYEPQIITTDNTFLSGNCDVVIGIVNNTVYDPLQPELDSFKEELDKYFKNHTSPDVDLGDISGINASVVNIQKEIDRLNEVAKNLNESLIDLQELGKYEQYIKGGGSGGGQIYEGKLTAEGLRFGIVASRFNHALVDRLVEGAIDAIVRHGGREEDITLVRVPGSWEIPVAAGELARKEDIDAVIAIGVLIRGATPHFDYIASEVSKGLADLSLELRKPITFGVITADTLEQAIERAGTKHGNKGWEAALSAIEMANLFKSLR

SEQ ID NO: 3683 - protein, 1371 aa, Artificial Sequence
  SARS-CoV-2/USA/UT-00034/2020__EPI_ISL_417977 spike protein (1-1211) LumSynth construct
MFVFLVLLPLVSSQCVNLTTRTQLPPAYTNSFTRGVYYPDKVFRSSVLHSTQDLFLPFFSNVTWFHAIHVSGTNGTKRFDNPVLPFNDGVYFASTEKSNIIRGWIFGTTLDSKTQSLLIVNNATNVVIKVCEFQFCNDPFLGVYYYKNNKSWMESEFRVYSSANNCTFEYVSQPFLMDLEGKQGNFKNLREFVFKNIDGYFKIYSKHTPINLVRDLPQGFSALEPLVDLPIGINITRFQTLLALHRSYLTPGDSSSGWTAGAAAYYVGYLQPRTFLLKYNENGTITDAVDCALDPLSETKCTLKSFTVEKGIYQTSNFRVQPTESIVRFPNITNLCPFGEVFNATRFASVYAWNRKRISNCVADYSVLYNSASFSTFKCYGVSPTKLNDLCFTNVYADSFVIRGDEVRQIAPGQTGKIADYNYKLPDDFTGCVIAWNSNNLDSKVGGNYNYLYRLFRKSNLKPFERDISTEIYQAGSTPCNGVEGFNCYFPLQSYGFQPTNGVGYQPYRVVVLSFELLHAPATVCGPKKSTNLVKNKCVNFNFNGLTGTGVLTESNKKFLPFQQFGRDIADTTDAVRDPQTLEILDITPCSFGGVSVITPGTNTSNQVAVLYQGVNCTEVPVAIHADQLTPTWRVYSTGSNVFQTRAGCLIGAEHVNNSYECDIPIGAGICASYQTQTNSPRRARSVASQSIIAYTMSLGAENSVAYSNNSIAIPTNFTISVTTEILPVSMTKTSVDCTMYICGDSTECSNLLLQYGSFCTQLNRALTGIAVEQDKNTQEVFAQVKQIYKTPPIKDFGGFNFSQILPDPSKPSKRSFIEDLLFNKVTLADAGFIKQYGDCLGDIAARDLICAQKFNGLTVLPPLLTDEMIAQYTSALLAGTITSGWTFGAGAALQIPFAMQMAYRFNGIGVTQNVLYENQKLIANQFNSAIGKIQDSLSSTASALGKLQDVVNQNAQALNTLVKQLSSNFGAISSVLNDILSRLDKVEAEVQIDRLITGRLQSLQTYVTQQLIRAAEIRASANLAATKMSECVLGQSKRVDFCGKGYHLMSFPQSAPHGVVFLHVTYVPAQEKNFTTAPAICHDGKAHFPREGVFVSNGTHWFVTQRNFYEPQIITTDNTFVSGNCDVVIGIVNNTVYDPLQPELDSFKEELDKYFKNHTSPDVDLGDISGINASVVNIQKEIDRLNEVAKNLNESLIDLQELGKYEQYIKGGGSGGGQIYEGKLTAEGLRFGIVASRFNHALVDRLVEGAIDAIVRHGGREEDITLVRVPGSWEIPVAAGELARKEDIDAVIAIGVLIRGATPHFDYIASEVSKGLADLSLELRKPITFGVITADTLEQAIERAGTKHGNKGWEAALSAIEMANLFKSLR

SEQ ID NO: 3684 - protein, 1371 aa, Artificial Sequence
  SARS-CoV-2/USA/UT-00033/2020__EPI_ISL_417976 spike protein (1-1211) LumSynth construct
MFVFLVLLPLVSSQCVNLTTRTQLPPAYTNSFTRGVYYPDKVFRSSVLHSTQDLFLPFFSNVTWFHAIHVSGTNGTKRFDNPVLPFNDGVYFASTEKSNIIRGWIFGTTLDSKTQSLLIVNNATNVVIKVCEFQFCNDPFLGVYYHKNNKSWMESEFRVYSSANNCTFEYVSQPFLMDLEGKQGNFKNLREFVFKNIDGYFKIYSKHTPINLVRDLPQGFSALEPLVDLPIGINITRFQTLLALHRSYLTPGDSSSGLTAGAAAYYVGYLQPRTFLLKYNENGTITDAVDCALDPLSETKCTLKSFTVEKGIYQTSNFRVQPTESIVRFPNITNLCPFGEVFNATRFASVYAWNRKRISNCVADYSVLYNSASFSTFKCYGVSPTKLNDLCFTNVYADSFVIRGDEVRQIAPGQTGKIADYNYKLPDDFTGCVIAWNSNNLDSKVGGNYNYLYRLFRKSNLKPFERDISTEIYQAGSTPCNGVEGFNCYFPLQSYGFQPTNGVGYQPYRVVVLSFELLHAPATVCGPKKSTNLVKNKCVNFNFNGLTGTGVLTESNKKFLPFQQFGRDIADTTDAVRDPQTLEILDITPCSFGGVSVITPGTNTSNQVAVLYQGVNCTEVPVAIHADQLTPTWRVYSTGSNVFQTRAGCLIGAEHVNNSYECDIPIGAGICASYQTQTNSPRRARSVASQSIIAYTMSLGAENSVAYSNNSIAIPTNFTISVTTEILPVSMTKTSVDCTMYICGDSTECSNLLLQYGSFCTQLNRALTGIAVEQDKNTQEVFAQVKQIYKTPPIKDFGGFNFSQILPDPSKPSKRSFIEDLLFNKVTLADAGFIKQYGDCLGDIAARDLICAQKFNGLTVLPPLLTDEMIAQYTSALLAGTITSGWTFGAGAALQIPFAMQMAYRFNGIGVTQNVLYENQKLIANQFNSAIGKIQDSLSSTASALGKLQDVVNQNAQALNTLVKQLSSNFGAISSVLNDILSRLDKVEAEVQIDRLITGRLQSLQTYVTQQLIRAAEIRASANLAATKMSECVLGQSKRVDFCGKGYHLMSFPQSAPHGVVFLHVTYVPAQEKNFTTAPAICHDGKAHFPREGVFVSNGTHWFVTQRNFYEPQIITTDNTFVSGNCDVVIGIVNNTVYDPLQPELDSFKEELDKYFKNHTSPDVDLGDISGINASVVNIQKEIDRLNEVAKNLNESLIDLQELGKYEQYIKGGGSGGGQIYEGKLTAEGLRFGIVASRFNHALVDRLVEGAIDAIVRHGGREEDITLVRVPGSWEIPVAAGELARKEDIDAVIAIGVLIRGATPHFDYIASEVSKGLADLSLELRKPITFGVITADTLEQAIERAGTKHGNKGWEAALSAIEMANLFKSLR

SEQ ID NO: 3685 - protein, 1371 aa, Artificial Sequence
  SARS-CoV-2/USA/WI-13/2020__EPI_ISL_417516 spike protein (1-1211) LumSynth construct
MFVFLVLLPLVSSQCVNLTTRTQLPPAYTNSFTRGVYYPDKVFRSSVLHSTQDLFLPFFSNVTWFHAIHVSGTNGTKRFDNPVLPFNDGVYFASTEKSNIIRGWIFGTTLDSKTQSLLIVNNATNVVIKVCEFQFCNDPFLGVYYHKNNKSWMESEFRVYSSANNCTFEYVSQPFLMDLEGKQGNFKNLREFVFKNIDGYFKIYSKHTPINLVRDLPQGFSALEPLVDLPIGINITRFQTLLALHRSYLTPGDSSSGWTAGAAAYYVGYLQPRTFLLKYNENGTITDAVDCALDPLSETKCTLKSFTVEKGIYQTSNFRVLPTESIVRFPNITNLCPFGEVFNATRFASVYAWNRKRISNCVADYSVLYNSASFSTFKCYGVSPTKLNDLCFTNVYADSFVIRGDEVRQIAPGQTGKIADYNYKLPDDFTGCVIAWNSNNLDSKVGGNYNYLYRLFRKSNLKPFERDISTEIYQAGSTPCNGVEGFNCYFPLQSYGFQPTNGVGYQPYRVVVLSFELLHAPATVCGPKKSTNLVKNKCVNFNFNGLTGTGVLTESNKKFLPFQQFGRDIADTTDAVRDPQTLEILDITPCSFGGVSVITPGTNTSNQVAVLYQGVNCTEVPVAIHADQLTPTWRVYSTGSNVFQTRAGCLIGAEHVNNSYECDIPIGAGICASYQTQTNSPRRARSVASQSIIAYTMSLGAENSVAYSNNSIAIPTNFTISVTTEILPVSMTKTSVDCTMYICGDSTECSNLLLQYGSFCTQLNRALTGIAVEQDKNTQEVFAQVKQIYKTPPIKDFGGFNFSQILPDPSKPSKRSFIEDLLFNKVTLADAGFIKQYGDCLGDIAARDLICAQKFNGLTVLPPLLTDEMIAQYTSALLAGTITSGWTFGAGAALQIPFAMQMAYRFNGIGVTQNVLYENQKLIANQFNSAIGKIQDSLSSTASALGKLQDVVNQNAQALNTLVKQLSSNFGAISSVLNDILSRLDKVEAEVQIDRLITGRLQSLQTYVTQQLIRAAEIRASANLAATKMSECVLGQSKRVDFCGKGYHLMSFPQSAPHGVVFLHVTYVPAQEKNFTTAPAICHDGKAHFPREGVFVSNGTHWFVTQRNFYEPQIITTDNTFVSGNCDVVIGIVNNTVYDPLQPELDSFKEELDKYFKNHTSPDVDLGDISGINASVVNIQKEIDRLNEVAKNLNESLIDLQELGKYEQYIKGGGSGGGQIYEGKLTAEGLRFGIVASRFNHALVDRLVEGAIDAIVRHGGREEDITLVRVPGSWEIPVAAGELARKEDIDAVIAIGVLIRGATPHFDYIASEVSKGLADLSLELRKPITFGVITADTLEQAIERAGTKHGNKGWEAALSAIEMANLFKSLR

SEQ ID NO: 3686 - protein, 1370 aa, Artificial Sequence
  SARS-CoV-2/India/1-27/2020__EPI_ISL_413522 spike protein (1-1210) LumSynth construct
MFVFLVLLPLVSSQCVNLTTRTQLPPAYTNSFTRGVYYPDKVFRSSVLHSTQDLFLPFFSNVTWFHAIHVSGTNGTKRFDNPVLPFNDGVYFASTEKSNIIRGWIFGTTLDSKTQSLLIVNNATNVVIKVCEFQFCNDPFLGVYHKNNKSWMESEFRVYSSANNCTFEYVSQPFLMDLEGKQGNFKNLREFVFKNIDGYFKIYSKHTPINLVRDLPQGFSALEPLVDLPIGINITRFQTLLALHRSYLTPGDSSSGWTAGAAAYYVGYLQPRTFLLKYNENGTITDAVDCALDPLSETKCTLKSFTVEKGIYQTSNFRVQPTESIVRFPNITNLCPFGEVFNATRFASVYAWNRKRISNCVADYSVLYNSASFSTFKCYGVSPTKLNDLCFTNVYADSFVIRGDEVIQIAPGQTGKIADYNYKLPDDFTGCVIAWNSNNLDSKVGGNYNYLYRLFRKSNLKPFERDISTEIYQAGSTPCNGVEGFNCYFPLQSYGFQPTNGVGYQPYRVVVLSFELLHAPATVCGPKKSTNLVKNKCVNFNFNGLTGTGVLTESNKKFLPFQQFGRDIADTTDAVRDPQTLEILDITPCSFGGVSVITPGTNTSNQVAVLYQDVNCTEVPVAIHADQLTPTWRVYSTGSNVFQTRAGCLIGAEHVNNSYECDIPIGAGICASYQTQTNSPRRARSVASQSIIAYTMSLGAENSVAYSNNSIAIPTNFTISVTTEILPVSMTKTSVDCTMYICGDSTECSNLLLQYGSFCTQLNRALTGIAVEQDKNTQEVFAQVKQIYKTPPIKDFGGFNFSQILPDPSKPSKRSFIEDLLFNKVTLADAGFIKQYGDCLGDIAARDLICAQKFNGLTVLPPLLTDEMIAQYTSALLAGTITSGWTFGAGAALQIPFAMQMAYRFNGIGVTQNVLYENQKLIANQFNSAIGKIQDSLSSTASALGKLQDVVNQNAQALNTLVKQLSSNFGAISSVLNDILSRLDKVEAEVQIDRLITGRLQSLQTYVTQQLIRAAEIRASANLAATKMSECVLGQSKRVDFCGKGYHLMSFPQSAPHGVVFLHVTYVPAQEKNFTTAPAICHDGKAHFPREGVFVSNGTHWFVTQRNFYEPQIITTDNTFVSGNCDVVIGIVNNTVYDPLQPELDSFKEELDKYFKNHTSPDVDLGDISGINASVVNIQKEIDRLNEVAKNLNESLIDLQELGKYEQYIKGGGSGGGQIYEGKLTAEGLRFGIVASRFNHALVDRLVEGAIDAIVRHGGREEDITLVRVPGSWEIPVAAGELARKEDIDAVIAIGVLIRGATPHFDYIASEVSKGLADLSLELRKPITFGVITADTLEQAIERAGTKHGNKGWEAALSAIEMANLFKSLR

SEQ ID NO: 3687 - protein, 1365 aa, Artificial Sequence
  SARS-CoV-2/pangolin/Guangxi/P4L/2017__EPI_ISL_410538 spike protein (1-1205) LumSynth construct
MFVFLFVLPLVSSQCVNLTTRTGIPPGYTNSSTRGVYYPDKVFRSSILHLTQDLFLPFFSNVTWFNTINYQGGFKKFDNPVLPFNDGVYFASTEKSNIIRGWIFGTTLDARTQSLLIVNNATNVVIKVCEFQFCTDPFLGVYYHNNNKTWVENEFRVYSSANNCTFEYISQPFLMDLEGKQGNFKNLREFVFKNVDGYFKIYSKHTPIDLVRDLPRGFAALEPLVDLPIGINITRFQTLLALHRSYLTPGNLESGWTTGAAAYYVGYLQQRTFLLSYNQNGTITDAVDCSLDPLSETKCTLKSLTVEKGIYQTSNFRVQPTISIVRFPNITNLCPFGEVFNASKFASVYAWNRKRISNCVADYSVLYNSTSFSTFKCYGVSPTKLNDLCFTNVYADSFVVKGDEVRQIAPGQTGVIADYNYKLPDDFTGCVIAWNSVKQDALTGGNYGYLYRLFRKSKLKPFERDISTEIYQAGSTPCNGQVGLNCYYPLERYGFHPTTGVNYQPFRVVVLSFELLNGPATVCGPKLSTTLVKDKCVNFNFNGLTGTGVLTTSKKQFLPFQQFGRDISDTTDAVRDPQTLEILDITPCSFGGVSVITPGTNTSNQVAVLYQDVNCTEVPMAIHAEQLTPAWRVYSAGANVFQTRAGCLVGAEHVNNSYECDIPVGAGICASYHSMSSLRSVNQRSIIAYTMSLGAENSVAYSNNSIAIPTNFTISVTTEILPVSMTKTSVDCTMYICGDSIECSNLLLQYGSFCTQLNRALTGIAVEQDKNTQEVFAQVKQIYKTPPIKDFGGFNFSQILPDPSKPSKRSFIEDLLFNKVTLADAGFIKQYGDCLGDIAARDLICAQKFNGLTVLPPLLTDEMIAQYTSALLAGTITSGWTFGAGAALQIPFAMQMAYRFNGIGVTQNVLYENQKLIANQFNSAIGKIQDSLSSTASALGKLQDVVNQNAQALNTLVKQLSSNFGAISSVLNDILSRLDKVEAEVQIDRLITGRLQSLQTYVTQQLIRAAEIRASANLAATKMSECVLGQSKRVDFCGKGYHLMSFPQSAPHGVVFLHVTYVPAQEKNFTTAPAICHEGKAHFPREGVFVSNGTHWFITQRNFYEPQIITTDNTFVSGSCDVVIGIVNNTVYDPLQPELDSFKEELDKYFKNHTSPDVDLGDISGINASVVNIQKEIDRLNEVAKNLNESPIDLQELGKYEQYIKGGGSGGGQIYEGKLTAEGLRFGIVASRFNHALVDRLVEGAIDAIVRHGGREEDITLVRVPGSWEIPVAAGELARKEDIDAVIAIGVLIRGATPHFDYIASEVSKGLADLSLELRKPITFGVITADTLEQAIERAGTKHGNKGWEAALSAIEMANLFKSLR

SEQ ID NO: 3688 - protein, 1365 aa, Artificial Sequence
  SARS-CoV-2/pangolin/Guangxi/P5L/2017__EPI_ISL_410540 spike protein (1-1205) LumSynth construct
MFVFLFVLPLVSSQCVNLTTRTGIPPGYTNSSTRGVYYPDKVFRSSILHLTQDLFLPFFSNVTWFNTINYQGGFKKFDNPVLPFNDGVYFASTEKSNIIRGWIFGTTLDARTQSLLIVNNATNVVIKVCEFQFCTDPFLGVYYHNNNKTWVENEFRVYSSANNCTFEYISQPFLMDLEGKQGNFKNLREFVFKNVDGYFKIYSKHTPIDLVRDLPRGFAALEPLVDLPIGINITRFQTLLALHRSYLTPGKLESGWTTGAAAYYVGYLQQRTFLLSYNQNGTITDAVDCSLDPLSETKCTLKSLTVEKGIYQTSNFRVQPTISIVRFPNITNLCPFGEVFNASKFASVYAWNRKRISNCVADYSVLYNSTSFSTFKCYGVSPTKLNDLCFTNVYADSFVVKGDEVRQIAPGQTGVIADYNYKLPDDFTGCVIAWNSVKQDALTGGNYGYLYRLFRKSKLKPFERDISTEIYQAGSTPCNGQVGLNCYYPLERYGFHPTTGVNYQPFRVVVLSFELLNGPATVCGPKLSTTLVKDKCVNFNFNGLTGTGVLTTSKKQFLPFQQFGRDISDTTDAVRDPQTLEILDITPCSFGGVSVITPGTNTSNQVAVLYQDVNCTEVPMAIHAEQLTPAWRVYSAGANVFQTRAGCLVGAEHVNNSYECDIPVGAGICASYHSMSSFRSVNQRSIIAYTMSLGAENSVAYSNNSIAIPTNFTISVTTEILPVSMTKTSVDCTMYICGDSIECSNLLLQYGSFCTQLNRALTGIAVEQDKNTQEVFAQVKQIYKTPPIKDFGGFNFSQILPDPSKPSKRSFIEDLLFNKVTLADAGFIKQYGDCLGDIAARDLICAQKFNGLTVLPPLLTDEMIAQYTSALLAGTITSGWTFGAGAALQIPFAMQMAYRFNGIGVTQNVLYENQKLIANQFNSAIGKIQDSLSSTASALGKLQDVVNQNAQALNTLVKQLSSNFGAISSVLNDILSRLDKVEAEVQIDRLITGRLQSLQTYVTQQLIRAAEIRASANLAATKMSECVLGQSKRVDFCGKGYHLMSFPQSAPHGVVFLHVTYVPAQEKNFTTAPAICHEGKAHFPREGVFVSNGTHWFITQRNFYEPQIITTDNTFVSGSCDVVIGIVNNTVYDPLQPELDSFKEELDKYFKNHTSPDVDLGDISGINASVVNIQKEIDRLNEVAKNLNESLIDLQELGKYEQYIKGGGSGGGQIYEGKLTAEGLRFGIVASRFNHALVDRLVEGAIDAIVRHGGREEDITLVRVPGSWEIPVAAGELARKEDIDAVIAIGVLIRGATPHFDYIASEVSKGLADLSLELRKPITFGVITADTLEQAIERAGTKHGNKGWEAALSAIEMANLFKSLR

SEQ ID NO: 3689 - protein, 1365 aa, Artificial Sequence
  SARS-CoV-2/pangolin/Guangxi/P5E/2017__EPI_ISL_410541 spike protein (1-1205) LumSynth construct
MFVFLFVLPLVSSQCVNLTTRTGIPPGYTNSSTRGVYYPDKVFRSSILHLTQDLFLPFFSNVTWFNTITYQGGSKKFDNPVLPFNDGVYFASTEKSNIIRGWIFGTTLDARTQSLLIVNNATNVVIKVCEFQFCTDPFLGVYYHNNNKTWVENEFRVYSSANNCTFEYISQPFLMDLEGKQGNFKNLREFVFKNVDGYFKIYSKHTPIDLVRDLPRGFAALEPLVDLPIGINITRFQTLLALHRSYLTPGKLESGWTTGAAAYYVGYLQQRTFLLSYNQNGTITDAVDCSLDPLSETKCTLKSLTVEKGIYQTSNFRVQPTISIVRFPNITNLCPFGEVFNASKFASVYAWNRKRISNCVADYSVLYNSTSFSTFKCYGVSPTKLNDLCFTNVYADSFVVKGDEVRQIAPGQTGVIADYNYKLPDDFTGCVIAWNSVKQDALTGDNYGYLYRLFRKSKLKPFERDISTEIYQAGSTPCNGQVGLNCYYPLERYGFHPTTGVNYQPFRVVVLSFELLNGPATVCGPKLSTTLVKDKCVNFNFNGLTGTGVLTTSKKQFLPFQQFGRDISDTTDAVRDPQTLEILDITPCSFGGVSVITPGTNTSNQVAVLYQDVNCTEVPMAIHAEQLTPAWRVYSAGANVFQTRAGCLVGAEHVNNSYECDIPVGAGICASYHSMSSFRSVNQRSIIAYTMSLGAENSVAYSNNSIAIPTNFTISVTTEILPVSMTKTSVDCTMYICGDSIECSNLLLQYGSFCTQLNRALTGIAVEQDKNTQEVFAQVKQIYKTPPIKDFGGFNFSQILPDPSKPSKRSFIEDLLFNKVTLADAGFIKQYGDCLGDIAARDLICAQKFNGLTVLPPLLTDEMIAQYTSALLAGTITSGWTFGAGAALQIPFAMQMAYRFNGIGVTQNVLYENQKLIANQFNSAIGKIQDSLSSTASALGKLQDVVNQNAQALNTLVKQLSSNFGAISSVLNDILSRLDKVEAEVQIDRLITGRLQSLQTYVTQQLIRAAEIRASANLAATKMSECVLGQSKRVDFCGKGYHLMSFPQSAPHGVVFLHVTYVPAQEKNFTTAPAICHEGKAHFPREGVFVSNGTHWFITQRNFYEPQIITTDNTFVSGSCDVVIGIVNNTVYDPLQPELDSFKEELDKYFKNHTSPDVDLGDISGINASVVNIQKEIDRLNEVAKNLNESLIDLQELGKYEQYIKGGGSGGGQIYEGKLTAEGLRFGIVASRFNHALVDRLVEGAIDAIVRHGGREEDITLVRVPGSWEIPVAAGELARKEDIDAVIAIGVLIRGATPHFDYIASEVSKGLADLSLELRKPITFGVITADTLEQAIERAGTKHGNKGWEAALSAIEMANLFKSLR

SEQ ID NO: 3690 - protein, 1363 aa, Artificial Sequence
  SARS-CoV-2/pangolin/Guangxi/P1E/2017__EPI_ISL_410539 spike protein (1-1203) LumSynth construct
MFVFLFVLPLVSSQCVNLTTRTGIQPGYTNSSTRGVYYPDKVFRSSILHLTQDLFLPFFSNVTWFNTINYQGGFKKFDNPVLPFNDGVYFASTEKSNIIRGWIFGTTLDARTQSLLIVNNATNVVIKVCEFQFCTDPFLGVYYHNNNKTWVENEFRVYSSANNCTFEYISQPFLMDLEGKQGNFKNLREFVFKNVDGYFKIYSKHTPIDLVRDLPRGFAALEPLVDLPIGINITRFQTLLALHRSYLTPGKLESGWTTGAAAYYVGYLQQRTFLLSYNQNGTITDAVDCSLDPLSETKCTLKSLTVEKGIYQTSNFRVQPTISIVRFPNITNLCPFGEVFNASKFASVYAWNRKRISNCVADYSVLYNSTSFSTFKCYGVSPTKLNDLCFTNVYADSFVVKGDEVRQIAPGQTGVIADYNYKLPDDFTGCVIAWNSVKQDALTGGNYLYRLFRKSKLKPFERDISTEIYQAGSTPCNGQVGLNCYYPLERYGFHPTTGVNYQPFRVVVLSFELLNGPATVCGPKLSTTLVKDKCVNFNFNGLTGTGVLTTSKKQFLPFQQFGRDISDTTDAVRDPQTLEILDITPCSFGGVSVITPGTNTSNQVAVLYQDVNCTEVPMAIHAEQLTPAWRVYSAGANVFQTRAGCLVGAEHVNNSYECDIPVGAGICASYHSMSSLRSVNQRSIIAYTMSLGAENSVAYSNNSIAIPTNFTISVTTEILPVSMTKTSVDCTMYICGDSIECSNLLLQYGSFCTQLNRALTGIAVEQDKNTQEVFAQVKQIYKTPPIKDFGGFNFSQILPDPSKPSKRSFIEDLLFNKVTLADAGFIKQYGDCLGDIAARDLICAQKFNGLTVLPPLLTDEMIAQYTSALLAGTITSGWTFGAGAALQIPFAMQMAYRFNGIGVTQNVLYENQKLIANQFNSAIGKIQDSLSSTASALGKLQDVVNQNAQALNTLVKQLSSNFGAISSVLNDILSRLDKVEAEVQIDRLITGRLQSLQTYVTQQLIRAAEIRASANLAATKMSECVLGQSKRVDFCGKGYHLMSFPQSAPHGVVFLHVTYVPAQEKNFTTAPAICHEGKAHFPREGVFVSNGTHWFITQRNFYEPQIITTDNTFVSGSCDVVIGIVNNTVYDPLQPELDSFKEELDKYFKNHTSPDVDLGDISGINASVVNIQKEIDRLNEVAKNLNESLIDLQELGKYEQYIKGGGSGGGQIYEGKLTAEGLRFGIVASRFNHALVDRLVEGAIDAIVRHGGREEDITLVRVPGSWEIPVAAGELARKEDIDAVIAIGVLIRGATPHFDYIASEVSKGLADLSLELRKPITFGVITADTLEQAIERAGTKHGNKGWEAALSAIEMANLFKSLR

SEQ ID NO: 3691 - protein, 1371 aa, Artificial Sequence; identical to SEQ ID NO: 85
  SARS-CoV-2/Wuhan/WIV05/2019__EPI_ISL_402128 spike protein (1-1211)(K986P_V987P) LumSynth construct

SEQ ID NO: 3692 - protein, 1367 aa, Artificial Sequence; identical to SEQ ID NO: 86
  SARS-CoV-2/bat/Yunnan/RaTG13/2013__EPI_ISL_402131 spike protein (1-1207)(K982P_V983P) LumSynth construct

SEQ ID NO: 3693 - protein, 1371 aa, Artificial Sequence; identical to SEQ ID NO: 87
  SARS-CoV-2/Wuhan/HBCDC-HB-01/2019__EPI_ISL_402132 spike protein (1-1211)(K986P_V987P) LumSynth construct

SEQ ID NO: 3694 - protein, 1371 aa, Artificial Sequence; identical to SEQ ID NO: 88
  SARS-CoV-2/Guangdong/20SF028/2020__EPI_ISL_403936 spike protein (1-1211)(K986P_V987P) LumSynth construct

SEQ ID NO: 3695 - protein, 1371 aa, Artificial Sequence; identical to SEQ ID NO: 89
  SARS-CoV-2/Shenzhen/SZTH-001/2020__EPI_ISL_406592 spike protein (1-1211)(K986P_V987P) LumSynth construct

SEQ ID NO: 3696 - protein, 1371 aa, Artificial Sequence; identical to SEQ ID NO: 90
  SARS-CoV-2/Shenzhen/SZTH-004/2020__EPI_ISL_406595 spike protein (1-1211)(K986P_V987P) LumSynth construct

SEQ ID NO: 3697 - protein, 1371 aa, Artificial Sequence; identical to SEQ ID NO: 91
  SARS-CoV-2/France/IDF0372/2020__EPI_ISL_406596 spike protein (1-1211)(K986P_V987P) LumSynth construct

SEQ ID NO: 3698 - protein, 1371 aa, Artificial Sequence; identical to SEQ ID NO: 92
  SARS-CoV-2/Australia/VIC01/2020__EPI_ISL_406844 spike protein (1-1211)(K986P_V987P) LumSynth construct

SEQ ID NO: 3699 - protein, 1371 aa, Artificial Sequence; identical to SEQ ID NO: 93
  SARS-CoV-2/Germany/BavPat1/2020__EPI_ISL_406862 spike protein (1-1211)(K986P_V987P) LumSynth construct

SEQ ID NO: 3700 - protein, 1371 aa, Artificial Sequence
  SARS-CoV-2/Wuhan/HBCDC-HB-02/2020__EPI_ISL_412978 spike protein (1-1211)(K986P_V987P) LumSynth construct
MFVFLVLLPLVSSQCVNLTTRTQLPPAYTNSFTRGVYYPDKVFRSSVLHSTQDLFLPFFSNVTWFHAIHVSGTNGTKRFDNPVLPFNDGVYFASTEKSNIIRGWIFGTTLDSKTQSLLIVNNATNVVIKVCEFQFCNDPFLGVYYHKNNKSWMESEFRVYSSANNCTFEYVSQPFLMDLEGKQGNFKNLREFVFKNIDGYFKIYSKHTPINLVRDLPQGFSALEPLVDLPIGINITRFQTLLALHRSYLTPGDSSSGWTAGAAAYYVGYLQPRTFLLKYNENGTITDAVDCALDPLSETKCTLKSFTVEKGIYQTSNFRVQPTESIVRFPNITNLCPFGEVFNATRFASVYAWNRKRISNCVADYSVLYNSASFSTFKCYGVSPTKLNDLCFTNVYADSFVIRGDEVRQIAPGQTGKIADYNYKLPDDFTGCVIAWNSNNLDSKVGGNYNYLYRLFRKSNLKPFERDISTEIYQAGSTPCNGVEGFNCYFPLQSYGFQPTNGVGYQPYRVVVLSFELLHAPATVCGPKKSTNLVKNKCVNFNFNGLTGTGVLTESNKKFLPFQQFGRDIADTTDAVRDPQTLEILDITPCSFGGVSVITPGTNTSNQVAVLYQDVNCTEVPVAIHADQLTPTWRVYSTGSNVFQTRAGCLIGAEHVNNSYECDIPIGAGICASYQTQTNSPRRARSVASQSIIAYTMSLGAENSVAYSNNSIAIPTNFTISVTTEILPVSMTKTSVDCTMYICGDSTECSNFLLQYGSFCTQLNRALTGIAVEQDKNTQEVFAQVKQIYKTPPIKDFGGFNFSQILPDPSKPSKRSFIEDLLFNKVTLADAGFIKQYGDCLGDIAARDLICAQKFNGLTVLPPLLTDEMIAQYTSALLAGTITSGWTFGAGAALQIPFAMQMAYRFNGIGVTQNVLYENQKLIANQFNSAIGKIQDSLSSTASALGKLQDVVNQNAQALNTLVKQLSSNFGAISSVLNDILSRLDPPEAEVQIDRLITGRLQSLQTYVTQQLIRAAEIRASANLAATKMSECVLGQSKRVDFCGKGYHLMSFPQSAPHGVVFLHVTYVPAQEKNFTTAPAICHDGKAHFPREGVFVSNGTHWFVTQRNFYEPQIITTDNTFVSGNCDVVIGIVNNTVYDPLQPELDSFKEELDKYFKNHTSPDVDLGDISGINASVVNIQKEIDRLNEVAKNLNESLIDLQELGKYEQYIKGGGSGGGQIYEGKLTAEGLRFGIVASRFNHALVDRLVEGAIDAIVRHGGREEDITLVRVPGSWEIPVAAGELARKEDIDAVIAIGVLIRGATPHFDYIASEVSKGLADLSLELRKPITFGVITADTLEQAIERAGTKHGNKGWEAALSAIEMANLFKSLR

SEQ ID NO: 3701 - protein, 1371 aa, Artificial Sequence
  SARS-CoV-2/Australia/QLD02/2020__EPI_ISL_407896 spike protein (1-1211)(K986P_V987P) LumSynth construct
MFVFLVLLPLVSSQCVNLTTRTQLPPAYTNSFTRGVYYPDKVFRSSVLHSTQDLFLPFFSNVTWFHAIHVSGTNGTKRFDNPVLPFNDGVYFASTEKSNIIRGWIFGTTLDSKTQSLLIVNNATNVVIKVCEFQFCNDPFLGVYYHKNNKSWMESEFRVYSSANNCTFEYVSQPFLMDLEGKQGNFKNLREFVFKNIDGYFKIYSKHTPINLVRDLPQGFSALEPLVDLPIGINITRFQTLLALHRSYLTPGDSSSGWTAGAAAYYVGYLQPRTFLLKYNENGTITDAVDCALDPLSETKCTLKSFTVEKGIYQTSNFRVQPTESIVRFPNITNLCPFGEVFNATRFASVYAWNRKRISNCVADYSVLYNSASFSTFKCYGVSPTKLNDLCFTNVYADSFVIRGDEVRQIAPGQTGKIADYNYKLPDDFTGCVIAWNSNNLDSKVGGNYNYLYRLFRKSNLKPFERDISTEIYQAGSTPCNGVEGFNCYFPLQSYGFQPTNGVGYQPYRVVVLSFELLHAPATVCGPKKSTNLVKNKCVNFNFNGLTGTGVLTESNKKFLPFQQFGRDIADTTDAVRDPQTLEILDITPCSFGGVSVITPGTNTSNQVAVLYQDVNCTEVPVAIHADQLTPTWRVYSTGSNVFQTRAGCLIGAEHVNNSYECDIPIGAGICASYQTQTNSPRRARSVASQSIIAYTMSLGAENSVAYSNNSIAIPTNFTISVTTEILPVSMTKTSVDCTMYICGDSTECSNLLLQYGSFCTQLNRALTGIAVEQDKNTQEVFAQVKQIYKTPPIKDFGGFNFSQILPDPSKPSKRSFIEDLLFNKVTLADAGFIKQYGDCLGDIAARDLICAQKFNGLTVLPPLLTDEMIAQYTSALLAGTITSGWTFGAGAALQIPFAMQMAYRFNGIGVTQNVLYENQKLIANQFNSAIGKIQDSLSSTASALGKLQDVVNQNAQALNTLVKQLSSNFGAISSVLNDILSRLDPPEAEVQIDRLITGRLQSLQTYVTQQLIRAAEIRASANLAATKMSECVLGQSKRVDFCGKGYHLMSFPQSAPHGVVFLHVTYVPAQEKNFTTAPAICHDGKAHFPREGVFVSNGTHWFVTQRNFYEPQIITTDNTFVSGNCDVVIGIVNNTVYDPLQLELDSFKEELDKYFKNHTSPDVDLGDISGINASVVNIQKEIDRLNEVAKNLNESLIDLQELGKYEQYIKGGGSGGGQIYEGKLTAEGLRFGIVASRFNHALVDRLVEGAIDAIVRHGGREEDITLVRVPGSWEIPVAAGELARKEDIDAVIAIGVLIRGATPHFDYIASEVSKGLADLSLELRKPITFGVITADTLEQAIERAGTKHGNKGWEAALSAIEMANLFKSLR

SEQ ID NO: 3702 - protein, 1371 aa, Artificial Sequence
  SARS-CoV-2/India/1-31/2020__EPI_ISL_413523 spike protein (1-1211)(K986P_V987P) LumSynth construct
MFVFLVLLPLVSSQCVNLTTRTQLPPAYTNSFTRGVYYPDKVFRSSVLHSTQDLFLPFFSNVTWFHAIHVSGTNGTKRFDNPVLPFNDGVYFASTEKSNIIRGWIFGTTLDSKTQSLLIVNNATNVVIKVCEFQFCNDPFLGVYYHKNNKSWMESEFRVYSSANNCTFEYVSQPFLMDLEGKQGNFKNLREFVFKNIDGYFKIYSKHTPINLVRDLPQGFSALEPLVDLPIGINITRFQTLLALHRSYLTPGDSSSGWTAGAAAYYVGYLQPRTFLLKYNENGTITDAVDCALDPLSETKCTLKSFTVEKGIYQTSNFRVQPTESIVRFPNITNLCPFGEVFNATRFASVYAWNRKRISNCVADYSVLYNSASFSTFKCYGVSPTKLNDLCFTNVYADSFVIRGDEVRQIAPGQTGKIADYNYKLPDDFTGCVIAWNSNNLDSKVGGNYNYLYRLFRKSNLKPFERDISTEIYQAGSTPCNGVEGFNCYFPLQSYGFQPTNGVGYQPYRVVVLSFELLHAPATVCGPKKSTNLVKNKCVNFNFNGLTGTGVLTESNKKFLPFQQFGRDIADTTDAVRDPQTLEILDITPCSFGGVSVITPGTNTSNQVAVLYQDVNCTEVPVAIHADQLTPTWRVYSTGSNVFQTRAGCLIGAEHVNNSYECDIPIGAGICASYQTQTNSPRRARSVASQSIIAYTMSLGAENSVAYSNNSIAIPTNFTISVTTEILPVSMTKTSVDCTMYICGDSTECSNLLLQYGSFCTQLNRALTGIAVEQDKNTQEVFAQVKQIYKTPPIKDFGGFNFSQILPDPSKPSKRSFIEDLLFNKVTLADAGFIKQYGDCLGDIAARDLICAQKFNGLTVLPPLLTDEMIAQYTSALLAGTITSGWTFGAGAALQIPFAMQMAYRFNGIGVTQNVLYENQKLIANQFNSVIGKIQDSLSSTASALGKLQDVVNQNAQALNTLVKQLSSNFGAISSVLNDILSRLDPPEAEVQIDRLITGRLQSLQTYVTQQLIRAAEIRASANLAATKMSECVLGQSKRVDFCGKGYHLMSFPQSAPHGVVFLHVTYVPAQEKNFTTAPAICHDGKAHFPREGVFVSNGTHWFVTQRNFYEPQIITTDNTFVSGNCDVVIGIVNNTVYDPLQPELDSFKEELDKYFKNHTSPDVDLGDISGINASVVNIQKEIDRLNEVAKNLNESLIDLQELGKYEQYIKGGGSGGGQIYEGKLTAEGLRFGIVASRFNHALVDRLVEGAIDAIVRHGGREEDITLVRVPGSWEIPVAAGELARKEDIDAVIAIGVLIRGATPHFDYIASEVSKGLADLSLELRKPITFGVITADTLEQAIERAGTKHGNKGWEAALSAIEMANLFKSLR

SEQ ID NO: 3703 - protein, 1371 aa, Artificial Sequence
  SARS-CoV-2/Guangdong/GD2020087-P0008/2020__EPI_ISL_413863 spike protein (1-1211)(K986P_V987P) LumSynth construct
MFVFLVLLPLVSSQCVNLTTRTQLPPAYTNSFTRGVYYPDKVFRSSVLHSTQDLFLPFFSNVTWFHAIHVSGTNGTKRFDNPVLPFNDGVYFASTEKSNIIRGWIFGTTLDSKTQSLLIVNNATNVVIKVCEFQFCNDPFLGVYYHKNNKSWMESEFRVYSSANNCTFEYVSQPFLMDLEGKQGNFKNLREFVFKNIDGYFKIYSKHTPINLVRDLPQGFSALEPLVDLPIGINITRFQTLLALHRSYLTPGDSSSGWTAGAAAYYVGYLQPRTFLLKYNENGTITDAVDCALDPLSETKCTLKSFTVEKGIYQTSNFRVQPTESIVRFPNITNLCPFGEVFNATRFASVYAWNRKRISNCVADYSVLYNSASFSTFKCYGVSPTKLNDLCFTNVYADSFVIRGDEVREIAPGQTGKIADYNYKLPDDFTGCVIAWNSNNLDSKVGGNYNYLYRLFRKSNLKPFERDISTEIYQAGSTPCNGVEGFNCYFPLQSYGFQPTNGVGYQPYRVVVLSFELLHAPATVCGPKKSTNLVKNKCVNFNFNGLTGTGVLTESNKKFLPFQQFGRDIADTTDAVRDPQTLEILDITPCSFGGVSVITPGTNTSNQVAVLYQDVNCTEVPVAIHADQLTPTWRVYSTGSNVFQTRAGCLIGAEHVNNSYECDIPIGAGICASYQTQTNSPRRARSVASQSIIAYTMSLGAENSVAYSNNSIAIPTNFTISVTTEILPVSMTKTSVDCTMYICGDSTECSNLLLQYGSFCTQLNRALTGIAVEQDKNTQEVFAQVKQIYKTPPIKDFGGFNFSQILPDPSKPSKRSFIEDLLFNKVTLADAGFIKQYGDCLGDIAARDLICAQKFNGLTVLPPLLTDEMIAQYTSALLAGTITSGWTFGAGAALQIPFAMQMAYRFNGIGVTQNVLYENQKLIANQFNSAIGKIQDSLSSTASALGKLQDVVNQNAQALNTLVKQLSSNFGAISSVLNDILSRLDPPEAEVQIDRLITGRLQSLQTYVTQQLIRAAEIRASANLAATKMSECVLGQSKRVDFCGKGYHLMSFPQSAPHGVVFLHVTYVPAQEKNFTTAPAICHDGKAHFPREGVFVSNGTHWFVTQRNFYEPQIITTDNTFVSGNCDVVIGIVNNTVYDPLQPELDSFKEELDKYFKNHTSPDVDLGDISGINASVVNIQKEIDRLNEVAKNLNESLIDLQELGKYEQYIKGGGSGGGQIYEGKLTAEGLRFGIVASRFNHALVDRLVEGAIDAIVRHGGREEDITLVRVPGSWEIPVAAGELARKEDIDAVIAIGVLIRGATPHFDYIASEVSKGLADLSLELRKPITFGVITADTLEQAIERAGTKHGNKGWEAALSAIEMANLFKSLR

SEQ ID NO: 3704 - protein, 1371 aa, Artificial Sequence
  SARS-CoV-2/Sweden/01/2020__EPI_ISL_411951 spike protein (1-1211)(K986P_V987P) LumSynth construct
MFVFLVLLPLVSSQCVNLTTRTQLPPAYTNSFTRGVYYPDKVFRSSVLHSTQDLFLPFFSNVTWFHAIHVSGTNGTKRFDNPVLPFNDGVYFASTEKSNIIRGWIFGTTLDSKTQSLLIVNNATNVVIKVCEFQFCNDPFLGVYYHKNNKSWMESEFRVYSSANNCTFEYVSQPFLMDLEGKQGNFKNLREFVFKNIDGYFKIYSKHTPINLVRDLPQGFSALEPLVDLPIGINITRFQTLLALHRSYLTPGDSSSGWTAGAAAYYVGYLQPRTFLLKYNENGTITDAVDCALDPLSETKCTLKSFTVEKGIYQTSNFRVQPTESIVRFPNITNLCPFGEVFNATRFASVYAWNRKRISNCVADYSVLYNSASFSTFKCYGVSPTKLNDLCFTNVYADSFVIRGDEVRQIAPGQTGKIADYNYKLPDDFTGCVIAWNSNNLDSKVGGNYNYLYRLFRKSNLKPFERDISTEIYQAGSTPCNGVEGFNCYFPLQSYGFQPTNGVGYQPYRVVVLSFELLHAPATVCGPKKSTNLVKNKCVNFNFNGLTGTGVLTESNKKFLPFQQFGRDIADTTDAVRDPQTLEILDITPCSFGGVSVITPGTNTSNQVAVLYQDVNCTEVPVAIHADQLTPTWRVYSTGSNVFQTRAGCLIGAEHVNNSYECDIPIGAGICASYQTQTNSPRRARSVASQSIIAYTMSLGAENSVAYSNNSIAIPTNFTISVTTEILPVSMTKTSVDCTMYICGDSTECSNLLLQYGSFCTQLNRALTGIAVEQDKNTQEVFAQVKQIYKTPPIKDCGGFNFSQILPDPSKPSKRSFIEDLLFNKVTLADAGFIKQYGDCLGDIAARDLICAQKFNGLTVLPPLLTDEMIAQYTSALLAGTITSGWTFGAGAALQIPFAMQMAYRFNGIGVTQNVLYENQKLIANQFNSAIGKIQDSLSSTASALGKLQDVVNQNAQALNTLVKQLSSNFGAISSVLNDILSRLDPPEAEVQIDRLITGRLQSLQTYVTQQLIRAAEIRASANLAATKMSECVLGQSKRVDFCGKGYHLMSFPQSAPHGVVFLHVTYVPAQEKNFTTAPAICHDGKAHFPREGVFVSNGTHWFVTQRNFYEPQIITTDNTFVSGNCDVVIGIVNNTVYDPLQPELDSFKEELDKYFKNHTSPDVDLGDISGINASVVNIQKEIDRLNEVAKNLNESLIDLQELGKYEQYIKGGGSGGGQIYEGKLTAEGLRFGIVASRFNHALVDRLVEGAIDAIVRHGGREEDITLVRVPGSWEIPVAAGELARKEDIDAVIAIGVLIRGATPHFDYIASEVSKGLADLSLELRKPITFGVITADTLEQAIERAGTKHGNKGWEAALSAIEMANLFKSLR

SEQ ID NO: 3705 - protein, 1371 aa, Artificial Sequence
  SARS-CoV-2/Tianmen/HBCDC-HB-07/2020__EPI_ISL_412983 spike protein (1-1211)(K986P_V987P) LumSynth construct
MFVFLVLLPLVSSQCVNLTTRTQLPPAYTNSFTRGVYYPDKVFRSSVLHSTQDLFLPFFSNVTWFHAIHVSGTNGTKRFDNPVLPFNDGVYFASTEKSNIIRGWIFGTTLDSKTQSLLIVNNATNVVIKVCEFQFCNDPFLGVYYHKNNKSWMESEFRVYSSANNCTFEYVSQPFLMDLEGKQGNFKNLREFVFKNIDGYFKIYSKHTPINLVRDLPQGFSALEPLVDLPIGINITRFQTLLALHRSYLTPGDSSSGWTAGAAAYYVGYLQPRTFLLKYNENGTITDAVDCALDPLSETKCTLKSFTVEKGIYQTSNFRVQPTESIVRFPNITNLCPFGEVFNATRFASVYAWNRKRISNCVADYSVLYNSASFSTFKCYGVSPTKLNDLCFTNVYADSFVIRGDEVRQIAPGQTGKIADYNYKLPDDFTGCVIAWNSNNLDSKVGGNYNYLYRLFRKSNLKPFERDISTEIYQAGSTPCNGVEGFNCYFPLQSYGFQPTNGVGYQPYRVVVLSFELLHAPATVCGPKKSTNLVKNKCVNFNFNGLTGTGVLTESNKKFLPFQQFGRDIADTTDAVRDPQTLEILDITPCSFGGVSVITPGTNTSNQVAVLYQDLNCTEVPVAIHADQLTPTWRVYSTGSNVFQTRAGCLIGAEHVNNSYECDIPIGAGICASYQTQTNSPRRARSVASQSIIAYTMSLGAENSVAYSNNSIAIPTNFTISVTTEILPVSMTKTSVDCTMYICGDSTECSNLLLQYGSFCTQLNRALTGIAVEQDKNTQEVFAQVKQIYKTPPIKDFGGFNFSQILPDPSKPSKRSFIEDLLFNKVTLADAGFIKQYGDCLGDIAARDLICAQKFNGLTVLPPLLTDEMIAQYTSALLAGTITSGWTFGAGAALQIPFAMQMAYRFNGIGVTQNVLYENQKLIANQFNSAIGKIQDSLSSTASALGKLQDVVNQNAQALNTLVKQLSSNFGAISSVLNDILSRLDPPEAEVQIDRLITGRLQSLQTYVTQQLIRAAEIRASANLAATKMSECVLGQSKRVDFCGKGYHLMSFPQSAPHGVVFLHVTYVPAQEKNFTTAPAICHDGKAHFPREGVFVSNGTHWFVTQRNFYEPQIITTDNTFVSGNCDVVIGIVNNTVYDPLQPELDSFKEELDKYFKNHTSPDVDLGDISGINASVVNIQKEIDRLNEVAKNLNESLIDLQELGKYEQYIKGGGSGGGQIYEGKLTAEGLRFGIVASRFNHALVDRLVEGAIDAIVRHGGREEDITLVRVPGSWEIPVAAGELARKEDIDAVIAIGVLIRGATPHFDYIASEVSKGLADLSLELRKPITFGVITADTLEQAIERAGTKHGNKGWEAALSAIEMANLFKSLR

SEQ ID NO: 3706 - protein, 1371 aa, Artificial Sequence
  SARS-CoV-2/Hong Kong/case42_VM20002493/2020__EPI_ISL_414527 spike protein (1-1211)(K986P_V987P) LumSynth construct
MFVFLVLLPLVSSQCVNLTTRTQLPPAYTNSFTRGVYYPDKVFRSSVLHSTQDLFLPFFSNVTWFHAIHVSGTNGTKRFDNPVLPFNDGVYFASTEKSNIIRGWIFGTTLDSKTQSLLIVNNATNVVIKVCEFQFCNDPFLGVYYHKNNKSWMESEFRVYSSANNCTFEYVSQPFLMDLEGKQGNFKNLREFVFKNIDGYFKIYSKHTPINLVRDLPQGFSALEPLVDLPIGINITRFQTLLALHRSYLTPGDSSSGWTAGAAAYYVGYLQPRTFLLKYNENGTITDAVDCALDPLSETKCTLKSFTVEKGIYQTSNFRVQPTESIVRFPNITNLCPFGEVFNATRFASVYAWNRKRISNCVADYSVLYNSASFSTFKCYGVSPTKLNDLCFTNVYADSFVIRGDEVRQIAPGQTGKIADYNYKLPDDFTGCVIAWNSNNLDSKVGGNYNYLYRLFRKSNLKPFERDISTEIYQAGSTPCNGVEGFNCYFPLQSYGFQPTNGVGYQPYRVVVLSFELLHAPATVCGPKKSTNLVKNKCVNFNFNGLTGTGVLTESNKKFLPFQQFGRDIADTTDAVRDPQTLEILDITPCSFGGVSVITPGTNTSNQVAVLYQDVNCTEVPVAIHADQLTPTWRVYSTGSNVFQTRAGCLIGAEHVNNSYECDIPIGAGICASYQTQTNSPRRARSVASQSIIAYTMSLGAENSVAYSNNSIAIPTNFAISVTTEILPVSMTKTSVDCTMYICGDSTECSNLLLQYGSFCTQLNRALTGIAVEQDKNTQEVFAQVKQIYKTPPIKDFGGFNFSQILPDPSKPSKRSFIEDLLFNKVTLADAGFIKQYGDCLGDIAARDLICAQKFNGLTVLPPLLTDEMIAQYTSALLAGTITSGWTFGAGAALQIPFAMQMAYRFNGIGVTQNVLYENQKLIANQFNSAIGKIQDSLSSTASALGKLQDVVNQNAQALNTLVKQLSSNFGAISSVLNDILSRLDPPEAEVQIDRLITGRLQSLQTYVTQQLIRAAEIRASANLAATKMSECVLGQSKRVDFCGKGYHLMSFPQSAPHGVVFLHVTYVPAQEKNFTTAPAICHDGKAHFPREGVFVSNGTHWFVTQRNFYEPQIITTDNTFVSGNCDVVIGIVNNTVYDPLQPELDSFKEELDKYFKNHTSPDVDLGDISGINASVVNIQKEIDRLNEVAKNLNESLIDLQELGKYEQYIKGGGSGGGQIYEGKLTAEGLRFGIVASRFNHALVDRLVEGAIDAIVRHGGREEDITLVRVPGSWEIPVAAGELARKEDIDAVIAIGVLIRGATPHFDYIASEVSKGLADLSLELRKPITFGVITADTLEQAIERAGTKHGNKGWEAALSAIEMANLFKSLR

SEQ ID NO: 3707 - protein, 1371 aa, Artificial Sequence
  SARS-CoV-2/USA/CruiseA-23/2020__EPI_ISL_414482 spike protein (1-1211)(K986P_V987P) LumSynth construct
MFVFLVLLPLVSSQCVNLTTRTQLPPAYTNSFTRGVYYPDKVFRSSVLHSTQDLFLPFFSNVTWFHAIHVSGTNGTKRFDNPVLPFNDGVYFASTEKSNIIRGWIFGTTLDSKTQSLLIVNNATNVVIKVCEFQFCNDPFLGVYYHKNNKSWMESEFRVYSSANNCTFEYVSQPFLMDLEVKQGNFKNLREFVFKNIDGYFKIYSKHTPINLVRDLPQGFSALEPLVDLPIGINITRFQTLLALHRSYLTPGDSSSGWTAGAAAYYVGYLQPRTFLLKYNENGTITDAVDCALDPLSETKCTLKSFTVEKGIYQTSNFRVQPTESIVRFPNITNLCPFGEVFNATRFASVYAWNRKRISNCVADYSVLYNSASFSTFKCYGVSPTKLNDLCFTNVYADSFVIRGDEVRQIAPGQTGKIADYNYKLPDDFTGCVIAWNSNNLDSKVGGNYNYLYRLFRKSNLKPFERDISTEIYQAGSTPCNGVEGFNCYFPLQSYGFQPTNGVGYQPYRVVVLSFELLHAPATVCGPKKSTNLVKNKCVNFNFNGLTGTGVLTESNKKFLPFQQFGRDIADTTDAVRDPQTLEILDITPCSFGGVSVITPGTNTSNQVAVLYQDVNCTEVPVAIHADQLTPTWRVYSTGSNVFQTRAGCLIGAEHVNNSYECDIPIGAGICASYQTQTNSPRRARSVASQSIIAYTMSLGAENSVAYSNNSIAIPTNFTISVTTEILPVSMTKTSVDCTMYICGDSTECSNLLLQYGSFCTQLNRALTGIAVEQDKNTQEVFAQVKQIYKTPPIKDFGGFNFSQILPDPSKPSKRSFIEDLLFNKVTLADAGFIKQYGDCLGDIAARDLICAQKFNGLTVLPPLLTDEMIAQYTSALLAGTITSGWTFGAGAALQIPFAMQMAYRFNGIGVTQNVLYENQKLIANQFNSAIGKIQDSLSSTASALGKLQDVVNQNAQALNTLVKQLSSNFGAISSVLNDILSRLDPPEAEVQIDRLITGRLQSLQTYVTQQLIRAAEIRASANLAATKMSECVLGQSKRVDFCGKGYHLMSFPQSAPHGVVFLHVTYVPAQEKNFTTAPAICHDGKAHFPREGVFVSNGTHWFVTQRNFYEPQIITTDNTFVSGNCDVVIGIVNNTVYDPLQPELDSFKEELDKYFKNHTSPDVDLGDISGINASVVNIQKEIDRLNEVAKNLNESLIDLQELGKYEQYIKGGGSGGGQIYEGKLTAEGLRFGIVASRFNHALVDRLVEGAIDAIVRHGGREEDITLVRVPGSWEIPVAAGELARKEDIDAVIAIGVLIRGATPHFDYIASEVSKGLADLSLELRKPITFGVITADTLEQAIERAGTKHGNKGWEAALSAIEMANLFKSLR

SEQ ID NO: 3708 - protein, 1371 aa, Artificial Sequence
  SARS-CoV-2/Hong Kong/case85_VM20002868/2020__EPI_ISL_414519 spike protein (1-1211)(K986P_V987P) LumSynth construct
MFVFLVLVPLVSSQCVNLTTRTQLPPAYTNSFTRGVYYPDKVFRSSVLHSTQDLFLPFFSNVTWFHAIHVSGTNGTKRFDNPVLPFNDGVYFASTEKSNIIRGWIFGTTLDSKTQSLLIVNNATNVVIKVCEFQFCNDPFLGVYYHKNNKSWMESEFRVYSSANNCTFEYVSQPFLMDLEGKQGNFKNLREFVFKNIDGYFKIYSKHTPINLVRDLPQGFSALEPLVDLPIGINITRFQTLLALHRSYLTPGDSSSGWTAGAAAYYVGYLQPRTFLLKYNENGTITDAVDCALDPLSETKCTLKSFTVEKGIYQTSNFRVQPTESIVRFPNITNLCPFGEVFNATRFASVYAWNRKRISNCVADYSVLYNSASFSTFKCYGVSPTKLNDLCFTNVYADSFVIRGDEVRQIAPGQTGKIADYNYKLPDDFTGCVIAWNSNNLDSKVGGNYNYLYRLFRKSNLKPFERDISTEIYQAGSTPCNGVEGFNCYFPLQSYGFQPTNGVGYQPYRVVVLSFELLHAPATVCGPKKSTNLVKNKCVNFNFNGLTGTGVLTESNKKFLPFQQFGRDIADTTDAVRDPQTLEILDITPCSFGGVSVITPGTNTSNQVAVLYQDVNCTEVPVAIHADQLTPTWRVYSTGSNVFQTRAGCLIGAEHVNNSYECDIPIGAGICASYQTQTNSPRRARSVASQSIIAYTMSLGAENSVAYSNNSIAIPTNFTISVTTEILPVSMTKTSVDCTMYICGDSTECSNLLLQYGSFCTQLNRALTGIAVEQDKNTQEVFAQVKQIYKTPPIKDFGGFNFSQILPDPSKPSKRSFIEDLLFNKVTLADAGFIKQYGDCLGDIAARDLICAQKFNGLTVLPPLLTDEMIAQYTSALLAGTITSGWTFGAGAALQIPFAMQMAYRFNGIGVTQNVLYENQKLIANQFNSAIGKIQDSLSSTASALGKLQDVVNQNAQALNTLVKQLSSNFGAISSVLNDILSRLDPPEAEVQIDRLITGRLQSLQTYVTQQLIRAAEIRASANLAATKMSECVLGQSKRVDFCGKGYHLMSFPQSAPHGVVFLHVTYVPAQEKNFTTAPAICHDGKAHFPREGVFVSNGTHWFVTQRNFYEPQIITTDNTFVSGNCDVVIGIVNNTVYDPLQPELDSFKEELDKYFKNHTSPDVDLGDISGINASVVNIQKEIDRLNEVAKNLNESLIDLQELGKYEQYIKGGGSGGGQIYEGKLTAEGLRFGIVASRFNHALVDRLVEGAIDAIVRHGGREEDITLVRVPGSWEIPVAAGELARKEDIDAVIAIGVLIRGATPHFDYIASEVSKGLADLSLELRKPITFGVITADTLEQAIERAGTKHGNKGWEAALSAIEMANLFKSLR

SEQ ID NO: 3709 - protein, 1371 aa, Artificial Sequence; identical to SEQ ID NO: 93
  SARS-CoV-2/England/200990660/2020__EPI_ISL_414523 spike protein (1-1211)(K986P_V987P) LumSynth construct

SEQ ID NO: 3710 - protein, 1371 aa, Artificial Sequence
  SARS-CoV-2/Australia/NSW09/2020__EPI_ISL_413595 spike protein (1-1211)(K986P_V987P) LumSynth construct
MFVFLVLLPLVSSQCVNLTTRTQLPPAYTNSFTRGVYYPDKVFRSSVLHSTQDLFLPFFSNVTWFHAIHVSGTNGTKRFDNPVLPFNDGVYFASTEKSNIIRGWIFGTTLDSKTQSLLIVNNATNVVIKVCEFQFCNDPFLGVYYHKNNKSWMESEFRVYSSANNCTFEYVSQPFLMDLEGKQGNFKNLREFVFKNIDGYFKIYSKHTPINLVRDLPQGFSALEPLVDLPIGINITRFQTLLALHRSYLTPGDSSSGWTAGAAAYYVGYLQPRTFLLKYNENGTITDAVDCALDPLSETKCTLKSFTVEKGIYQTSNFRVQPTESIVRFPNITNLCPFGEVFNATRFASVYAWNRKRISNCVADYSVLYNSASFSTFKCYGVSPTKLNDLCFTNVYADSFVIRGDEVRQIAPGQTGKIADYNYKLPDDFTGCVIAWNSNNLDSKVGGNYNYLYRLFRKSNLKPFERDISTEIYQAGSTPCNGVEGFNCYFPLQSYGFQPTNGVGYQPYRVVVLSFELLHAPATVCGPKKSTNLVKNKCVNFNFNGLTGTGVLTESNKKFLPFQQFGRDIADTTDAVRDPQTLEILDITPCSFGGVSVITPGTNTSNQVAVLYQDVNCTEVPVAIHADQLTPTWRVYSTGSNVFQTRAGCLIGAEHVNNSYECDIPIGAGICASYQTQTNSPRRARSVASQSIIAYTMSLGAENSVAYSNNSIAIPTNFTISVTTEILPVSMTKTSVDCTMYICGDSTECSNLLLQYGSFCTQLNRALTGIAVEQDKNTQEVFAQVKQIYKTPPIKDFGGFNFSQILPDPSKPSKRSFIEDLLFNKVTLADAGFIKQYGDCLGDIAARDLICAQKFNGLTVLPPLLTDEMIAQYTSALLAGTITSGWTFGAGAALQIPFAMQMAYRFNGIGVTQNVLYENQKLIANQFNSAIGKIQDSLSFTASALGKLQDVVNQNAQALNTLVKQLSSNFGAISSVLNDILSRLDPPEAEVQIDRLITGRLQSLQTYVTQQLIRAAEIRASANLAATKMSECVLGQSKRVDFCGKGYHLMSFPQSAPHGVVFLHVTYVPAQEKNFTTAPAICHDGKAHFPREGVFVSNGTHWFVTQRNFYEPQIITTDNTFVSGNCDVVIGIVNNTVYDPLQPELDSFKEELDKYFKNHTSPDVDLGDISGINASVVNIQKEIDRLNEVAKNLNESLIDLQELGKYEQYIKGGGSGGGQIYEGKLTAEGLRFGIVASRFNHALVDRLVEGAIDAIVRHGGREEDITLVRVPGSWEIPVAAGELARKEDIDAVIAIGVLIRGATPHFDYIASEVSKGLADLSLELRKPITFGVITADTLEQAIERAGTKHGNKGWEAALSAIEMANLFKSLR

SEQ ID NO: 3711 - protein, 1371 aa, Artificial Sequence; identical to SEQ ID NO: 85
  SARS-CoV-2/Australia/NSW10/2020__EPI_ISL_413596 spike protein (1-1211)(K986P_V987P) LumSynth construct

SEQ ID NO: 3712 - protein, 1371 aa, Artificial Sequence
  SARS-CoV-2/Switzerland/1000477797/2020__EPI_ISL_413023 spike protein (1-1211)(K986P_V987P) LumSynth construct
MFVFLVLLPLVSSQCVNLTTRTQLPPAYTNSFTRGVYYPDKVFRSSVLHSTQDLFLPFFSNVTWFHAIHVSGTNGTKRFDNPVLPFNDGVYFASTEKSNIIRGWIFGTTLDSKTQSLLIVNNATNVVIKVCEFQFCNDPFLGVYYHKNNKSWMESEFRVYSSANNCTFEYVSQPFLMDLEGKQGNFKNLREFVFKNIDGYFNIYSKHTPINLVRDLPQGFSALEPLVDLPIGINITRFQTLLALHRSYLTPGDSSSGWTAGAAAYYVGYLQPRTFLLKYNENGTITDAVDCALDPLSETKCTLKSFTVEKGIYQTSNFRVQPTESIVRFPNITNLCPFGEVFNATRFASVYAWNRKRISNCVADYSVLYNSASFSTFKCYGVSPTKLNDLCFTNVYADSFVIRGDEVRQIAPGQTGKIADYNYKLPDDFTGCVIAWNSNNLDSKVGGNYNYLYRLFRKSNLKPFERDISTEIYQAGSTPCNGVEGFNCYFPLQSYGFQPTNGVGYQPYRVVVLSFELLHAPATVCGPKKSTNLVKNKCVNFNFNGLTGTGVLTESNKKFLPFQQFGRDIADTTDAVRDPQTLEILDITPCSFGGVSVITPGTNTSNQVAVLYQGVNCTEVPVAIHADQLTPTWRVYSTGSNVFQTRAGCLIGAEHVNNSYECDIPIGAGICASYQTQTNSPRRARSVASQSIIAYTMSLGAENSVAYSNNSIAIPTNFTISVTTEILPVSMTKTSVDCTMYICGDSTECSNLLLQYGSFCTQLNRALTGIAVEQDKNTQEVFAQVKQIYKTPPIKDFGGFNFSQILPDPSKPSKRSFIEDLLFNKVTLADAGFIKQYGDCLGDIAARDLICAQKFNGLTVLPPLLTDEMIAQYTSALLAGTITSGWTFGAGAALQIPFAMQMAYRFNGIGVTQNVLYENQKLIANQFNSAIGKIQDSLSSTASALGKLQDVVNQNAQALNTLVKQLSSNFGAISSVLNDILSRLDPPEAEVQIDRLITGRLQSLQTYVTQQLIRAAEIRASANLAATKMSECVLGQSKRVDFCGKGYHLMSFPQSAPHGVVFLHVTYVPAQEKNFTTAPAICHDGKAHFPREGVFVSNGTHWFVTQRNFYEPQIITTDNTFVSGNCDVVIGIVNNTVYDPLQPELDSFKEELDKYFKNHTSPDVDLGDISGINASVVNIQKEIDRLNEVAKNLNESLIDLQELGKYEQYIKGGGSGGGQIYEGKLTAEGLRFGIVASRFNHALVDRLVEGAIDAIVRHGGREEDITLVRVPGSWEIPVAAGELARKEDIDAVIAIGVLIRGATPHFDYIASEVSKGLADLSLELRKPITFGVITADTLEQAIERAGTKHGNKGWEAALSAIEMANLFKSLR

SEQ ID NO: 3713 - protein, 1371 aa, Artificial Sequence
  SARS-CoV-2/Belgium/BA-02291/2020__EPI_ISL_415159 spike protein (1-1211)(K986P_V987P) LumSynth construct
MFVFLVLLPLVSSQCVNLTTRTQLPPAYTNSFTRGVYYPDKVFRSSVLHSTQDLFLPFFSNVTWFHAIHVSGTNGTKRFDNPVLPFNDGVYFASTEKSNIIRGWIFGTTLDSKTQSLLIVNNATNVVIKVCEFQFCNDPFLGVYYHKNNKSWMESEFRVYSSANNCTFEYVSQPFLMDLEGKQGNFKNLREFVFKNIDGYFKIYSKHTPINLVRDLPQGFSALEPLVDLPIGINITRFQTLLALHRSYLTPGDSSSGWTAGAAAYYVGYLQPRTFLLKYNENGTITDAVDCALDPLSETKCTLKSFTVEKGIYQTSNFRVQPTESIVRFPNITNLCPFGEVFNATRFASVYAWNRKRISNCVADYSVLYNSASFSTFKCYGVSPTKLNDLCFTNVYADSFVIRGDEVRQIAPGQTGKIADYNYKLPDDFTGCVIAWNSNNLDSKVGGNYNYLYRLFRRSNLKPFERDISTEIYQAGSTPCNGVEGFNCYFPLQSYGFQPTNGVGYQPYRVVVLSFELLPAPATVCGPKKSTNLVKNKCVNFNFNGLTGTGVLTESNKKFLPFQQFGRDIADTTDAVRDPQTLEILDITPCSFGGVSVITPGTNTSNQVAVLYQGVNCTEVPVAIHADQLTPTWRVYSTGSNVFQTRAGCLIGAEHVNNSYECDIPIGAGICASYQTQTNSPRRARSVASQSIIAYTMSLGAENSVAYSNNSIAIPTNFTISVTTEILPVSMTKTSVDCTMYICGDSTECSNLLLQYGSFCTQLNRALTGIAVEQDKNTQEVFAQVKQIYKTPPIKDFGGFNFSQILPDPSKPSKRSFIEDLLFNKVTLADAGFIKQYGDCLGDIAARDLICAQKFNGLTVLPPLLTDEMIAQYTSALLAGTITSGWTFGAGAALQIPFAMQMAYRFNGIGVTQNVLYENQKLIANQFNSAIGKIQDSLSSAAPALGKLQDVVNQNAQALNTLVKQLSSNFGAISSVLNDILSRLDPPEAEVQIDRLITGRLQSLQTYVTQQLIRAAEIRASANLAATKMSECVLGQSKRVDFCGKGYHLMSFPQSAPHGVVFLHVTYVPAQEKNFTTAPAICHDGKAHFPREGVFVSNGTHWFVTQRNFYEPQIITTDNTFVSGNCDVVIGIVNNTVYDPLQPELDSFKEELDKYFKNHTSPDVDLGDISGINASVVNIQKEIDRLNEVAKNLNESLIDLQELGKYEQYIKGGGSGGGQIYEGKLTAEGLRFGIVASRFNHALVDRLVEGAIDAIVRHGGREEDITLVRVPGSWEIPVAAGELARKEDIDAVIAIGVLIRGATPHFDYIASEVSKGLADLSLELRKPITFGVITADTLEQAIERAGTKHGNKGWEAALSAIEMANLFKSLR

SEQ ID NO: 3714 - protein, 1371 aa, Artificial Sequence
  SARS-CoV-2/USA/WA8-UW5/2020__EPI_ISL_413486 spike protein (1-1211)(K986P_V987P) LumSynth construct
MFVFLVLLPLVSSQCVNLTTRTQLPPAYTNSFTRGVYYPDKVFRSSVLHSTQDLFLPFFSNVTWFHAIHVSGTNGTKRFDNPVLPFNDGVYFASTEKSNIIRGWIFGTTLDSKTQSLLIVNNATNVVIKVCEFQFCNDPFLGVYYHKNNKSWMESEFRVYSSANNCTFEYVSQPFLMDLEGKQGNFKNLREFVFKNIDGYFKIYSKHTPINLVRDLPQGFSALEPLVDLPIGINITRFQTLLALHRSYLTPGDSSSGWTAGAAAYYVGYLQPRTFLLKYNENGTITDAVDCALDPLSETKCTLKSFTVEKGIYQTSNFRVQPTESIVRFPNITNLCPFGEVFNATRFASVYAWNRKRISNCVADYSVLYNSASFSTFKCYGVSPTKLNDLCFTNVYADSFVIRGDEVRQIAPGQTGKIADYNYKLPDDFTGCVIAWNSNNLDSKVGGNYNYLYRLFRKSNLKPFERDISTEIYQAGSTPCNGVEGFNCYFPLQSYGFQPTNGVGYQPYRVVVLSFELLHAPATVCGPKKSTNLVKNKCVNFNFNGLTGTGVLTESNKKFLPFQQFGRDIADTTDAVRDPQTLEILDITPCSFGGVSVITPGTNTSNQVAVLYQDVNCTEVPVAIHADQLTPTWRVYSTGSNVFQTRAGCLIGAEYVNNSYECDIPIGAGICASYQTQTNSPRRARSVASQSIIAYTMSLGAENSVAYSNNSIAIPTNFTISVTTEILPVSMTKTSVDCTMYICGDSTECSNLLLQYGSFCTQLNRALTGIAVEQDKNTQEVFAQVKQIYKTPPIKDFGGFNFSQILPDPSKPSKRSFIEDLLFNKVTLADAGFIKQYGDCLGDIAARDLICAQKFNGLTVLPPLLTDEMIAQYTSALLAGTITSGWTFGAGAALQIPFAMQMAYRFNGIGVTQNVLYENQKLIANQFNSAIGKIQDSLSSTASALGKLQDVVNQNAQALNTLVKQLSSNFGAISSVLNDILSRLDPPEAEVQIDRLITGRLQSLQTYVTQQLIRAAEIRASANLAATKMSECVLGQSKRVDFCGKGYHLMSFPQSAPHGVVFLHVTYVPAQEKNFTTAPAICHDGKAHFPREGVFVSNGTHWFVTQRNFYEPQIITTDNTFVSGNCDVVIGIVNNTVYDPLQPELDSFKEELDKYFKNHTSPDVDLGDISGINASVVNIQKEIDRLNEVAKNLNESLIDLQELGKYEQYIKGGGSGGGQIYEGKLTAEGLRFGIVASRFNHALVDRLVEGAIDAIVRHGGREEDITLVRVPGSWEIPVAAGELARKEDIDAVIAIGVLIRGATPHFDYIASEVSKGLADLSLELRKPITFGVITADTLEQAIERAGTKHGNKGWEAALSAIEMANLFKSLR

SEQ ID NO: 3715 - protein, 1371 aa, Artificial Sequence
  SARS-CoV-2/England/20102000506/2020__EPI_ISL_415147 spike protein (1-1211)(K986P_V987P) LumSynth construct
MFVFLVLLPLVSSQCVNLTTRTQLPPAYTNSFTRGVYYPDKVFRSSVLHSTQDLFLPFFSNVTWFHAIHVSGTNGTKRFDNPVLPFNDGVYFASTEKSNIIRGWIFGTTLDSKTQSLLIVNNATNVVIKVCEFQFCNDPFLGVYYHKNNKSWMESEFRVYSSANNCTFEYVSQPFLMDLEGKQGNFKNLREFVFKNIDGYFKIYSKHTPINLVRDLPQGFSALEPLVDLPIGINITRFQTLLALHRSYLTPGDSSSGWTAGAAAYYVGYLQPRTFLLKYNENGTITDAVDCALDPLSETKCTLKSFTVEKGIYQTSNFRVQPTESIVRFPNITNLCPFGEVFNATRFASVYAWNRKRISNCVADYSVLYNSASFSTFKCYGVSPTKLNDLCFTNVYADSFVIRGDEVRQIAPGQTGKIADYNYKLPDDFTGCVIAWNSNNLDSKVGGNYNYLYRLFRKSNLKPFERDISTEIYQAGSTPCNGVEGFNCYFPLQSYGFQPTNGVGYQPYRVVVLSFELLHAPATVCGPKKSTNLVKNKCVNFNFNGLTGTGVLTESNKKFLPFQQFGRDIADTTDAVRDPQTLEILDITPCSFGGVSVITPGTNTSNQVAVLYQGVNCTEVPVAIHADQLTPTWRVYSTGSNVFQTRAGCLIGAEHVNNSYECDIPIGAGICASYQTQTNSPRRARSVASQSIIAYTMSLGAENSVAYSNNSIAIPTNFTISVTTEILPVSMTKTSVDCTMYICGDSTECSNLLLQYGSFCTQLNRALTGIAVEQDKNTQEVFAQVKQIYKTPPIKDFGGFNFSQILPDPSKPSKRSFIEDLLFNKVTLADAGFIKQYGYCLGDIAARDLICAQKFNGLTVLPPLLTDEMIAQYTSALLAGTITSGWTFGAGAALQIPFAMQMAYRFNGIGVTQNVLYENQKLIANQFNSAIGKIQDSLSSTASALGKLQDVVNQNAQALNTLVKQLSSNFGAISSVLNDILSRLDPPEAEVQIDRLITGRLQSLQTYVTQQLIRAAEIRASANLAATKMSECVLGQSKRVDFCGKGYHLMSFPQSAPHGVVFLHVTYVPAQEKNFTTAPAICHDGKAHFPREGVFVSNGTHWFVTQRNFYEPQIITTDNTFVSGNCDVVIGIVNNTVYDPLQPELDSFKEELDKYFKNHTSPDVDLGDISGINASVVNIQKEIDRLNEVAKNLNESLIDLQELGKYEQYIKGGGSGGGQIYEGKLTAEGLRFGIVASRFNHALVDRLVEGAIDAIVRHGGREEDITLVRVPGSWEIPVAAGELARKEDIDAVIAIGVLIRGATPHFDYIASEVSKGLADLSLELRKPITFGVITADTLEQAIERAGTKHGNKGWEAALSAIEMANLFKSLR

SEQ ID NO: 3716 - protein, 1371 aa, Artificial Sequence
  SARS-CoV-2/Belgium/VAG-03013/2020__EPI_ISL_415155 spike protein (1-1211)(K986P_V987P) LumSynth construct
MFVFLVLLPLVSSQCVNLTTRTQLPPAYTNSFTRGVYYPDKVFRSSVLHSTQDLFLPFFSNVTWFHAIHVSGTNGTKRFDNPVLPFNDGVYFASTEKSNIIRGWIFGTTLDSKTQSLLIVNNATNVVIKVCEFQFCNDPFLGVYYHKNNKSWMESEFRVYSSANNCTFEYVSQPFLMDLEGKQGNFKNLREFVFKNIDGYFKIYSKHTPINLVRDLPQGFSALEPLVDLPIGINITRFQTLLALHRSYLTPGDSSSGWTAGAAAYYVGYLQPRTFLLKYNENGTITDAVDCALDPLSETKCTLKSFTVEKGIYQTSNFRVQPTESIVRFPNITNLCPFGEVFNATRFASVYAWNRKRISNCVADYSVLYNSASFSTFKCYGVSPTKLNDLCFTNVYADSFVIRGDEVRQIAPGQTGKIADYNYKLPDDFTGCVIAWNSNNLDSKVGGNYNYLYRLFRKSNLKPFERDISTEIYQAGSTPCNGVEGFNCYFPLQSYGFQPTNGVGYQPYRVVVLSFELLHAPATVCGPKKSTNLVKNKCVNFNFNGLTGTGVLTESNKKFLPFQQFGRDIADTTDAVRDPQTLEILDITPCSFGGVSVITPGTNTSNQVAVLYQGVNCTEVPVAIHADQLTPTWRVYSTGSNVFQTRAGCLIGAEHVNNSYECDIPIGAGICASYQTQTNSPRRARSVASQSIIAYTMSLGAENSVAYSNNSIAIPTNFTISVTTEILPVSMTKTSVDCTMYICGDSTECSNLLLQYGSFCTQLNRALTGIAVEQDKNTQEVFAQVKQIYKTPPIKDFGGFNFSQILPDPSKPSKRSFIEDLLFNKVTLADAGFIKQYGDCLGDIAARDLICAQKFNGLTVLPPLLTDEMIAQYTSALLAGTITSGWTFGAGAALQIPFAMQMAYRFNGIGVTQNVLYENQKLIANQFNSAIGKIQDSLSSTATALGKLQDVVNQNAQALNTLVKQLSSNFGAISSVLNDILSRLDPPEAEVQIDRLITGRLQSLQTYVTQQLIRAAEIRASANLAATKMSECVLGQSKRVDFCGKGYHLMSFPQSAPHGVVFLHVTYVPAQEKNFTTAPAICHDGKAHFPREGVFVSNGTHWFVTQRNFYEPQIITTDNTFVSGNCDVVIGIVNNTVYDPLQPELDSFKEELDKYFKNHTSPDVDLGDISGINASVVNIQKEIDRLNEVAKNLNESLIDLQELGKYEQYIKGGGSGGGQIYEGKLTAEGLRFGIVASRFNHALVDRLVEGAIDAIVRHGGREEDITLVRVPGSWEIPVAAGELARKEDIDAVIAIGVLIRGATPHFDYIASEVSKGLADLSLELRKPITFGVITADTLEQAIERAGTKHGNKGWEAALSAIEMANLFKSLR

SEQ ID NO: 3717 - protein, 1371 aa, Artificial Sequence
  SARS-CoV-2/Belgium/BC-03016/2020__EPI_ISL_415157 spike protein (1-1211)(K986P_V987P) LumSynth construct
MFVFLVLLPLVSSQCVNLTTRTQLPPAYTNSFTRGVYYPDKVFRSSVLHSTQDLFLPFFSNVTWFHAIHVSGTNGTKRFDNPVLPFNDGVYFASTEKSNIIRGWIFGTTLDSKTQSLLIVNNATNVVIKVCEFQFCNDPFLGVYYHKNNKSWMESEFRVYSSANNCTFEYVSQPFLMDLEGKQGNFKNLREFVFKNIDGYFKIYSKHTPINLVRDLPQGFSALEPLVDLPIGINITRFQTLLALHRSYLTPGDSSSGWTAGAAAYYVGYLQPRTFLLKYNENGTITDAVDCALDPLSETKCTLKSFTVEKGIYQTSNFRVQPTESIVRFPNITNLCPFGEVFNATRFASVYAWNRKRISNCVADYSVLYNSASFSTFKCYGVSPTKLNDLCFTNVYADSFVIRGDEVRQIAPGQTGKIADYNYKLPDDFTGCVIAWNSNNLDSKVGGNYNYLYRLFRKSNLKPFERDISTEIYQAGSTPCNGVEGFNCYFPLQSYGFQPTNGVGYQPYRVVVLSFELLHAPATVCGPKKSTNLVKNKCVNFNFNGLTGTGVLTESNKKFLPFQQFGRDIADTTDAVRDPQTLEILDITPCSFGGVSVITPGTNTSNQVAVLYQGVNCTEVPVAIHADQLTPTWRVYSTGSNVFQTRAGCLIGAEHVNNSYECDIPIGAGICASYQTQTNSPRRARSVASQSIIAYTMSLGAENSVAYSNNSIAIPTNFTISVTTEILPVSMTKTSVDCTMYICGDSTECSNLLLQYGSFCTQLNRALTGIAVEQDKNTQEVFAQVKQIYKTPPIKDFGGFNFSQILPDPSKPSKRSFIEDLLFNKVTLADAGFIKQYGDCLGDIAARDLICAQKFNGLTVLPPLLTDEMIAQYTSALLAGTITSGWTFGAGAALQIPFAMQMAYRFNGIGVTQNVLYENQKLIANQFNSAIGKIQDSLSSTAPALGKLQDVVNQNAQALNTLVKQLSSNFGAISSVLNDILSRLDPPEAEVQIDRLITGRLQSLQTYVTQQLIRAAEIRASANLAATKMSECVLGQSKRVDFCGKGYHLMSFPQSAPHGVVFLHVTYVPAQEKNFTTAPAICHDGKAHFPREGVFVSNGTHWFVTQRNFYEPQIITTDNTFVSGNCDVVIGIVNNTVYDPLQPELDSFKEELDKYFKNHTSPDVDLGDISGINASVVNIQKEIDRLNEVAKNLNESLIDLQELGKYEQYIKGGGSGGGQIYEGKLTAEGLRFGIVASRFNHALVDRLVEGAIDAIVRHGGREEDITLVRVPGSWEIPVAAGELARKEDIDAVIAIGVLIRGATPHFDYIASEVSKGLADLSLELRKPITFGVITADTLEQAIERAGTKHGNKGWEAALSAIEMANLFKSLR

SEQ ID NO: 3718 - protein, 1371 aa, Artificial Sequence
  SARS-CoV-2/Germany/BavPat3/2020__EPI_ISL_414521 spike protein (1-1211)(K986P_V987P) LumSynth construct
MFVFLVLLPLVSSQCVNLTTRTQLPPAYTNSFTRGVYYPDKVFRSSVLHSTQDLFLPFFSNVTWFHAIHVSGTNGTKRFDNPVLPFNDGVYFASTEKSNIIRGWIFGTTLDSKTQSLLIVNNATNVVIKVCEFQFCNDPFLGVYYHKNNKSWMESEFRVYSSANNCTFEYVSQPFLMDLEGKQGNFKNLREFVFKNIDGYFKIYSKHTPINLVRDLPQGFSALEPLVDLPIGINITRFQTLLALHRSYLTPGDSSSGWTAGAAAYYVGYLQPRTFLLKYNENGTITDAVDCALDPLSETKCTLKSFTVEKGIYQTSNFRVQPTESIVRFPNITNLCPFGEVFNATRFASVYAWNRKRISNCVADYSVLYNSASFSTFKCYGVSPTKLNDLCFTNVYADSFVIRGDEVRQIAPGQTGKIADYNYKLPDDFTGCVIAWNSNNLDSKVGGNYNYLYRLFRKSNLKPFERDISTEIYQAGSTPCNGVEGFNCYFPLQSYGFQPTNGVGYQPYRVVVLSFELLHAPATVCGPKKSTNLVKNKCVNFNFNGLTGTGVLTESNKKFLPFQQFGRDIADTTDAVRDPQTLEILDITPCSFGGVSVITPGTNTSNQVAVLYQDVNCTEVPVAIHADQLTPTWRVYSTGSNVFQTRAGCLIGAEHVNNSYECDIPIGAGICASYQTQTNSPRRARSVASQSIIAYTMSLGAENSVAYSNNSIAIPTNFTISVTTEILPVSMTKTSVDCTMYICGDSTECSNLLLQYGSFCTQLNRALTGIAVEQDKNTQQVFAQVKQIYKTPPIKDFGGFNFSQILPDPSKPSKRSFIEDLLFNKVTLADAGFIKQYGDCLGDIAARDLICAQKFNGLTVLPPLLTDEMIAQYTSALLAGTITSGWTFGAGAALQIPFAMQMAYRFNGIGVTQNVLYENQKLIANQFNSAIGKIQDSLSSTASALGKLQDVVNQNAQALNTLVKQLSSNFGAISSVLNDILSRLDPPEAEVQIDRLITGRLQSLQTYVTQQLIRAAEIRASANLAATKMSECVLGQSKRVDFCGKGYHLMSFPQSAPHGVVFLHVTYVPAQEKNFTTAPAICHDGKAHFPREGVFVSNGTHWFVTQRNFYEPQIITTDNTFVSGNCDVVIGIVNNTVYDPLQPELDSFKEELDKYFKNHTSPDVDLGDISGINASVVNIQKEIDRLNEVAKNLNESLIDLQELGKYEQYIKGGGSGGGQIYEGKLTAEGLRFGIVASRFNHALVDRLVEGAIDAIVRHGGREEDITLVRVPGSWEIPVAAGELARKEDIDAVIAIGVLIRGATPHFDYIASEVSKGLADLSLELRKPITFGVITADTLEQAIERAGTKHGNKGWEAALSAIEMANLFKSLR

SEQ ID NO: 3719 - protein, 1371 aa, Artificial Sequence
  SARS-CoV-2/France/HF1805/2020__EPI_ISL_414628 spike protein (1-1211)(K986P_V987P) LumSynth construct
MFVFLVLLPLVSSQCVNLTTRTQLPPAYTNSFTRGVYYPDKVFRSSVLHSTQDLFLPFFSNVTWFHAIHVSGTNGTKRFDNPVLPFNDGVYFASTEKSNIIRGWIFGTTLDSKTQSLLIVNNATNVVIKVCEFQFCNDPFLGVYYHKNNKSWMESEFRVYSSANNCTFEYVSQPFLMDLEGKQGNFKNLREFVFKNIDGYFKIYSKHTPINLVRDLPQGFSALEPLVDLPIGINITRFQTLLALHRSYLTPGDSSSGWTAGAAAYYVGYLQPRTFLLKYNENGTITDAVDCALDPLSETKCTLKSFTVEKGIYQTSNFRVQPTESIVRFPNITNLCPFGEVFNATRFASVYAWNRKRISNCVADYSVLYNSASFSTFKCYGVSPTKLNDLCFTNVYADSFVIRGDEVRQIAPGQTGKIADYNYKLPDDFTGCVIAWNSNNLDSKVGGNYNYLYRLFRKSNLKPFERDISTEIYQAGSTPCNGVEGFNCYFPLQSYGFQPTNGVGYQPYRVVVLSFELLHAPATVCGPKKSTNLVKNKCVNFNFNGLTGTGVLTESNKKFLPFQQFGRDIADTTDAVRDPQTLEILDITPCSFGGVSVITPGTNTSNQVAVLYQGVNCTEVPVAIHADQLTPTWRVYSTGSNVFQTRAGCLIGAEHVNNSYECDIPIGAGICASYQTQTNSPRRARSVASQSIIAYTMSLGAENSVAYSNNSIAIPTNFTISVTTEILPVSMTKTSVDCTMYICGDSTECSNLLLQYGSFCTQLNRALTGIAVEQDKNTQEVFAQVKQIYKTPPIKDFGGFNFSQILPDPSKPSKRSFIEDLLFNKVTLADAGFIKQYGDCLGDIAARDLICAQKFNGLTVLPPLLTDEMIAQYTSALLAGTITSGWTFGAGAALQIPFAMQMAYRFNGIGVTQNVLYENQKLIANQFNSAIGKIQDSLSSTASALGKLQDVVNQNAQALNTLVKQLSSNFGAISSVLNDILSRLDPPEAEVQIDRLITGRLQSLQTYVTQQLIRAAEIRASANLAATKMSECVLGQSKRVDFCGKGYHLMSFPQSAPHGVVFLHVTYVPAQEKNFTTAPAICHDGKAHFPREGVFVSNGTHWFVTQRNFYEPQIITTDNTFVSGNCDVVIGVVNNTVYDPLQPELDSFKEELDKYFKNHTSPDVDLGDISGINASVVNIQKEIDRLNEVAKNLNESLIDLQELGKYEQYIKGGGSGGGQIYEGKLTAEGLRFGIVASRFNHALVDRLVEGAIDAIVRHGGREEDITLVRVPGSWEIPVAAGELARKEDIDAVIAIGVLIRGATPHFDYIASEVSKGLADLSLELRKPITFGVITADTLEQAIERAGTKHGNKGWEAALSAIEMANLFKSLR

SEQ ID NO: 3720 - protein, 1371 aa, Artificial Sequence
  SARS-CoV-2/Netherlands/ZuidHolland_9/2020__EPI_ISL_414445 spike protein (1-1211)(K986P_V987P) LumSynth construct
MFVFLVLLPLVSSQCVNLTTRTQLPPAYTNSFTRGVYYPDKVFRSSVLHSTQDLFLPFFSNVTWFHAIHVSGTNGTKRFDNPVLPFNDGVYFASTEKSNIIRGWIFGTTLDSKTQSLLIVNNATNVVIKVCEFQFCNDPFLGVYYHKNNKSWMESEFRVYSSANNCTFEYVSQPFLMDLEGKQGNFKNLREFVFKNIDGYFKIYSKHTPINLVRDLPQGFSALEPLVDLPIGINITRFQTLLALHRSYLTPGDSSSGWTAGAAAYYVGYLQPRTFLLKYNENGTITDAVDCALDPLSETKCTLKSFTVEKGIYQTSNFRVQPTESIVRFPNITNLCPFGEVFNATRFASVYAWNRKRISNCVADYSVLYNSASFSTFKCYGVSPTKLNDLCFTNVYADSFVIRGDEVRQIAPGQTGKIADYNYKLPDDFTGCVIAWNSNNLDSKVGGNYNYLYRLFRKSNLKPFERDISTEIYQAGSTPCNGVEGFNCYFPLQSYGFQPTNGVGYQPYRVVVLSFELLHAPATVCGPKKSTNLVKNKCVNFNFNGLTGTGVLTESNKKFLPFQQFGRDIADTTDAVRDPQTLEILDITPCSFGGVSVITPGTNTSNQVAVLYQGVNCTEVPVAIHADQLTPTWRVYSTGSNVFQTRAGCLIGAEHVNNSYECDIPIGAGICASYQTQTNSPRRARSVASQSIIAYTMSLGAENSVAYSNNSIAIPTNFTISVTTEILPVSMTKTSVDCTMYICGDSTECSNLLLQYGSFCTQLNRALTGIAVEQDKNTQEVFAQVKQIYKTPPIKDFGGFNFSQILPDPSKPSKRSFIEDLLFNKVTLADAGFIKQYGDCLGDIAARDLICVQKFNGLTVLPPLLTDEMIAQYTSALLAGTITSGWTFGAGAALQIPFAMQMAYRFNGIGVTQNVLYENQKLIANQFNSAIGKIQDSLSSTASALGKLQDVVNQNAQALNTLVKQLSSNFGAISSVLNDILSRLDPPEAEVQIDRLITGRLQSLQTYVTQQLIRAAEIRASANLAATKMSECVLGQSKRVDFCGKGYHLMSFPQSAPHGVVFLHVTYVPAQEKNFTTAPAICHDGKAHFPREGVFVSNGTHWFVTQRNFYEPQIITTDNTFVSGNCDVVIGIVNNTVYDPLQPELDSFKEELDKYFKNHTSPDVDLGDISGINASVVNIQKEIDRLNEVAKNLNESLIDLQELGKYEQYIKGGGSGGGQIYEGKLTAEGLRFGIVASRFNHALVDRLVEGAIDAIVRHGGREEDITLVRVPGSWEIPVAAGELARKEDIDAVIAIGVLIRGATPHFDYIASEVSKGLADLSLELRKPITFGVITADTLEQAIERAGTKHGNKGWEAALSAIEMANLFKSLR

SEQ ID NO: 3721 - protein, 1371 aa, Artificial Sequence
  SARS-CoV-2/Finland/FIN03032020A/2020__EPI_ISL_413602 spike protein (1-1211)(K986P_V987P) LumSynth construct
MFVFLVLLPLVSSQCVNLTTRTQLPPAYTNSFTRGVYYPDKVFRSSVLHSTQDLFLPFFSNVTWFHAIHVSGTNGTKRFDNPVLPFNDGVYFASTEKSNIIRGWIFGTTLDSKTQSLLIVNNATNVVIKVCEFQFCNDPFLGVYYHKNNKSWMESEFRVYSSANNCTFEYVSQPFLMDLEGKQGNFKNLREFVFKNIDGYFKIYSKHTPINLVRDLPQGFSALEPLVDLPIGINITRFQTLLALHRSYLTPGDSSSGWTAGAAAYYVGYLQPRTFLLKYNENGTITDAVDCALDPLSETKCTLKSFTVEKGIYQTSNFRVQPTESIVRFPNITNLCPFGEVFNATRFASVYAWNRKRISNCVADYSVLYNSASFSTFKCYGVSPTKLNDLCFTNVYADSFVIRGDEVRQIAPGQTGKIADYNYKLPDDFTGCVISWNSNNLDSKVGGNYNYLYRLFRKSNLKPFERDISTEIYQAGSTPCNGVEGFNCYFPLQSYGFQPTNGVGYQPYRVVVLSFELLHAPATVCGPKKSTNLVKNKCVNFNFNGLTGTGVLTESNKKFLPFQQFGRDIADTTDAVRDPQTLEILDITPCSFGGVSVITPGTNTSNQVAVLYQGVNCTEVPVAIHADQLTPTWRVYSTGSNVFQTRAGCLIGAEHVNNSYECDIPIGAGICASYQTQTNSPRRARSVASQSIIAYTMSLGAENSVAYSNNSIAIPTNFTISVTTEILPVSMTKTSVDCTMYICGDSTECSNLLLQYGSFCTQLNRALTGIAVEQDKNTQEVFAQVKQIYKTPPIKDFGGFNFSQILPDPSKPSKRSFIEDLLFNKVTLADAGFIKQYGDCLGDIAARDLICAQKFNGLTVLPPLLTDEMIAQYTSALLAGTITSGWTFGAGAALQIPFAMQMAYRFNGIGVTQNVLYENQKLIANQFNSAIGKIQDSLSSTASALGKLQDVVNQNAQALNTLVKQLSSNFGAISSVLNDILSRLDPPEAEVQIDRLITGRLQSLQTYVTQQLIRAAEIRASANLAATKMSECVLGQSKRVDFCGKGYHLMSFPQSAPHGVVFLHVTYVPAQEKNFTTAPAICHDGKAHFPREGVFVSNGTHWFVTQRNFYEPQIITTDNTFVSGNCDVVIGIVNNTVYDPLQPELDSFKEELDKYFKNHTSPDVDLGDISGINASVVNIQKEIDRLNEVAKNLNESLIDLQELGKYEQYIKGGGSGGGQIYEGKLTAEGLRFGIVASRFNHALVDRLVEGAIDAIVRHGGREEDITLVRVPGSWEIPVAAGELARKEDIDAVIAIGVLIRGATPHFDYIASEVSKGLADLSLELRKPITFGVITADTLEQAIERAGTKHGNKGWEAALSAIEMANLFKSLR

SEQ ID NO: 3722 - protein, 1371 aa, Artificial Sequence
  SARS-CoV-2/France/GE1977/2020__EPI_ISL_414632 spike protein (1-1211)(K986P_V987P) LumSynth construct
MFVFLVLLPLVSSQCVNLTTRTQLPPAYTNSFTRGVYYPDKVFRSSVLHSTQDLFLPFFSNVTWFHAIHVSGTNGTKRFDNPVLPFNDGVYFASTEKSNIIRGWIFGTTLDSKTQSLLIVNNATNVVIKVCEFQFCNDPFLGVYYHKNNKSWMESEFRVYSSANNCTFEYVSQPFLMDLEGKQGNFKNLREFVFKNIDGYFKIYSKHTPINLVRDLPQGFSALEPLVDLPIGINITRFQTLLALHRSYLTPGDSSSGWTAGAAAYYVGYLQPRTFLLKYNENGTITDAVDCALDPLSETKCTLKSFTVEKGIYQTSNFRVQPTESIVRFPNITNLCPFGEVFNATRFASVYAWNRKRISNCVADYSVLYNSASFSTFKCYGVSPTKLNDLCFTNVYADSFVIRGDEVRQIAPGQTGKIADYNYKLPDDFTGCVIAWNSNNLDSKVGGNYNYLYRLFRKSNLKPFERDISTEIYQAGSTPCNGVEGFNCYFPLQSYGFQPTNGVGYQPYRVVVLSFELLHAPATVCGPKKSTNLVKNKCVNFNFNGLTGTGVLTESNKKFLPFQQFGRDIADTTDAVRDPQTLEILDITPCSFGGVSVITPGTNTSNQVAVLYQGVNCTEVPVAIHADQLTPTWRVYSTGSNVFQTRAGCLIGAEHVNNSYECDIPIGAGICASYQTQTNSPRRARSVASQSIIAYTMSLGAENSVAYSNNSIAIPTNFTISVTTEILPVSMTKTSVDCTMYICGDSTECSNLLLQYGSFCTQLNRALTGIAVEQDKNTQEVFAQVKQIYKTPPIKDFGGFNFSQILPDPSKPSKRSFIEDLLFNKVTLADAGFIKQYGDCLGDIAARDLICAQKFNGLTVLPPLLTDEMIAQYTSALLAGTITSGWTFGAGAALQIPFAMQMAYRFNGIGVTQNVLYENQKLIANQFNSAIGKIQDSLFSTASALGKLQDVVNQNAQALNTLVKQLSSNFGAISSVLNDILSRLDPPEAEVQIDRLITGRLQSLQTYVTQQLIRAAEIRASANLAATKMSECVLGQSKRVDFCGKGYHLMSFPQSAPHGVVFLHVTYVPAQEKNFTTAPAICHDGKAHFPREGVFVSNGTHWFVTQRNFYEPQIITTDNTFVSGNCDVVIGIVNNTVYDPLQPELDSFKEELDKYFKNHTSPDVDLGDISGINASVVNIQKEIDRLNEVAKNLNESLIDLQELGKYEQYIKGGGSGGGQIYEGKLTAEGLRFGIVASRFNHALVDRLVEGAIDAIVRHGGREEDITLVRVPGSWEIPVAAGELARKEDIDAVIAIGVLIRGATPHFDYIASEVSKGLADLSLELRKPITFGVITADTLEQAIERAGTKHGNKGWEAALSAIEMANLFKSLR

SEQ ID NO: 3723 - protein, 1371 aa, Artificial Sequence
  SARS-CoV-2/Finland/FIN-313/2020__EPI_ISL_414641 spike protein (1-1211)(K986P_V987P) LumSynth construct
MFVFLVLLPLVSSQCVNLTTRTQLPPAYTNSFTRGVYYPDKVFRSSVLHSTQDLFLPFFSNVTWFHAIHVSGTNGTKRFDNPVLPFNDGVYFASTEKSNIIRGWIFGTTLDSKTQSLLIVNNATNVVIKVCEFQFCNDPFLGVYYHKNNKSWMESEFRVYSSANNCTFEYVSQPFLMDLEGKQGNFKNLREFVFKNIDGYFKIYSKHTPINLVRDLPQGFSALEPLVDLPIGINITRFKTLLALHRSYLTPGDSSSGWTAGAAAYYVGYLQPRTFLLKYNENGTITDAVDCALDPLSETKCTLKSFTVEKGIYQTSNFRVQPTESIVRFPNITNLCPFGEVFNATRFASVYAWNRKRISNCVADYSVLYNSASFSTFKCYGVSPTKLNDLCFTNVYADSFVIRGDEVRQIAPGQTGKIADYNYKLPDDFTGCVIAWNSNNLDSKVGGNYNYLYRLFRKSNLKPFERDISTEIYQAGSTPCNGVEGFNCYFPLQSYGFQPTNGVGYQPYRVVVLSFELLHAPATVCGPKKSTNLVKNKCVNFNFNGLTGTGVLTESNKKFLPFQQFGRDIADTTDAVRDPQTLEILDITPCSFGGVSVITPGTNTSNQVAVLYQGVNCTEVPVAIHADQLTPTWRVYSTGSNVFQTRAGCLIGAEHVNNSYECDIPIGAGICASYQTQTNSPRRARSVASQSIIAYTMSLGAENSVAYSNNSIAIPTNFTISVTTEILPVSMTKTSVDCTMYICGDSTECSNLLLQYGSFCTQLNRALTGIAVEQDKNTQEVFAQVKQIYKTPPIKDFGGFNFSQILPDPSKPSKRSFIEDLLFNKVTLADAGFIKQYGDCLGDIAARDLICAQKFNGLTVLPPLLTDEMIAQYTSALLAGTITSGWTFGAGAALQIPFAMQMAYRFNGIGVTQNVLYENQKLIANQFNSAIGKIQDSLSSTASALGKLQDVVNQNAQALNTLVKQLSSNFGAISSVLNDILSRLDPPEAEVQIDRLITGRLQSLQTYVTQQLIRAAEIRASANLAATKMSECVLGQSKRVDFCGKGYHLMSFPQSAPHGVVFLHVTYVPAQEKNFTTAPAICHDGKAHFPREGVFVSNGTHWFVTQRNFYEPQIITTDNTFVSGNCDVVIGIVNNTVYDPLQPELDSFKEELDKYFKNHTSPDVDLGDISGINASVVNIQKEIDRLNEVAKNLNESLIDLQELGKYEQYIKGGGSGGGQIYEGKLTAEGLRFGIVASRFNHALVDRLVEGAIDAIVRHGGREEDITLVRVPGSWEIPVAAGELARKEDIDAVIAIGVLIRGATPHFDYIASEVSKGLADLSLELRKPITFGVITADTLEQAIERAGTKHGNKGWEAALSAIEMANLFKSLR

SEQ ID NO: 3724 - protein, 1371 aa, Artificial Sequence
  SARS-CoV-2/Netherlands/ZuidHolland_2/2020__EPI_ISL_414556 spike protein (1-1211)(K986P_V987P) LumSynth construct
MFVFLVLLPLVSSQCVNLTTRTQLPPAYTNSFTRGVYYPDKVFRSSVLHSTQDLFLPFFSNVTWFHAIHVSGTNGTKRFDNPVLPFNDGVYFASTEKSNIIRGWIFGTTLDSKTQSLLIVNNATNVVIKVCEFQFCNDPFLGVYYHKNNKSWMESEFRVYSSANNCTFEYVSQPFLMDLEGKQGNFKNLREFVFKNIDGYFKIYSKHTPINLVRDLPQGFSALEPLVDLPIGINITRFQTLLALHRSYLTPGDSSSGWTAGAAAYYVGYLQPRTFLLKYNENGTITDAVDCALDPLSETKCTLKSFTVEKGIYQTSNFRVQPTESIVRFPNITNLCPFGEVFNATRFASVYAWNRKRISNCVADYSVLYNSASFSTFKCYGVSPTKLNDLCFTNVYADSFVIRGDEVRQIAPGQTGKIADYNYKLPDDFTGCVIAWNSNNLDSKVGGNYNYLYRLFRKSNLKPFERDISTEIYQAGSTPCNGVEGFNCYFPLQSYGFQPTNGVGYQPYRVVVLSFELLHAPATVCGPKKSTNLVKNKCVNFNFNGLTGTGVLTESNKKFLPFQQFGRDIADTTDAVRDPQTLEILDITPCSFGGVSVITPGTNTSNQVAVLYQGVNCTEVPVAIHADQLTPTWRVYSTGSNVFQTRAGCLIGAEHVNNSYECDIPIGAGICASYQTQTNSPRRARSVASQSIIAYTMSLGAENSVAYSNNSIAIPTNFTISVTTEILPVSMTKTSVDCTMYICGDSTECSNLLLQYGSFCTQLNRALTGIALEQDKNTQEVFAQVKQIYKTPPIKDFGGFNFSQILPDPSKPSKRSFIEDLLFNKVTLADAGFIKQYGDCLGDIAARDLICAQKFNGLTVLPPLLTDEMIAQYTSALLAGTITSGWTFGAGAALQIPFAMQMAYRFNGIGVTQNVLYENQKLIANQFNSAIGKIQDSLSSTASALGKLQDVVNQNAQALNTLVKQLSSNFGAISSVLNDILSRLDPPEAEVQIDRLITGRLQSLQTYVTQQLIRAAEIRASANLAATKMSECVLGQSKRVDFCGKGYHLMSFPQSAPHGVVFLHVTYVPAQEKNFTTAPAICHDGKAHFPREGVFVSNGTHWFVTQRNFYEPQIITTDNTFVSGNCDVVIGIVNNTVYDPLQPELDSFKEELDKYFKNHTSPDVDLGDISGINASVVNIQKEIDRLNEVAKNLNESLIDLQELGKYEQYIKGGGSGGGQIYEGKLTAEGLRFGIVASRFNHALVDRLVEGAIDAIVRHGGREEDITLVRVPGSWEIPVAAGELARKEDIDAVIAIGVLIRGATPHFDYIASEVSKGLADLSLELRKPITFGVITADTLEQAIERAGTKHGNKGWEAALSAIEMANLFKSLR

SEQ ID NO: 3725 - protein, 1371 aa, Artificial Sequence
  SARS-CoV-2/USA/WA-UW31/2020__EPI_ISL_414618 spike protein (1-1211)(K986P_V987P) LumSynth construct
MFVFLVLLPLVSSQCVNLTTRTQLPPAYTNSFTRGVYYPDKVFRSSVLHSTQDLFLPFFSNVTWFHAIHVSGTNGTKRFDNPVLPFNDGVYFASTEKSNIIRGWIFGTTLDSKTQSLLIVNNATNVVIKVCEFQFCNDPFLGVYYHKNNKSWMESEFRVYSSANNCTFEYVSQPFLMDLEGKQGNFKNLREFVFKNIDGYFKIYSKHTPINLVRDLPQGFSALEPLVDLPIGINITRFQTLLALHRSYLTPGDSSSGWTAGAAAYYVGYLQPRTFLLKYNENGTITDAVDCALDPLSETKCTLKSFTVEKGIYQTSNFRVQPTESIVRFPNITNLCPFGEVFNATRFASVYAWNRKRISNCVADYSVLYNSASFSTFKCYGVSPTKLNDLCFTNVYADSFVIRGDEVRQIAPGQTGKIADYNYKLPDDFTGCVIAWNSNNLDSKVGGNYNYLYRLFRKSNLKPFERDISTEIYQAGSTPCNGAEGFNCYFPLQSYGFQPTNGVGYQPYRVVVLSFELLHAPATVCGPKKSTNLVKNKCVNFNFNGLTGTGVLTESNKKFLPFQQFGRDIADTTDAVRDPQTLEILDITPCSFGGVSVITPGTNTSNQVAVLYQDVNCTEVPVAIHADQLTPTWRVYSTGSNVFQTRAGCLIGAEHVNNSYECDIPIGAGICASYQTQTNSPRRARSVASQSIIAYTMSLGAENSVAYSNNSIAIPTNFTISVTTEILPVSMTKTSVDCTMYICGDSTECSNLLLQYGSFCTQLNRALTGIAVEQDKNTQEVFAQVKQIYKTPPIKDFGGFNFSQILPDPSKPSKRSFIEDLLFNKVTLADAGFIKQYGDCLGDIAARDLICAQKFNGLTVLPPLLTDEMIAQYTSALLAGTITSGWTFGAGAALQIPFAMQMAYRFNGIGVTQNVLYENQKLIANQFNSAIGKIQDSLSSTASALGKLQDVVNQNAQALNTLVKQLSSNFGAISSVLNDILSRLDPPEAEVQIDRLITGRLQSLQTYVTQQLIRAAEIRASANLAATKMSECVLGQSKRVDFCGKGYHLMSFPQSAPHGVVFLHVTYVPAQEKNFTTAPAICHDGKAHFPREGVFVSNGTHWFVTQRNFYEPQIITTDNTFVSGNCDVVIGIVNNTVYDPLQPELDSFKEELDKYFKNHTSPDVDLGDISGINASVVNIQKEIDRLNEVAKNLNESLIDLQELGKYEQYIKGGGSGGGQIYEGKLTAEGLRFGIVASRFNHALVDRLVEGAIDAIVRHGGREEDITLVRVPGSWEIPVAAGELARKEDIDAVIAIGVLIRGATPHFDYIASEVSKGLADLSLELRKPITFGVITADTLEQAIERAGTKHGNKGWEAALSAIEMANLFKSLR

SEQ ID NO: 3726 - protein, 1371 aa, Artificial Sequence
  SARS-CoV-2/South Korea/SNU01/2020__EPI_ISL_411929 spike protein (1-1211)(K986P_V987P) LumSynth construct
MFVFLVLLPLVSSQCVNLTTRTQLPPAYTNSFTRGVYYPDKVFRSSVLHSTQDLFLPFFSNVTWFHAIHVSGTNGTKRFDNPVLPFNDGVYFASTEKSNIIRGWIFGTTLDSKTQSLLIVNNATNVVIKVCEFQFCNDPFLGVYYHKNNKSWMESEFRVYSSANNCTFEYVSQPFLMDLEGKQGNFKNLREFVFKNIDGYFKIYSKHTPINLVRDLPQGFWALEPLVDLPIGINITRFQTLLALHRSYLTPGDSSSGWTAGAAAYYVGYLQPRTFLLKYNENGTITDAVDCALDPLSETKCTLKSFTVEKGIYQTSNFRVQPTESIVRFPNITNLCPFGEVFNATRFASVYAWNRKRISNCVADYSVLYNSASFSTFKCYGVSPTKLNDLCFTNVYADSFVIRGDEVRQIAPGQTGKIADYNYKLPDDFTGCVIAWNSNNLDSKVGGNYNYLYRLFRKSNLKPFERDISTEIYQAGSTPCNGVEGFNCYFPLQSYGFQPTNGVGYQPYRVVVLSFELLHAPATVCGPKKSTNLVKNKCVNFNFNGLTGTGVLTESNKKFLPFQQFGRDIADTTDAVRDPQTLEILDITPCSFGGVSVITPGTNTSNQVAVLYQDVNCTEVPVAIHADQLTPTWRVYSTGSNVFQTRAGCLIGAEHVNNSYECDIPIGAGICASYQTQTNSPRRARSVASQSIIAYTMSLGAENSVAYSNNSIAIPTNFTISVTTEILPVSMTKTSVDCTMYICGDSTECSNLLLQYGSFCTQLNRALTGIAVEQDKNTQEVFAQVKQIYKTPPIKDFGGFNFSQILPDPSKPSKRSFIEDLLFNKVTLADAGFIKQYGDCLGDIAARDLICAQKFNGLTVLPPLLTDEMIAQYTSALLAGTITSGWTFGAGAALQIPFAMQMAYRFNGIGVTQNVLYENQKLIANQFNSAIGKIQDSLSSTASALGKLQDVVNQNAQALNTLVKQLSSNFGAISSVLNDILSRLDPPEAEVQIDRLITGRLQSLQTYVTQQLIRAAEIRASANLAATKMSECVLGQSKRVDFCGKGYHLMSFPQSAPHGVVFLHVTYVPAQEKNFTTAPAICHDGKAHFPREGVFVSNGTHWFVTQRNFYEPQIITTDNTFVSGNCDVVIGIVNNTVYDPLQPELDSFKEELDKYFKNHTSPDVDLGDISGINASVVNIQKEIDRLNEVAKNLNESLIDLQELGKYEQYIKGGGSGGGQIYEGKLTAEGLRFGIVASRFNHALVDRLVEGAIDAIVRHGGREEDITLVRVPGSWEIPVAAGELARKEDIDAVIAIGVLIRGATPHFDYIASEVSKGLADLSLELRKPITFGVITADTLEQAIERAGTKHGNKGWEAALSAIEMANLFKSLR

SEQ ID NO: 3727 - protein, 1371 aa, Artificial Sequence
  SARS-CoV-2/China/WF0004/2020__EPI_ISL_413694 spike protein (1-1211)(K986P_V987P) LumSynth construct
MFVFLVLLPLVSSQCVNLTTRTQLPPAYTNSFTRGVYYPDKVFRSSVLHSTQDLFLPFFSNVTWFHAIHVSGTNGTKRFDNPVLPFNDGVYFASTEKSNIIRGWIFGTTLDSKTQSLLIVNNATNVVIKVCEFQFCNDPFLGVYYHKNNKSWTESEFRVYSSANNCTFEYVSQPFLMDLEGKQGNFKNLREFVFKNIDGYFKIYSKHTPINLVRDLPQGFSALEPLVDLPIGINITRFQTLLALHRSYLTPGDSSSGWTAGAAAYYVGYLQPRTFLLKYNENGTITDAVDCALDPLSETKCTLKSFTVEKGIYQTSNFRVQPTESIVRFPNITNLCPFGEVFNATRFASVYAWNRKRISNCVADYSVLYNSASFSTFKCYGVSPTKLNDLCFTNVYADSFVIRGDEVRQIAPGQTGKIADYNYKLPDDFTGCVIAWNSNNLDSKVGGNYNYLYRLFRKSNLKPFERDISTEIYQAGSTPCNGVEGFNCYFPLQSYGFQPTNGVGYQPYRVVVLSFELLHAPATVCGPKKSTNLVKNKCVNFNFNGLTGTGVLTESNKKFLPFQQFGRDIADTTDAVRDPQTLEILDITPCSFGGVSVITPGTNTSNQVAVLYQDVNCTEVPVAIHADQLTPTWRVYSTGSNVFQTRAGCLIGAEHVNNSYECDIPIGAGICASYQTQTNSPRRARSVASQSIIAYTMSLGAENSVAYSNNSIAIPTNFTISVTTEILPVSMTKTSVDCTMYICGDSTECSNLLLQYGSFCTQLNRALTGIAVEQDKNTQEVFAQVKQIYKTPPIKDFGGFNFSQILPDPSKPSKRSFIEDLLFNKVTLADAGFIKQYGDCLGDIAARDLICAQKFNGLTVLPPLLTDEMIAQYTSALLAGTITSGWTFGAGAALQIPFAMQMAYRFNGIGVTQNVLYENQKLIANQFNSAIGKIQDSLSSTASALGKLQDVVNQNAQALNTLVKQLSSNFGAISSVLNDILSRLDPPEAEVQIDRLITGRLQSLQTYVTQQLIRAAEIRASANLAATKMSECVLGQSKRFDFCGKGYHLMSFPQSAPHGVVFLHVTYVPAQEKNFTTAPAICHDGKAHFPREGVFVSNGTHWFVTQRNFYEPQIITTDNTFVSGNCDVVIGIVNNTVYDPLQPELDSFKEELDKYFKNHTSPDVDLGDISGINASVVNIQKEIDRLNEVAKNLNESLIDLQELGKYEQYIKGGGSGGGQIYEGKLTAEGLRFGIVASRFNHALVDRLVEGAIDAIVRHGGREEDITLVRVPGSWEIPVAAGELARKEDIDAVIAIGVLIRGATPHFDYIASEVSKGLADLSLELRKPITFGVITADTLEQAIERAGTKHGNKGWEAALSAIEMANLFKSLR

SEQ ID NO: 3728 - protein, 1371 aa, Artificial Sequence
  SARS-CoV-2/China/WF0028/2020__EPI_ISL_413791 spike protein (1-1211)(K986P_V987P) LumSynth construct
MFVFLVLLPLVSSQCVNLTTRTQLPPAYTNSFTRGVYYPDKVFRSSVLHSTQDLFLPFFSNVTWFHAIHVSGTNGTKRFDNPVLPFNDGVYFASTEKSNIIRGWIFGTTLDSKTQSLLIVNNATNVVIKVCEFQFCNDPFLGVYYHKNNKSWMESEFRVYSSANNCTFEYVSQPFLMDLEGKQGNFKNLREFVFKNIDGYFKIYSKHTPINLVRDLPQGFSALEPLVDLPIGINITRFQTLLALHRSYLTPGDSSSGWTAGAAAYYVGYLQPRTFLLKYNENGTITDAVDCALDPLSETKCTLKSFTVEKGIYQTSNFRVQPTESIVRFPNITNLCPFGEVFNATRFASVYAWNRKRISNCVADYSVLYNSASFSTFKCYGVSPTKLNDLCFTNVYADSFVIRGDEVRQIAPGQTGKIADYNYKLPDDFTGCVIAWNSNNLDSKVGGNYNYLYRLFRKSNLKPFERDISTEIYQAGSTPCNGVEGFNCYFPLQSYGFQPTNGVGYQPYRVVVLSFELLHAPATVCGPKKSTNLVKNKCVNFNFNGLTGTGVLTESNKKFLPFQQFGRDIADTTDAVRDPQTLEILDITPCSFGGVSVITPGTNTSNQVAVLYQDVNCTEVPVAIHADQLTPTWRVYSTGSNVFQTRAGCLIGAEHVNNSYECDIPIGAGICASYQTQTNSPRRARSVASQSIIAYTMSLGAENSVAYSNNSIAIPTNFTISVTTEILPVSMTKTSVDCTMYICGDSTECSNLLLQYGSFCTQLNRALTGIAVEQDKNTQEVFAQVKQIYKTPPIKDFGGFNFSQILPDPSKPSKRSFIEDLLFNKVTLADAGFIKQYGDCLGDIAARDLICAQKFNGLTVLPPLLTDEMIAQYTSALLAGTITSGWTFGAGAALQIPFAMQMAYRFNGIGVTQNVLYENQKLIANQFNSAIGKIQDSLSSTASALGKLQDVVNQNAQALNTLVKQLSSNFGAISSVLNDILSRLDPPEAEVQIDRLITGRLQSLQTYVTQQLIRAAEIRASANLAATKMSECVLGQSKRVDFCGKGYHLMSFPQSAPHGVVFLHVTYVPAQEKNFTTAPAICHDGKAHFPREGVFVSNGTHWFVTQRNFYEPQIITTDNTFVSGNCDVVIGIVNNTVYDPLQPELESFKEELDKYFKNHTSPDVDLGDISGINASVVNIQKEIDRLNEVAKNLNESLIDLQELGKYEQYIKGGGSGGGQIYEGKLTAEGLRFGIVASRFNHALVDRLVEGAIDAIVRHGGREEDITLVRVPGSWEIPVAAGELARKEDIDAVIAIGVLIRGATPHFDYIASEVSKGLADLSLELRKPITFGVITADTLEQAIERAGTKHGNKGWEAALSAIEMANLFKSLR

SEQ ID NO: 3729 - protein, 1371 aa, Artificial Sequence
  SARS-CoV-2/2019-nCoV/USA-CruiseA-18/2020__MT159716.1 spike protein (1-1211)(K986P_V987P) LumSynth construct
MFVFLVLLPLVSSQCVNLTTRTQLPPAYTNSFTRGVYYPDKVFRSSVLHSTQDLFLPFFSNVTWFHAIHVSGTNGTKRFDNPVLPFNDGVYFASTEKSNIIRGWIFGTTLDSKTQSLLIVNNATNVVIKVCEFQFCNDPFLGVYYHKNNKSWMESELRVYSSANNCTFEYVSQPFLMDLEGKQGNFKNLREFVFKNIDGYFKIYSKHTPINLVRDLPQGFSALEPLVDLPIGINITRFQTLLALHRSYLTPGDSSSGWTAGAAAYYVGYLQPRTFLLKYNENGTITDAVDCALDPLSETKCTLKSFTVEKGIYQTSNFRVQPTESIVRFPNITNLCPFGEVFNATRFASVYAWNRKRISNCVADYSVLYNSASFSTFKCYGVSPTKLNDLCFTNVYADSFVIRGDEVRQIAPGQTGKIADYNYKLPDDFTGCVIAWNSNNLDSKVGGNYNYLYRLFRKSNLKPFERDISTEIYQAGSTPCNGVEGFNCYFPLQSYGFQPTNGVGYQPYRVVVLSFELLHAPATVCGPKKSTNLVKNKCVNFNFNGLTGTGVLTESNKKFLPFQQFGRDIADTTDAVRDPQTLEILDITPCSFGGVSVITPGTNTSNQVAVLYQDVNCTEVPVAIHADQLTPTWRVYSTGSNVFQTRAGCLIGAEHVNNSYECDIPIGAGICASYQTQTNSPRRARSVASQSIIAYTMSLGAENSVAYSNNSIAIPTNFTISVTTEILPVSMTKTSVDCTMYICGDSTECSNLLLQYGSFCTQLNRALTGIAVEQDKNTQEVFAQVKQIYKTPPIKDFGGFNFSQILPDPSKPSKRSFIEDLLFNKVTLADAGFIKQYGDCLGDIAARDLICAQKFNGLTVLPPLLTDEMIAQYTSALLAGTITSGWTFGAGAALQIPFAMQMAYRFNGIGVTQNVLYENQKLIANQFNSAIGKIQDSLSSTASALGKLQDVVNQNAQALNTLVKQLSSNFGAISSVLNDILSRLDPPEAEVQIDRLITGRLQSLQTYVTQQLIRAAEIRASANLAATKMSECVLGQSKRVDFCGKGYHLMSFPQSAPHGVVFLHVTYVPAQEKNFTTAPAICHDGKAHFPREGVFVSNGTHWFVTQRNFYEPQIITTDNTFVSGNCDVVIGIVNNTVYDPLQPELDSFKEELDKYFKNHTSPDVDLGDISGINASVVNIQKEIDRLNEVAKNLNESLIDLQELGKYEQYIKGGGSGGGQIYEGKLTAEGLRFGIVASRFNHALVDRLVEGAIDAIVRHGGREEDITLVRVPGSWEIPVAAGELARKEDIDAVIAIGVLIRGATPHFDYIASEVSKGLADLSLELRKPITFGVITADTLEQAIERAGTKHGNKGWEAALSAIEMANLFKSLR

SEQ ID NO: 3730 - protein, 1371 aa, Artificial Sequence
  SARS-CoV-2/SARS-CoV-2/Yunnan-01/human/2020/CHN__MT049951.1 spike protein (1-1211)(K986P_V987P) LumSynth construct
MFVFLVLLPLVSSQCVNLTTRTQLPPANTNSFTRGVYYPDKVFRSSVLHSTQDLFLPFFSNVTWFHAIHVSGTNGTKRFDNPVLPFNDGVYFASTEKSNIIRGWIFGTTLDSKTQSLLIVNNATNVVIKVCEFQFCNDPFLGVYYHKNNKSWMESEFRVYSSANNCTFEYVSQPFLMDLEGKQGNFKNLREFVFKNIDGYFKIYSKHTPINLVRDLPQGFSALEPLVDLPIGINITRFQTLLALHRSYLTPGDSSSGWTAGAAAYYVGYLQPRTFLLKYNENGTITDAVDCALDPLSETKCTLKSFTVEKGIYQTSNFRVQPTESIVRFPNITNLCPFGEVFNATRFASVYAWNRKRISNCVADYSVLYNSASFSTFKCYGVSPTKLNDLCFTNVYADSFVIRGDEVRQIAPGQTGKIADYNYKLPDDFTGCVIAWNSNNLDSKVGGNYNYLYRLFRKSNLKPFERDISTEIYQAGSTPCNGVEGFNCYFPLQSYGFQPTNGVGYQPYRVVVLSFELLHAPATVCGPKKSTNLVKNKCVNFNFNGLTGTGVLTESNKKFLPFQQFGRDIADTTDAVRDPQTLEILDITPCSFGGVSVITPGTNTSNQVAVLYQDVNCTEVPVAIHADQLTPTWRVYSTGSNVFQTRAGCLIGAEHVNNSYECDIPIGAGICASYQTQTNSPRRARSVASQSIIAYTMSLGAENSVAYSNNSIAIPTNFTISVTTEILPVSMTKTSVDCTMYICGDSTECSNLLLQYGSFCTQLNRALTGIAVEQDKNTQEVFAQVKQIYKTPPIKDFGGFNFSQILPDPSKPSKRSFIEDLLFNKVTLADAGFIKQYGDCLGDIAARDLICAQKFNGLTVLPPLLTDEMIAQYTSALLAGTITSGWTFGAGAALQIPFAMQMAYRFNGIGVTQNVLYENQKLIANQFNSAIGKIQDSLSSTASALGKLQDVVNQNAQALNTLVKQLSSNFGAISSVLNDILSRLDPPEAEVQIDRLITGRLQSLQTYVTQQLIRAAEIRASANLAATKMSECVLGQSKRVDFCGKGYHLMSFPQSAPHGVVFLHVTYVPAQEKNFTTAPAICHDGKAHFPREGVFVSNGTHWFVTQRNFYEPQIITTDNTFVSGNCDVVIGIVNNTVYDPLQPELDSFKEELDKYFKNHTSPDVDLGDISGINASVVNIQKEIDRLNEVAKNLNESLIDLQELGKYEQYIKGGGSGGGQIYEGKLTAEGLRFGIVASRFNHALVDRLVEGAIDAIVRHGGREEDITLVRVPGSWEIPVAAGELARKEDIDAVIAIGVLIRGATPHFDYIASEVSKGLADLSLELRKPITFGVITADTLEQAIERAGTKHGNKGWEAALSAIEMANLFKSLR

SEQ ID NO: 3731 - protein, 1371 aa, Artificial Sequence
  SARS-CoV-2/USA/WA-UW292/2020__EPI_ISL_418077 spike protein (1-1211)(K986P_V987P) LumSynth construct
MFVFLVLLPLVSSQCVNLTTRTQLPPAYTNSFTRGVYYPDKVFRSSVLHSTQDLFLPFFSNVTWFHAIHVSGTNGTKRFDNPVLPFNDGVYFASTEKSNIIRGWIFGTTLDSKTQSLLIVNNATNVVIKVCEFQFCNDPFLGVYYHKNNKSWMESEFRVYSSANNCTFEYVSQPFLMDLEGKQGNFKNLREFVFKNIDGYFKIYSKHTPINLVRDLPQGFSALEPLVDLPIGINITRFQTLLALHRSYLTPGDSSSGWTAGAAAYYVGYLQPRTFLLKYNENGTITDAVDCALDPLSETKCTLKSFTVEKGIYQTSNFRVQPTESIVRFPNITNLCPFGEVFNATRFASVYAWNRKRISNCVADYSVLYNSASFSTFKCYGVSPTKLNDLCFTNVYADSFVIRGDEVRQIAPGQTGKIADYNYKLPDDFTGCVIAWNSNNLDSKVGGNYNYLYRLFRKSNLKPFERDISTEIYQASSTPCNGVEGFNCYFPLQSYGFQPTNGVGYQPYRVVVLSFELLHAPATVCGPKKSTNLVKNKCVNFNFNGLTGTGVLTESNKKFLPFQQFGRDIADTTDAVRDPQTLEILDITPCSFGGVSVITPGTNTSNQVAVLYQDVNCTEVPVAIHADQLTPTWRVYSTGSNVFQTRAGCLIGAEHVNNSYECDIPIGAGICASYQTQTNSPRRARSVASQSIIAYTMSLGAENSVAYSNNSIAIPTNFTISVTTEILPVSMTKTSVDCTMYICGDSTECSNLLLQYGSFCTQLNRALTGIAVEQDKNTQEVFAQVKQIYKTPPIKDFGGFNFSQILPDPSKPSKRSFIEDLLFNKVTLADAGFIKQYGDCLGDIAARDLICAQKFNGLTVLPPLLTDEMIAQYTSALLAGTITSGWTFGAGAALQIPFAMQMAYRFNGIGVTQNVLYENQKLIANQFNSAIGKIQDSLSSTASALGKLQDVVNQNAQALNTLVKQLSSNFGAISSVLNDILSRLDPPEAEVQIDRLITGRLQSLQTYVTQQLIRAAEIRASANLAATKMSECVLGQSKRVDFCGKGYHLMSFPQSAPHGVVFLHVTYVPAQEKNFTTAPAICHDGKAHFPREGVFVSNGTHWFVTQRNFYEPQIITTDNTFVSGNCDVVIGIVNNTVYDPLQPELDSFKEELDKYFKNHTSPDVDLGDISGINASVVNIQKEIDRLNEVAKNLNESLIDLQELGKYEQYIKGGGSGGGQIYEGKLTAEGLRFGIVASRFNHALVDRLVEGAIDAIVRHGGREEDITLVRVPGSWEIPVAAGELARKEDIDAVIAIGVLIRGATPHFDYIASEVSKGLADLSLELRKPITFGVITADTLEQAIERAGTKHGNKGWEAALSAIEMANLFKSLR

SEQ ID NO: 3732 - protein, 1371 aa, Artificial Sequence
  SARS-CoV-2/Iceland/192/2020__EPI_ISL_417819 spike protein (1-1211)(K986P_V987P) LumSynth construct
MFVFFVLLPLVSSQCVNLTTRTQLPPAYTNSFTRGVYYPDKVFRSSVLHSTQDLFLPFFSNVTWFHAIHVSGTNGTKRFDNPVLPFNDGVYFASTEKSNIIRGWIFGTTLDSKTQSLLIVNNATNVVIKVCEFQFCNDPFLGVYYHKNNKSWMESEFRVYSSANNCTFEYVSQPFLMDLEGKQGNFKNLREFVFKNIDGYFKIYSKHTPINLVRDLPQGFSALEPLVDLPIGINITRFQTLLALHRSYLTPGDSSSGWTAGAAAYYVGYLQPRTFLLKYNENGTITDAVDCALDPLSETKCTLKSFTVEKGIYQTSNFRVQPTESIVRFPNITNLCPFGEVFNATRFASVYAWNRKRISNCVADYSVLYNSASFSTFKCYGVSPTKLNDLCFTNVYADSFVIRGDEVRQIAPGQTGKIADYNYKLPDDFTGCVIAWNSNNLDSKVGGNYNYLYRLFRKSNLKPFERDISTEIYQAGSTPCNGVEGFNCYFPLQSYGFQPTNGVGYQPYRVVVLSFELLHAPATVCGPKKSTNLVKNKCVNFNFNGLTGTGVLTESNKKFLPFQQFGRDIADTTDAVRDPQTLEILDITPCSFGGVSVITPGTNTSNQVAVLYQGVNCTEVPVAIHADQLTPTWRVYSTGSNVFQTRAGCLIGAEHVNNSYECDIPIGAGICASYQTQTNSPRRARSVASQSIIAYTMSLGAENSVAYSNNSIAIPTNFTISVTTEILPVSMTKTSVDCTMYICGDSTECSNLLLQYGSFCTQLNRALTGIAVEQDKNTQEVFAQVKQIYKTPPIKDFGGFNFSQILPDPSKPSKRSFIEDLLFNKVTLADAGFIKQYGDCLGDIAARDLICAQKFNGLTVLPPLLTDEMIAQYTSALLAGTITSGWTFGAGAALQIPFAMQMAYRFNGIGVTQNVLYENQKLIANQFNSAIGKIQDSLSSTASALGKLQDVVNQNAQALNTLVKQLSSNFGAISSVLNDILSRLDPPEAEVQIDRLITGRLQSLQTYVTQQLIRAAEIRASANLAATKMSECVLGQSKRVDFCGKGYHLMSFPQSAPHGVVFLHVTYVPAQEKNFTTAPAICHDGKAHFPREGVFVSNGTHWFVTQRNFYEPQIITTDNTFVSGNCDVVIGIVNNTVYDPLQPELDSFKEELDKYFKNHTSPDVDLGDISGINASVVNIQKEIDRLNEVAKNLNESLIDLQELGKYEQYIKGGGSGGGQIYEGKLTAEGLRFGIVASRFNHALVDRLVEGAIDAIVRHGGREEDITLVRVPGSWEIPVAAGELARKEDIDAVIAIGVLIRGATPHFDYIASEVSKGLADLSLELRKPITFGVITADTLEQAIERAGTKHGNKGWEAALSAIEMANLFKSLR

SEQ ID NO: 3733 - protein, 1371 aa, Artificial Sequence
  SARS-CoV-2/Belgium/ULG-6939/2020__EPI_ISL_417020 spike protein (1-1211)(K986P_V987P) LumSynth construct
MFVFLVLLPLVSSQCVNLTTRTQLPPAYTNSFTRGVYYPDKVFRSSVLHSTQDLFLPFFSNVTWFHAIHVSGTNGTKRFDNPVLPFNDGVYFASTEKSNIIRGWIFGTTLDSKTQSLLIVNNATNVVIKVCEFQFCNDPFLGVYYHKNNKSWMESEFRVYSSANNCTFEYVSQPFLMDLEGKQGNFKNLREFVFKNIDGYFKIYSKHTPINLVRDLPQGFSALEPLVDLPIGINITRFQTLLALHRSYLTPGDSSSGWTAGAAAYYVGYLQPRTFLLKYNENGTITDAVDCALDPLSETKCTLKSFTVEKGIYQTSNFRVQPTESIVRFPNITNLCPFGEVFNATRFASVYAWNRKRISNCVADYSVLYNSASFSTFKCYGVSPTKLNDLCFTNVYADSFVIRGDEVRQIAPGQTGKIADYNYKLPDDFTGCVIAWNSNNLDSKVGGNYNYLYRLFRKSNLKPFERDISTEIYQAGSTPCNGVEGFNCYFPLQSYGFQPTNGVGYQPYRVVVLSFELLHAPATVCGPKKSTNLVKNKCVNFNFNGLTGTGVLTESNKKFLPFQQFGRDIADTTDAVRDPQTLEILDITPCSFGGVSVITPGTNTSNQVAVLYQGVNCTEVPVAIHADQLTPTWRVYSTGSNVFQTRAGCLIGAEHVNNSYECDIPIGAGICASYQTQTNSPRRARSVASQSIIAYTMSLGAENSVVYSNNSIAIPTNFTISVTTEILPVSMTKTSVDCTMYICGDSTECSNLLLQYGSFCTQLNRALTGIAVEQDKNTQEVFAQVKQIYKTPPIKDFGGFNFSQILPDPSKPSKRSFIEDLLFNKVTLADAGFIKQYGDCLGDIAARDLICAQKFNGLTVLPPLLTDEMIAQYTSALLAGTITSGWTFGAGAALQIPFAMQMAYRFNGIGVTQNVLYENQKLIANQFNSAIGKIQDSLSSTASALGKLQDVVNQNAQALNTLVKQLSSNFGAISSVLNDILSRLDPPEAEVQIDRLITGRLQSLQTYVTQQLIRAAEIRASANLAATKMSECVLGQSKRVDFCGKGYHLMSFPQSAPHGVVFLHVTYVPAQEKNFTTAPAICHDGKAHFPREGVFVSNGTHWFVTQRNFYEPQIITTDNTFVSGNCDVVIGIVNNTVYDPLQPELDSFKEELDKYFKNHTSPDVDLGDISGINASVVNIQKEIDRLNEVAKNLNESLIDLQELGKYEQYIKGGGSGGGQIYEGKLTAEGLRFGIVASRFNHALVDRLVEGAIDAIVRHGGREEDITLVRVPGSWEIPVAAGELARKEDIDAVIAIGVLIRGATPHFDYIASEVSKGLADLSLELRKPITFGVITADTLEQAIERAGTKHGNKGWEAALSAIEMANLFKSLR

SEQ ID NO: 3734 - protein, 1371 aa, Artificial Sequence
  SARS-CoV-2/France/HF2496/2020__EPI_ISL_418231 spike protein (1-1211)(K986P_V987P) LumSynth construct
MFVFLVLLPLVSSQCVNLTTRTQLPPAYTNSFTRGVYYPDKVFRSSVLHSTQDLFLPFFSNVTWFHAIHVSGTNGTKRFDNPVLPFNDGVYFASTEKSNIIRGWIFGTTLDSKTQSLLIVNNATNVVIKVCEFQFCNDPFLGVYYHKNNKSWMESEFRVYSSANNCTFEYVSQPFLMDLEGKQGNFKNLREFVFKNIDGYFKIYSKHTPINLVRDLPQGFSALEPLVDLPIGINITRFQTLLALHRSYLTPGDSSSGWTAGAAAYYVGYLQPRTFLLKYNENGTITDAVDCALDPLSETKCTLKSFTVEKGIYQTSNFRVQPTESIVRFPNITNLCPFGEVFNATRFASVYAWNRKRISNCVADYSVLYNSASFSTFKCYGVSPTKLNDLCFTNVYADSFVIRGDEVRQIAPGQTGKIADYNYKLPDDFTGCVIAWNSNNLDSKVGGNYNYLYRLFRKSNLKPFERDISTEIYQAGSTPCNGVEGFNCYFPLQSYGFQPTNGVGYQPYRVVVLSFELLHAPATVCGPKKSTNLVKNKCVNFNFNGLTGTGVLTESNKKFLPFQQFGRDIADTTDAVRDPQTLEILDITPCSFGGVSVITPGTNTSNQVAVLYQGVNCTEVPVAIHADQLTPTWRVYSTGSNVFQTRAGCLIGAEHVNNSYECDIPIGAGICASYQTQTNSPRRARSVASQSIIAYTMSLGAENSVAYSNNSIAIPTNFTISVTTEILPVSMTKTSVDCTMYICGDSTECSNLLLQYGSFCTQLNRALTGIAVEQDKNTQEVFAQVKQIYKTPPIKDFGGFNFSQILPDPSKPSKRSFIEDLLFNKVTLADAGFIKQYGDCLGDIVARDLICAQKFNGLTVLPPLLTDEMIAQYTSALLAGTITSGWTFGAGAALQIPFAMQMAYRFNGIGVTQNVLYENQKLIANQFNSAIGKIQDSLSSTASALGKLQDVVNQNAQALNTLVKQLSSNFGAISSVLNDILSRLDPPEAEVQIDRLITGRLQSLQTYVTQQLIRAAEIRASANLAATKMSECVLGQSKRVDFCGKGYHLMSFPQSAPHGVVFLHVTYVPAQEKNFTTAPAICHDGKAHFPREGVFVSNGTHWFVTQRNFYEPQIITTDNTFVSGNCDVVIGIVNNTVYDPLQPELDSFKEELDKYFKNHTSPDVDLGDISGINASVVNIQKEIDRLNEVAKNLNESLIDLQELGKYEQYIKGGGSGGGQIYEGKLTAEGLRFGIVASRFNHALVDRLVEGAIDAIVRHGGREEDITLVRVPGSWEIPVAAGELARKEDIDAVIAIGVLIRGATPHFDYIASEVSKGLADLSLELRKPITFGVITADTLEQAIERAGTKHGNKGWEAALSAIEMANLFKSLR

SEQ ID NO: 3735 - protein, 1371 aa, Artificial Sequence
  SARS-CoV-2/USA/WA-UW291/2020__EPI_ISL_418076 spike protein (1-1211)(K986P_V987P) LumSynth construct
MFVFLVLLPLVSSQCVNLTTRTQLPPAYTNSFTRGVYYPDKVFRSSVLHSTQDLFLPFFSNVTWFHAIHVSGTNGTKRFDNPVLPFNDGVYFASTEKSNIIRGWIFGTTLDSKTQSLLIVNNATNVVIKVCEFQFCNDPFLGVYYHKNNKSWMESEFRVYSSANNCTFEYVSQPFLMDLEGKQGNFKNLREFVFKNIDGYFKIYSKHTPINLVRDLPQGFSALEPLVDLPIGINITRFQTLLALHRSYLTPGDSSSGWTAGAAAYYVGYLQPRTFLLKYNENGTITDAVDCALDPLSETKCTLKSFTVEKGIYQTSNFRVQPTESIVRFPNITNLCPFGEVFNATRFASVYAWNRKRISNCVADYSVLYNSASFSTFKCYGVSPTKLNDLCFTNVYADSFVIRGDEVRQIAPGQTGKIADYNYKLPDDFTGCVIAWNSNNLDSKVGGNYNYLYRLFRKSNLKPFERDISTEIYQAGSTPCNGVEGFNCYFPLQSYGFQPTNGVGYQPYRVVVLSFELLHAPATVCGPKKSTNLVKNKCVNFNFNGLTGTGVLTESNKKFLPFQQFGRDIADTTDAVRDPQTLEILDITPCSFGGVSVITPGTNTSNQVAVLYQGVNCTEVPVAIHADQLTPTWRVYSTGSNVFQTRAGCLIGAEHVNNSYECDIPIGAGICASYQTQTNSPRRARSVASQSIIAYTMSLGAENSVAYSNNSIAIPTNFTISVTTEILPVSMTKTSVDCTMYICGDSTECSNLLLQYGSFCTQLNRALTGIAVEQDKNTQEVFAQVKQIYKTPPIKDFGGFNFSQILPDPSKPSKRSFIEDLLFNKVTLADAGFIKQYGDCLGDIAARDLICAQKFNGLTVLPPLLTDEMIAQYTSALLAGTITSGWTFGAGAALQIPFAMQMAYRFNGIGVTQNVLYENQKLIANQFNSAIGKIQYSLSSTASALGKLQDVVNQNAQALNTLVKQLSSNFGAISSVLNDILSRLDPPEAEVQIDRLITGRLQSLQTYVTQQLIRAAEIRASANLAATKMSECVLGQSKRVDFCGKGYHLMSFPQSAPHGVVFLHVTYVPAQEKNFTTAPAICHDGKAHFPREGVFVSNGTHWFVTQRNFYEPQIITTDNTFVSGNCDVVIGIVNNTVYDPLQPELDSFKEELDKYFKNHTSPDVDLGDISGINASVVNIQKEIDRLNEVAKNLNESLIDLQELGKYEQYIKGGGSGGGQIYEGKLTAEGLRFGIVASRFNHALVDRLVEGAIDAIVRHGGREEDITLVRVPGSWEIPVAAGELARKEDIDAVIAIGVLIRGATPHFDYIASEVSKGLADLSLELRKPITFGVITADTLEQAIERAGTKHGNKGWEAALSAIEMANLFKSLR

SEQ ID NO: 3736 - protein, 1371 aa, Artificial Sequence; identical to SEQ ID NO: 93
  SARS-CoV-2/Portugal/PT0034/2020__EPI_ISL_418019 spike protein (1-1211)(K986P_V987P) LumSynth construct

SEQ ID NO: 3737 - protein, 1371 aa, Artificial Sequence
  SARS-CoV-2/Iceland/202/2020__EPI_ISL_417750 spike protein (1-1211)(K986P_V987P) LumSynth construct
MFVFLVLLPLVSSQCVNLTTRTQLPPAYTNSFTRGVYYPDKVFRSSVLHSTQDLFLPFFSNVTWFHAIHVSGTNGTKRFDNPVLPFNDGVYFASTEKSNIIRGWIFGTTLDSKTQSLLIVNNATNVVIKVCEFQFCNDPFLGVYYHKNNKSWMESEFRVYSSANNCTFEYVSQPFLMDLEGKQGNFKNLREFVFKNIDGYFKIYSKHTPINLVRDLPQGFSALEPLVDLPIGINITRFQTLLALHRSYLTPGDSSSGWTAGAAAYYVGYLQPRTFLLKYNENGTITDAVDCALDPLSETKCTLKSFTVEKGIYQTSNFRVQPTESIVRFPNITNLCPFGEVFNATRFASVYAWNRKRISNCVADYSVLYNSASFSTFKCYGVSPTKLNDLCFTNVYADSFVIRGDEVRQIAPGQTGKIADYNYKLPDDFTGCVIAWNSNNLDSKVGGNYNYLYRLFRKSNLKPFERDISTEIYQAGSTPCNGVEGFNCYFPLQSYGFQPTNGVGYQPYRVVVLSFELLHAPATVCGPKKSTNLVKNKCVNFNFNGLTGTGVLTESNKKFLPFQQFGRDIADTTDAVRDPQTLEILDITPCSFGGVSVITPGTNTSNQVAVLYQDVNCTEVPVAIHADQLTPTWRVYSTGSNVFQTRAGCLIGAEHVNNSYECDIPIGAGICASYQTQTNSPRRARSVASQSIIAYTMSLGAENSVAYSNNSIAIPTNFTISVTTEILPVSMTKTSVDCTMYICGDSTECSNLLLQYGSFCTQLNRALTGIAVEQDKNTQEVFAQVKQIYKTPPIKDFGGFNFSQILPDPSKPSKRSFIEDLLFNKVTLADAGFIKQYGDCLGDIAARDLICAQKFNGLTVLPPLLTDEMIAQYTSALLAGTITSGWTFGAGAALQIPFAMQMAYRFNGIGVTQNVLYENQKLIANQFNSAIGKIQDSLSSTASALGKLQDVVNQNAQALNTLVKQLSSNFGAISSVLNDILSRLDPPEAEVQIDRLITGRLQSLQTYVTQQLIRAAEIRASANLAATKMSECVLGQSKRVDFCGKGYHLMSFPQSAPHGVVFLHVTYVPAQEKNFTTAPAICHDGKAHFPREGVFVSNGTHWFVTQRNFYEPQIITTDNTFVSGNCDVVIGIVNNTVYDPLQPELDSFKEELDKYFKNHTSPDVDLGDIPGINASVVNIQKEIDRLNEVAKNLNESLIDLQELGKYEQYIKGGGSGGGQIYEGKLTAEGLRFGIVASRFNHALVDRLVEGAIDAIVRHGGREEDITLVRVPGSWEIPVAAGELARKEDIDAVIAIGVLIRGATPHFDYIASEVSKGLADLSLELRKPITFGVITADTLEQAIERAGTKHGNKGWEAALSAIEMANLFKSLR

SEQ ID NO: 3738 - protein, 1371 aa, Artificial Sequence
  SARS-CoV-2/USA/WA-UW261/2020__EPI_ISL_418046 spike protein (1-1211)(K986P_V987P) LumSynth construct
MFVFLVLLPLVSSQCVNLTTRTQLPPAYTNSFTRGVYYPDKVFRSSVLHSTQDLFLPFFSNVTWFHAIHVSGTNGTKRFDNPVLPFNDGVYFASTEKSNIIRGWIFGTTLDSKTQSLLIVNNATNVVIKVCEFQFCNDPFLGVYYHKNNKSWMESEFRVYSSANNCTFEYVSQPFLMDLEGKQGNFKNLREFVFKNIDGYFKIYSKHTPINLVRDLPQGFSALEPLVDLPIGINITRFQTLLALHRSYLTPGDSSSGWTAGAAAYYVGYLQPRTFLLKYNENGTITDAVDCALDPLSETKCTLKSFTVEKGIYQTSNFRVQPTESIVRFPNITNLCPFGEVFNATRFTSVYAWNRKRISNCVADYSVLYNSASFSTFKCYGVSPTKLNDLCFTNVYADSFVIRGDEVRQIAPGQTGKIADYNYKLPDDFTGCVIAWNSNNLDSKVGGNYNYLYRLFRKSNLKPFERDISTEIYQAGSTPCNGVEGFNCYFPLQSYGFQPTNGVGYQPYRVVVLSFELLHAPATVCGPKKSTNLVKNKCVNFNFNGLTGTGVLTESNKKFLPFQQFGRDIADTTDAVRDPQTLEILDITPCSFGGVSVITPGTNTSNQVAVLYQDVNCTEVPVAIHADQLTPTWRVYSTGSNVFQTRAGCLIGAEHVNNSYECDIPIGAGICASYQTQTNSPRRARSVASQSIIAYTMSLGAENSVAYSNNSIAIPTNFTISVTTEILPVSMTKTSVDCTMYICGDSTECSNLLLQYGSFCTQLNRALTGIAVEQDKNTQEVFAQVKQIYKTPPIKDFGGFNFSQILPDPSKPSKRSFIEDLLFNKVTLADAGFIKQYGDCLGDIAARDLICAQKFNGLTVLPPLLTDEMIAQYTSALLAGTITSGWTFGAGAALQIPFAMQMAYRFNGIGVTQNVLYENQKLIANQFNSAIGKIQDSLSSTASALGKLQDVVNQNAQALNTLVKQLSSNFGAISSVLNDILSRLDPPEAEVQIDRLITGRLQSLQTYVTQQLIRAAEIRASANLAATKMSECVLGQSKRVDFCGKGYHLMSFPQSAPHGVVFLHVTYVPAQEKNFTTAPAICHDGKAHFPREGVFVSNGTHWFVTQRNFYEPQIITTDNTFVSGNCDVVIGIVNNTVYDPLQPELDSFKEELDKYFKNHTSPDVDLGDISGINASVVNIQKEIDRLNEVAKNLNESLIDLQELGKYEQYIKGGGSGGGQIYEGKLTAEGLRFGIVASRFNHALVDRLVEGAIDAIVRHGGREEDITLVRVPGSWEIPVAAGELARKEDIDAVIAIGVLIRGATPHFDYIASEVSKGLADLSLELRKPITFGVITADTLEQAIERAGTKHGNKGWEAALSAIEMANLFKSLR

SEQ ID NO: 3739 - protein, 1371 aa, Artificial Sequence
  SARS-CoV-2/Portugal/PT0035/2020__EPI_ISL_418020 spike protein (1-1211)(K986P_V987P) LumSynth construct
MFVFLVLLPLVSSQCVNLTTRTQLPPAYTNSFTRGVYYPDKVFRSSVLHSTQDLFLPFFSNVTWFHAIHVSGTNGTKRFDNPVLPFNDGVYFASTEKSNIIRGWIFGTTLDSKTQSLLIVNNATNVVIKVCEFQFCNDPFLGVYYHKNNKSWMESEFRVYSSANNCTFEYVSQPFLMDLEGKQGNFKNLREFVFKNIDGYFKIYSKHTPINLVRDLPQGFSALEPLVDLPIGINITRFQTLLALHRSYLTPGDSSSGWTAGAAAYYVGYLQPRTFLLKYNENGTITDAVDCALDPLSETKCTLKSFTVEKGIYQTSNFRVQPTESIVRFPNITNLCPFGEVFNATRFASVYAWNRKRISNCVADYSVLYNSASFSTFKCYGVSPTKLNDLCFTNVYADSFVIRGDEVRQIAPGQTGKIADYNYKLPDDFTGCVIAWNSNNLDSKVGGNYNYLYRLFRKSNLKPFERDISTEIYQAGSTPCNGVEGFNCYFPLQSYGFQPTNGVGYQPYRVVVLSFELLHAPATVCGPKKSTNLVKNKCVNFNFNGLTGTGVLTESNKKFLPFQQFGRDIADTTDAVRDPQTLEILDITPCSFGGVSVITPGTNTSNQVAVLYQDVNCTEVPVAIHADQLTPTWRVYSTGSNVFQTRAGCLIGAEHVNNSYECDIPIGAGICASYQTQTNSPRRARSVASQSIIAYTMSLGAENSVAYSNNSIAIPTNFTISVTTEILPVSMTKTSVDCTMYICGDSTECSNLLLQYGSFCTQLNRALTGIAVEQDKNTQEVFAQVKQIYKTPPIKDFGGFNFSQILPDPSKPSKRSFIEDLLFNKVTLADAGFIKQYGDCLGDISARDLICAQKFNGLTVLPPLLTDEMIAQYTSALLAGTITSGWTFGAGAALQIPFAMQMAYRFNGIGVTQNVLYENQKLIANQFNSAIGKIQDSLSSTASALGKLQDVVNQNAQALNTLVKQLSSNFGAISSVLNDILSRLDPPEAEVQIDRLITGRLQSLQTYVTQQLIRAAEIRASANLAATKMSECVLGQSKRVDFCGKGYHLMSFPQSAPHGVVFLHVTYVPAQEKNFTTAPAICHDGKAHFPREGVFVSNGTHWFVTQRNFYEPQIITTDNTFVSGNCDVVIGIVNNTVYDPLQPELDSFKEELDKYFKNHTSPDVDLGDISGINASVVNIQKEIDRLNEVAKNLNESLIDLQELGKYEQYIKGGGSGGGQIYEGKLTAEGLRFGIVASRFNHALVDRLVEGAIDAIVRHGGREEDITLVRVPGSWEIPVAAGELARKEDIDAVIAIGVLIRGATPHFDYIASEVSKGLADLSLELRKPITFGVITADTLEQAIERAGTKHGNKGWEAALSAIEMANLFKSLR

SEQ ID NO: 3740 - protein, 1371 aa, Artificial Sequence
  SARS-CoV-2/USA/NY-NYUMC7/2020__EPI_ISL_418192 spike protein (1-1211)(K986P_V987P) LumSynth construct
MFVFLVLLPLVSSQCVNLTTRTQLPPAYTNSFTRGVYYPDKVFRSSVLHSTQDLFLPFFSNVTWFHAIHVSGTNGTKRFDNPVLPFNDGVYFASTEKSNIIRGWIFGTTLDSKTQSLLIVNNATNVVIKVCEFQFCNDPFLGVYHHKNNKSWMESEFRVYSSANNCTFEYVSQPFLMDLEGKQGNFKNLREFVFKNIDGYFKIYSKHTPINLVRDLPQGFSALEPLVDLPIGINITRFQTLLALHRSYLTPGDSSSGWTAGAAAYYVGYLQPRTFLLKYNENGTITDAVDCALDPLSETKCTLKSFTVEKGIYQTSNFRVQPTESIVRFPNITNLCPFGEVFNATRFASVYAWNRKRISNCVADYSVLYNSASFSTFKCYGVSPTKLNDLCFTNVYADSFVIRGDEVRQIAPGQTGKIADYNYKLPDDFTGCVIAWNSNNLDSKVGGNYNYLYRLFRKSNLKPFERDISTEIYQAGSTPCNGVEGFNCYFPLQSYGFQPTNGVGYQPYRVVVLSFELLHAPATVCGPKKSTNLVKNKCVNFNFNGLTGTGVLTESNKKFLPFQQFGRDIADTTDAVRDPQTLEILDITPCSFGGVSVITPGTNTSNQVAVLYQGVNCTEVPVAIHADQLTPTWRVYSTGSNVFQTRAGCLIGAEHVNNSYECDIPIGAGICASYQTQTNSPRRARSVASQSIIAYTMSLGAENSVAYSNNSIAIPTNFTISVTTEILPVSMTKTSVDCTMYICGDSTECSNLLLQYGSFCTQLNRALTGIAVEQDKNTQEVFAQVKQIYKTPPIKDFGGFNFSQILPDPSKPSKRSFIEDLLFNKVTLADAGFIKQYGDCLGDIAARDLICAQKFNGLTVLPPLLTDEMIAQYTSALLAGTITSGWTFGAGAALQIPFAMQMAYRFNGIGVTQNVLYENQKLIANQFNSAIGKIQDSLSSTASALGKLQDVVNQNAQALNTLVKQLSSNFGAISSVLNDILSRLDPPEAEVQIDRLITGRLQSLQTYVTQQLIRAAEIRASANLAATKMSECVLGQSKRVDFCGKGYHLMSFPQSAPHGVVFLHVTYVPAQEKNFTTAPAICHDGKAHFPREGVFVSNGTHWFVTQRNFYEPQIITTDNTFVSGNCDVVIGIVNNTVYDPLQPELDSFKEELDKYFKNHTSPDVDLGDISGINASVVNIQKEIDRLNEVAKNLNESLIDLQELGKYEQYIKGGGSGGGQIYEGKLTAEGLRFGIVASRFNHALVDRLVEGAIDAIVRHGGREEDITLVRVPGSWEIPVAAGELARKEDIDAVIAIGVLIRGATPHFDYIASEVSKGLADLSLELRKPITFGVITADTLEQAIERAGTKHGNKGWEAALSAIEMANLFKSLR

SEQ ID NO: 3741 - protein, 1371 aa, Artificial Sequence
  SARS-CoV-2/Iceland/189/2020__EPI_ISL_417709 spike protein (1-1211)(K986P_V987P) LumSynth construct
MFVFLVLLPLVSSQCVNLTTRTQLPPAYTNSFTRGVYYPDKVFRSSVLHSTQDLFLPFFSNVTWFHAIHVSGTNGTKRFDNPVLPFNDGVYFASTEKSNIIRGWIFGTTLDSKTQSLLIVNNATNVVIKVCEFQFCNDPFLGVYYHKNNKSWMESEFRVYSSANNCTFEYVSQPFLMDLEGKQGNFKNLREFVFKNIDGYFKIYSKHTPINLVRDLPQGFSALEPLVDLPIGINITRFQTLLALHRSYLTPGDSSSGWTAGAAAYYVGYLQPRTFLLKYNENGTITDAVDCALDPLSETKCTLKSFTVEKGIYQTSNFRVQPTESIVRFPNITNLCPFGEVFNATRFASVYAWNRKRISNCVADYSVLYNSASFSTFKCYGVSPTKLNDLCFTNVYADSFVIRGDEVRQIAPGQTGKIADYNYKLPDDFTGCVIAWNSNNLDSKVGGNYNYLYRLFRKSNLKPFERDISTEIYQAGSTPCNGVEGFNCYFPLQSYGFQPTNGVGYQPYRVVVLSFELLHAPATVCGPKKSTNLVKNKCVNFNFNGLTGTGVLTESNKKFLPFQQFGRDIADTTDAVRDPQTLEILDITPCSFGGVSVITPGTNTSNQVAVLYQGVNCTEVPVAIHADQLTPTWRVYSTGSNVFQTRAGCLIGAEHVNNSYECDIPIGAGICASYQTQTNSPRRARSVASQSIIAYTMSLGAENSVAYSNNSIAIPTNFTISVTTEILPVSMTKTSVDCTMYICGDSTECSNLLLQYGSFCTQLNRALTGIAVEQDKNTQEVFAQVKQIYKTPPIKDFGGFNFSQILPDPSKPSKRSFIEDLLFNKVTLADAGFTKQYGDCLGDIAARDLICAQKFNGLTVLPPLLTDEMIAQYTSALLAGTITSGWTFGAGAALQIPFAMQMAYRFNGIGVTQNVLYENQKLIANQFNSAIGKIQDSLSSTASALGKLQDVVNQNAQALNTLVKQLSSNFGAISSVLNDILSRLDPPEAEVQIDRLITGRLQSLQTYVTQQLIRAAEIRASANLAATKMSECVLGQSKRVDFCGKGYHLMSFPQSAPHGVVFLHVTYVPAQEKNFTTAPAICHDGKAHFPREGVFVSNGTHWFVTQRNFYEPQIITTDNTFVSGNCDVVIGIVNNTVYDPLQPELDSFKEELDKYFKNHTSPDVDLGDISGINASVVNIQKEIDRLNEVAKNLNESLIDLQELGKYEQYIKGGGSGGGQIYEGKLTAEGLRFGIVASRFNHALVDRLVEGAIDAIVRHGGREEDITLVRVPGSWEIPVAAGELARKEDIDAVIAIGVLIRGATPHFDYIASEVSKGLADLSLELRKPITFGVITADTLEQAIERAGTKHGNKGWEAALSAIEMANLFKSLR

SEQ ID NO: 3742 - protein, 1371 aa, Artificial Sequence
  SARS-CoV-2/Australia/NSW56/2020__EPI_ISL_417408 spike protein (1-1211)(K986P_V987P) LumSynth construct
MFVFLVLLPLVSSQCVNLTTRTQLPPAYTNSFTRGVYYPDKVFRSSVLHSTQDLFLPFFSNVTWFHAIHVSGTNGTKRFDNPVLPFNDGVYFASTEKSNIIRGWIFGTTLDSKTQSLLIVNNATNVVIKVCEFQFCNDPFLGVYYHKNNKSWMESEFRVYSSANNCTFEYVSQPFLMDLEGKQGNFKNLREFVFKNIDGYFKIYSKHTPINLVRDLPQGFSALEPLVDLPIGINITRFQTLLALHRSYLTPGDSSSGWTAGAAAYYVGYLQPRTFLLKYNENGTITDAVDCALDPLSETKCTLKSFTVEKGIYQTSNFRVQPTESIVRFPNITNLCPFGEVFNATRFASVYAWNRKRISNCVADYSVLYNSASFSTFKCYGVSPTKLNDLCFTNVYADSFVIRGDEVRQIAPGQTGKIADYNYKLPDDFTGCVIAWNSNNLDSKVGGNYNYLYRLFRKSNLKPFERDISTEIYQAGSTPCNGVEGFNCYFPLQSYGFQPTNGVGYQPYRVVVLSFELLHAPATVCGPKKSTNLVKNKCVNFNFNGLTGTGVLTESNKKFLPFQQFGRDIADTTDAVRDPQTLEILDITPCSFGGVSVITPGTNTSNQVAVLYQDVNCTEVPVAIHADQLTPTWRVYSTGSNVFQTRAGCLIGAEHVNNSYECDIPIGAGICASYQTQTNSPRRARSVASQSIIAYTMSLGAENSVAYSNNSIAIPTNFTISVTTEILPVSMTKTSVDCTMYICGDSTECSNLLLQYGSFCTQLNRALTGIAVEQDKNTQEVFAQVKQIYKTPPIKDFGGFNFSQILPDSSKPSKRSFIEDLLFNKVTLADAGFIKQYGDCLGDIAARDLICAQKFNGLTVLPPLLTDEMIAQYTSALLAGTITSGWTFGAGAALQIPFAMQMAYRFNGIGVTQNVLYENQKLIANQFNSAIGKIQDSLSSTASALGKLQDVVNQNAQALNTLVKQLSSNFGAISSVLNDILSRLDPPEAEVQIDRLITGRLQSLQTYVTQQLIRAAEIRASANLAATKMSECVLGQSKRVDFCGKGYHLMSFPQSAPHGVVFLHVTYVPAQEKNFTTAPAICHDGKAHFPREGVFVSNGTHWFVTQRNFYEPQIITTDNTFVSGNCDVVIGIVNNTVYDPLQPELDSFKEELDKYFKNHTSPDVDLGDISGINASVVNIQKEIDRLNEVAKNLNESLIDLQELGKYEQYIKGGGSGGGQIYEGKLTAEGLRFGIVASRFNHALVDRLVEGAIDAIVRHGGREEDITLVRVPGSWEIPVAAGELARKEDIDAVIAIGVLIRGATPHFDYIASEVSKGLADLSLELRKPITFGVITADTLEQAIERAGTKHGNKGWEAALSAIEMANLFKSLR

SEQ ID NO: 3743 - protein, 1371 aa, Artificial Sequence
  SARS-CoV-2/Iceland/280/2020__EPI_ISL_417608 spike protein (1-1211)(K986P_V987P) LumSynth construct
MFVFLVLLPLVSSQCVNLTTRTQLPPAYTNSFTRGVYYPDKVFRSSVLHSTQDLFLPFFSNVTWFHAIHVSGTNGTKRFDNPVLPFNDGVYFASTEKSNIIRGWIFGTTLDSKTQSLLIVNNATNVVIKVCEFQFCNDPFLGVYYHKNNKSWMESEFRVYSSANNCTFEYVSQPFLMDLEGKQGNFKNLREFVFKNIDGYFKIYSKHTPINLVRDLPQGFSALEPLVDLPIGINITRFQTLLALHRSYLTPGDSSSGWTAGAAAYYVGYLQPRTFLLKYNENGTITDAVDCALDPLSETKCTLKSFTVEKGIYQTSNFRVQPTESIVRFPNITNLCPFGEVFNATRFASVYAWNRKRISNCVADYSVLYNSASFSTFKCYGVSPTKLNDLCFTNVYADSFVIRGDEVRQIAPGQTGKIADYNYKLPDDFTGCVIAWNSNNLDSKVGGNYNYLYRLFRKSNLKPFERDISTEIYQAGSTPCNGVEGFNCYFPLQSYGFQPTNGVGYQPYRVVVLSFELLHAPATVCGPKKSTNLVKNKCVNFNFNGLTGTGVLTESNKKFLPFQQFGRDIADTTDAVRDPQTLEILDITPCSFGGVSVITPGTNTSNQVAVLYQGVNCTEVPVAIHADQLTPTWRVYSTGSNVFQTRAGCLIGAEHVNNSYECDIPIGAGICASYHTQTNSPRRARSVASQSIIAYTMSLGAENSVAYSNNSIAIPTNFTISVTTEILPVSMTKTSVDCTMYICGDSTECSNLLLQYGSFCTQLNRALTGIAVEQDKNTQEVFAQVKQIYKTPPIKDFGGFNFSQILPDPSKPSKRSFIEDLLFNKVTLADAGFIKQYGDCLGDIAARDLICAQKFNGLTVLPPLLTDEMIAQYTSALLAGTITSGWTFGAGAALQIPFAMQMAYRFNGIGVTQNVLYENQKLIANQFNSAIGKIQDSLSSTASALGKLQDVVNQNAQALNTLVKQLSSNFGAISSVLNDILSRLDPPEAEVQIDRLITGRLQSLQTYVTQQLIRAAEIRASANLAATKMSECVLGQSKRVDFCGKGYHLMSFPQSAPHGVVFLHVTYVPAQEKNFTTAPAICHDGKAHFPREGVFVSNGTHWFVTQRNFYEPQIITTDNTFVSGNCDVVIGIVNNTVYDPLQPELDSFKEELDKYFKNHTSPDVDLGDISGINASVVNIQKEIDRLNEVAKNLNESLIDLQELGKYEQYIKGGGSGGGQIYEGKLTAEGLRFGIVASRFNHALVDRLVEGAIDAIVRHGGREEDITLVRVPGSWEIPVAAGELARKEDIDAVIAIGVLIRGATPHFDYIASEVSKGLADLSLELRKPITFGVITADTLEQAIERAGTKHGNKGWEAALSAIEMANLFKSLR

SEQ ID NO: 3744 - protein, 1371 aa, Artificial Sequence; identical to SEQ ID NO: 93
  SARS-CoV-2/Iceland/247/2020__EPI_ISL_417575 spike protein (1-1211)(K986P_V987P) LumSynth construct

SEQ ID NO: 3745 - protein, 1371 aa, Artificial Sequence
  SARS-CoV-2/Iceland/238/2020__EPI_ISL_417566 spike protein (1-1211)(K986P_V987P) LumSynth construct
MFVFLVLLPLVSSQCVNLTTRTQLPPAYTNSFTRGVYYPDKVFRSSVLHSTQDLFLPFFSNVTWFHAIHVSGTNGTKRFDNPVLPFNDGVYFASTEKSNIIRGWIFGTTLDSKTQSLLIVNNATNVVIKVCEFQFCNDPFLGVYYHKNNKSWMESEFRVYSSANNCTFEYVSQPFLMDLEGKQGNFKNLREFVFKNIDGYFKIYSKHTPINLVRDLPQGFSALEPLVDLPIGINITRFQTLLALHRSYLTPGDSSSGWTAGAAAYYVGYLQPRTFLLKYNENGTITDAVDCALDPLSETKCTLKSFTVEKGIYQTSNFRVQPTESIVRFPNITNLCPFGEVFNATRFASVYAWNRKRISNCVADYSVLYNSASFSTFKCYGVSPTKLNDLCFTNVYADSFVIRGDEVRQIAPGQTGKIADYNYKLPDDFTGCVIAWNSNNLDSKVGGNYNYLYRLFRKSNLKPFERDISTEIYQAGSTPCNGVEGFNCYFPLQSYGFQPTNGVGYQPYRVVVLSFELLHAPATVCGPKKSTNLVKNKCVNFNFNGLTGTGVLTESNKKFLPFQQFGRDIADTTDAVRDPQTLEILDITPCSFGGVSVITPGTNTSNQVAVLYQGVNCTEVPVAIHADQLTPTWRVYSTGSNVFQTRAGCLIGAEHVNNSYECDIPIGAGICASYQTQTNSPRRARSVASQSIIAYTMSLGAENSVAYSNNSIAIPTNFTISVTTEILPVSMTKTSVDCTMYICGDSTECSNLLLQYGSFCTQLNRALTGIAVEQDKNTQEVFAQVKQIYKTPPIKDFGGFNFSQILPDPSKPSKRSFIEDLLFNKVTLADVGFIKQYGDCLGDIAARDLICAQKFNGLTVLPPLLTDEMIAQYTSALLAGTITSGWTFGAGAALQIPFAMQMAYRFNGIGVTQNVLYENQKLIANQFNSAIGKIQDSLSSTASALGKLQDVVNQNAQALNTLVKQLSSNFGAISSVLNDILSRLDPPEAEVQIDRLITGRLQSLQTYVTQQLIRAAEIRASANLAATKMSECVLGQSKRVDFCGKGYHLMSFPQSAPHGVVFLHVTYVPAQEKNFTTAPAICHDGKAHFPREGVFVSNGTHWFVTQRNFYEPQIITTDNTFVSGNCDVVIGIVNNTVYDPLQPELDSFKEELDKYFKNHTSPDVDLGDISGINASVVNIQKEIDRLNEVAKNLNESLIDLQELGKYEQYIKGGGSGGGQIYEGKLTAEGLRFGIVASRFNHALVDRLVEGAIDAIVRHGGREEDITLVRVPGSWEIPVAAGELARKEDIDAVIAIGVLIRGATPHFDYIASEVSKGLADLSLELRKPITFGVITADTLEQAIERAGTKHGNKGWEAALSAIEMANLFKSLR

SEQ ID NO: 3746 - protein, 1371 aa, Artificial Sequence
  SARS-CoV-2/Greece/16/2020__EPI_ISL_418265 spike protein (1-1211)(K986P_V987P) LumSynth construct
MFVFLVLLPLVSSQCVNLTTRTQLPPAYTNSFTRGVYYPDKVFRSSVLHSTQDLFLPFFSNVTWFHAIHVSGTNGTKRFDNPVLPFNDGVYFASTEKSNIIRGWIFGTTLDSKTQSLLIVNNATNVVIKVCEFQFCNDPFLGVYYHKNNKSWMESEFRVYSSANNCTFEYVSQPFLMDLEGKQGNFKNLREFVFKNVDGYFKIYSKHTPINLVRDLPQGFSALEPLVDLPIGINITRFQTLLALHRSYLTPGDSSSGWTAGAAAYYVGYLQPRTFLLKYNENGTITDAVDCALDPLSETKCTLKSFTVEKGIYQTSNFRVQPTESIVRFPNITNLCPFGEVFNATRFASVYAWNRKRISNCVADYSVLYNSASFSTFKCYGVSPTKLNDLCFTNVYADSFVIRGDEVRQIAPGQTGKIADYNYKLPDDFTGCVIAWNSNNLDSKVGGNYNYLYRLFRKSNLKPFERDISTEIYQAGSTPCNGVEGFNCYFPLQSYGFQPTNGVGYQPYRVVVLSFELLHAPATVCGPKKSTNLVKNKCVNFNFNGLTGTGVLTESNKKFLPFQQFGRDIADTTDAVRDPQTLEILDITPCSFGGVSVITPGTNTSNQVAVLYQDVNCTEVPVAIHADQLTPTWRVYSTGSNVFQTRAGCLIGAEHVNNSYECDIPIGAGICASYQTQTNSPRRARSVASQSIIAYTMSLGAENSVAYSNNSIAIPTNFTISVTTEILPVSMTKTSVDCTMYICGDSTECSNLLLQYGSFCTQLNRALTGIAVEQDKNTQEVFAQVKQIYKTPPIKDFGGFNFSQILPDPSKPSKRSFIEDLLFNKVTLADAGFIKQYGDCLGDIAARDLICAQKFNGLTVLPPLLTDEMIAQYTSALLAGTITSGWTFGAGAALQIPFAMQMAYRFNGIGVTQNVLYENQKLIANQFNSAIGKIQDSLSSTASALGKLQDVVNQNAQALNTLVKQLSSNFGAISSVLNDILSRLDPPEAEVQIDRLITGRLQSLQTYVTQQLIRAAEIRASANLAATKMSECVLGQSKRVDFCGKGYHLMSFPQSAPHGVVFLHVTYVPAQEKNFTTAPAICHDGKAHFPREGVFVSNGTHWFVTQRNFYEPQIITTDNTFVSGNCDVVIGIVNNTVYDPLQPELDSFKEELDKYFKNHTSPDVDLGDISGINASVVNIQKEIDRLNEVAKNLNESLIDLQELGKYEQYIKGGGSGGGQIYEGKLTAEGLRFGIVASRFNHALVDRLVEGAIDAIVRHGGREEDITLVRVPGSWEIPVAAGELARKEDIDAVIAIGVLIRGATPHFDYIASEVSKGLADLSLELRKPITFGVITADTLEQAIERAGTKHGNKGWEAALSAIEMANLFKSLR

SEQ ID NO: 3747 - protein, 1371 aa, Artificial Sequence
  SARS-CoV-2/Iceland/319/2020__EPI_ISL_417648 spike protein (1-1211)(K986P_V987P) LumSynth construct
MFVFLVLLPLVSSQCVNLTTRTQLPPAYTNSFTRGVYYPDKVFRSSVLHSTQDLFLPFFSNVTWFHAIHVSGTNGTKRFDNPVLPFNDGVYFASTEKSNIIRGWIFGTTLDSKTQSLLIVNNATNVVIKVCEFQFCNDPFLGVYYHKNNKSWMESEFRVYSSANNCTFEYVSQPFLIDLEGKQGNFKNLREFVFKNIDGYFKIYSKHTPINLVRDLPQGFSALEPLVDLPIGINITRFQTLLALHRSYLTPGDSSSGWTAGAAAYYVGYLQPRTFLLKYNENGTITDAVDCALDPLSETKCTLKSFTVEKGIYQTSNFRVQPTESIVRFPNITNLCPFGEVFNATRFASVYAWNRKRISNCVADYSVLYNSASFSTFKCYGVSPTKLNDLCFTNVYADSFVIRGDEVRQIAPGQTGKIADYNYKLPDDFTGCVIAWNSNNLDSKVGGNYNYLYRLFRKSNLKPFERDISTEIYQAGSTPCNGVEGFNCYFPLQSYGFQPTNGVGYQPYRVVVLSFELLHAPATVCGPKKSTNLVKNKCVNFNFNGLTGTGVLTESNKKFLPFQQFGRDIADTTDAVRDPQTLEILDITPCSFGGVSVITPGTNTSNQVAVLYQGVNCTEVPVAIHADQLTPTWRVYSTGSNVFQTRAGCLIGAEHVNNSYECDIPIGAGICASYQTQTNSPRRARSVASQSIIAYTMSLGAENSVAYSNNSIAIPTNFTISVTTEILPVSMTKTSVDCTMYICGDSTECSNLLLQYGSFCTQLNRALTGIAVEQDKNTQEVFAQVKQIYKTPPIKDFGGFNFSQILPDPSKPSKRSFIEDLLFNKVTLADAGFIKQYGDCLGDIAARDLICAQKFNGLTVLPPLLTDEMIAQYTSALLAGTITSGWTFGAGAALQIPFAMQMAYRFNGIGVTQNVLYENQKLIANQFNSAIGKIQDSLSSTASALGKLQDVVNQNAQALNTLVKQLSSNFGAISSVLNDILSRLDPPEAEVQIDRLITGRLQSLQTYVTQQLIRAAEIRASANLAATKMSECVLGQSKRVDFCGKGYHLMSFPQSAPHGVVFLHVTYVPAQEKNFTTAPAICHDGKAHFPREGVFVSNGTHWFVTQRNFYEPQIITTDNTFVSGNCDVVIGIVNNTVYDPLQPELDSFKEELDKYFKNHTSPDVDLGDISGINASVVNIQKEIDRLNEVAKNLNESLIDLQELGKYEQYIKGGGSGGGQIYEGKLTAEGLRFGIVASRFNHALVDRLVEGAIDAIVRHGGREEDITLVRVPGSWEIPVAAGELARKEDIDAVIAIGVLIRGATPHFDYIASEVSKGLADLSLELRKPITFGVITADTLEQAIERAGTKHGNKGWEAALSAIEMANLFKSLR

SEQ ID NO: 3748 - protein, 1371 aa, Artificial Sequence
  SARS-CoV-2/Congo/94/2020__EPI_ISL_417947 spike protein (1-1211)(K986P_V987P) LumSynth construct
MFVFLVLLPLVSSQCVNLTTRTQLPPAYTNSFTRGVYYPDKVFRSSVLHSTQDLFLPFFSNVTWFHAIHVSGTNGTKRFDNPVLPFNDGVYFASTEKSNIIRGWIFGTTLDSKTQSLLIVNNATNVVIKVCEFQFCNDPFLGVYYHKNNKSWMESEFRVYSSANNCTFEYVSQPFLMDLEGKQGNFKNLREFVFKNIDGYFKIYSKHTPINLVRDLPQGFSALEPLVDLPIGINITRFQTLLALHRSYLTPGDSSSGWTAGAAAYYVGYLQPRTFLLKYNENGTITDAVDCALDPLSETKCTLKSFTVEKGIYQTSNFRVQPTESIVRFPNITNLCPFGEVFNATRFASVYAWNRKRISNCVADYSVLYNSASFSTFKCYGVSPTKLNDLCFTNVYADSFVIRGDEVRQIAPGQTGKIADYNYKLPDDFTGCVIAWNSNNLDSKVGGNYNYLYRLFRKSNLKPFERDISTEIYQAGSTPCNGVEGFNCYFPLQSYGFQPTNGVGYQPYRVVVLSFELLHAPATVCGPKKSTNLVKNKCVNFNFNGLTGTGVLTESNKKFLPFQQFGRDIADTTDAVRDPQTLEILDITPCSFGGVSVITPGTNTSNQVAVLYQGVNCTEVPVAIHADQLTPTWRVYSTGSNVFQTRAGCLIGAEHVNNSYECDIPIGAGICASYQTQTNSPRRARSVASQSIIAYTMSLGAENSVAYSNNSIAIPTNFTISVTTEILPVSMTKTSVDCTMYICGDSTECSNLLLQYGSFCTQLNRALTGIAVEQDKNTQEVFAQVKQIYKTPPIKDFGGFNFSQILPDPSKPSKRSFIEDILFNKVTLADAGFIKQYGDCLGDIAARDLICAQKFNGLTVLPPLLTDEMIAQYTSALLAGTITSGWTFGAGAALQIPFAMQMAYRFNGIGVTQNVLYENQKLIANQFNSAIGKIQDSLSSTASALGKLQDVVNQNAQALNTLVKQLSSNFGAISSVLNDILSRLDPPEAEVQIDRLITGRLQSLQTYVTQQLIRAAEIRASANLAATKMSECVLGQSKRVDFCGKGYHLMSFPQSAPHGVVFLHVTYVPAQEKNFTTAPAICHDGKAHFPREGVFVSNGTHWFVTQRNFYEPQIITTDNTFVSGNCDVVIGIVNNTVYDPLQPELDSFKEELDKYFKNHTSPDVDLGDISGINASVVNIQKEIDRLNEVAKNLNESLIDLQELGKYEQYIKGGGSGGGQIYEGKLTAEGLRFGIVASRFNHALVDRLVEGAIDAIVRHGGREEDITLVRVPGSWEIPVAAGELARKEDIDAVIAIGVLIRGATPHFDYIASEVSKGLADLSLELRKPITFGVITADTLEQAIERAGTKHGNKGWEAALSAIEMANLFKSLR

SEQ ID NO: 3749 - protein, 1371 aa, Artificial Sequence
  SARS-CoV-2/Congo/158/2020__EPI_ISL_417950 spike protein (1-1211)(K986P_V987P) LumSynth construct
MFVFLVLLPLVSSQCVNLTTRTQLPPAYTNSFTRGVYYPDKVFRSSVLHSTQDLFLPFFSNVTWFHAIHVSGTNGTKRFDNPVLPFNDGVYFASTEKSNIIRGWIFGTTLDSKTQSLLIVNNATNVVIKVCEFQFCNDPFLGVYYHKNNKSWMESEFRVYSSANNCTFEYVSQPFLMDLEGKQGNFKNLREFVFKNIDGYFKIYSKHTPINLVRDLPQGFSALEPLVDLPIGINITRFQTLLALHRSYLTPGDSSSGWTAGAAAYYVGYLQPRTFLLKYNENGTITDAVDCALDPLSETKCTLKSFTVEKGIYQTSNFRVQPTESIVRFPNITNLCPFGEVFNATRFASVYAWNRKRISNCVADYSVLYNSASFSTFKCYGVSPTKLNDLCFTNVYADSFVIRGDEVRQIAPGQTGKIADYNYKLPDDFTGCVIAWNSNNLDSKVGGNYNYLYRLFRKSNLKPFERDISTEIYQAGSTPCNGVEGFNCYFPLQSYGFQPTNGVGYQPYRVVVLSFELLHAPATVCGPKKSTNLVKNKCVNFNFNGLTGTGVLTESNKKFLPFQQFGRDIADTTDAVRDPQTLEILDITPCSFGGVSVITPGTNTSNQVAVLYQDVNCTEVPVAIHADQLTPTWRVYSTGSNVFQTRAGCLIGAEHVNNSYECDIPIGAGICASYQTQTNSPRRARSVASQSIIAYTMSLGAENSVAYSNNSIAIPTNFTISVTTEILPVSMTKTSVDCTMYICGDSTECSNLLLQYGSFCTQLNRALTGIAVEQDKNTQEVFAQVKQIYKTPPIKDFGGFNFSQILPDPSKPSKRSFIEDLLFNKVTLADAGFIKQYGDCLGDIAARDLICAQKFNGLTVLPPLLTDEMIAQYTSALLAGTITSGWTFGAGAALQIPFAMQMAYRFNGIGVTQNVLYENQKLIANQFNSAIGKIQDSLSSTASALGKLQDVVNQNAQALNTLVKQLSSNFGAISSVLNDILSRLDPPEAEVQIDRLITGRLQSLQTYVTQQLIRAAEIRASANLAATKMSECVLGQSKRVDFCGKGYHLMSFPQSAPHGVVFLHVTYVPAQEKNFTTAPAICHDGKAHFPREGVFVSNGTHWFVTQRNFYEPQIITTDNTFLSGNCDVVIGIVNNTVYDPLQPELDSFKEELDKYFKNHTSPDVDLGDISGINASVVNIQKEIDRLNEVAKNLNESLIDLQELGKYEQYIKGGGSGGGQIYEGKLTAEGLRFGIVASRFNHALVDRLVEGAIDAIVRHGGREEDITLVRVPGSWEIPVAAGELARKEDIDAVIAIGVLIRGATPHFDYIASEVSKGLADLSLELRKPITFGVITADTLEQAIERAGTKHGNKGWEAALSAIEMANLFKSLR

SEQ ID NO: 3750 - protein, 1371 aa, Artificial Sequence
  SARS-CoV-2/USA/UT-00034/2020__EPI_ISL_417977 spike protein (1-1211)(K986P_V987P) LumSynth construct
MFVFLVLLPLVSSQCVNLTTRTQLPPAYTNSFTRGVYYPDKVFRSSVLHSTQDLFLPFFSNVTWFHAIHVSGTNGTKRFDNPVLPFNDGVYFASTEKSNIIRGWIFGTTLDSKTQSLLIVNNATNVVIKVCEFQFCNDPFLGVYYYKNNKSWMESEFRVYSSANNCTFEYVSQPFLMDLEGKQGNFKNLREFVFKNIDGYFKIYSKHTPINLVRDLPQGFSALEPLVDLPIGINITRFQTLLALHRSYLTPGDSSSGWTAGAAAYYVGYLQPRTFLLKYNENGTITDAVDCALDPLSETKCTLKSFTVEKGIYQTSNFRVQPTESIVRFPNITNLCPFGEVFNATRFASVYAWNRKRISNCVADYSVLYNSASFSTFKCYGVSPTKLNDLCFTNVYADSFVIRGDEVRQIAPGQTGKIADYNYKLPDDFTGCVIAWNSNNLDSKVGGNYNYLYRLFRKSNLKPFERDISTEIYQAGSTPCNGVEGFNCYFPLQSYGFQPTNGVGYQPYRVVVLSFELLHAPATVCGPKKSTNLVKNKCVNFNFNGLTGTGVLTESNKKFLPFQQFGRDIADTTDAVRDPQTLEILDITPCSFGGVSVITPGTNTSNQVAVLYQGVNCTEVPVAIHADQLTPTWRVYSTGSNVFQTRAGCLIGAEHVNNSYECDIPIGAGICASYQTQTNSPRRARSVASQSIIAYTMSLGAENSVAYSNNSIAIPTNFTISVTTEILPVSMTKTSVDCTMYICGDSTECSNLLLQYGSFCTQLNRALTGIAVEQDKNTQEVFAQVKQIYKTPPIKDFGGFNFSQILPDPSKPSKRSFIEDLLFNKVTLADAGFIKQYGDCLGDIAARDLICAQKFNGLTVLPPLLTDEMIAQYTSALLAGTITSGWTFGAGAALQIPFAMQMAYRFNGIGVTQNVLYENQKLIANQFNSAIGKIQDSLSSTASALGKLQDVVNQNAQALNTLVKQLSSNFGAISSVLNDILSRLDPPEAEVQIDRLITGRLQSLQTYVTQQLIRAAEIRASANLAATKMSECVLGQSKRVDFCGKGYHLMSFPQSAPHGVVFLHVTYVPAQEKNFTTAPAICHDGKAHFPREGVFVSNGTHWFVTQRNFYEPQIITTDNTFVSGNCDVVIGIVNNTVYDPLQPELDSFKEELDKYFKNHTSPDVDLGDISGINASVVNIQKEIDRLNEVAKNLNESLIDLQELGKYEQYIKGGGSGGGQIYEGKLTAEGLRFGIVASRFNHALVDRLVEGAIDAIVRHGGREEDITLVRVPGSWEIPVAAGELARKEDIDAVIAIGVLIRGATPHFDYIASEVSKGLADLSLELRKPITFGVITADTLEQAIERAGTKHGNKGWEAALSAIEMANLFKSLR

SEQ ID NO: 3751 - protein, 1371 aa, Artificial Sequence
  SARS-CoV-2/USA/UT-00033/2020__EPI_ISL_417976 spike protein (1-1211)(K986P_V987P) LumSynth construct
MFVFLVLLPLVSSQCVNLTTRTQLPPAYTNSFTRGVYYPDKVFRSSVLHSTQDLFLPFFSNVTWFHAIHVSGTNGTKRFDNPVLPFNDGVYFASTEKSNIIRGWIFGTTLDSKTQSLLIVNNATNVVIKVCEFQFCNDPFLGVYYHKNNKSWMESEFRVYSSANNCTFEYVSQPFLMDLEGKQGNFKNLREFVFKNIDGYFKIYSKHTPINLVRDLPQGFSALEPLVDLPIGINITRFQTLLALHRSYLTPGDSSSGLTAGAAAYYVGYLQPRTFLLKYNENGTITDAVDCALDPLSETKCTLKSFTVEKGIYQTSNFRVQPTESIVRFPNITNLCPFGEVFNATRFASVYAWNRKRISNCVADYSVLYNSASFSTFKCYGVSPTKLNDLCFTNVYADSFVIRGDEVRQIAPGQTGKIADYNYKLPDDFTGCVIAWNSNNLDSKVGGNYNYLYRLFRKSNLKPFERDISTEIYQAGSTPCNGVEGFNCYFPLQSYGFQPTNGVGYQPYRVVVLSFELLHAPATVCGPKKSTNLVKNKCVNFNFNGLTGTGVLTESNKKFLPFQQFGRDIADTTDAVRDPQTLEILDITPCSFGGVSVITPGTNTSNQVAVLYQGVNCTEVPVAIHADQLTPTWRVYSTGSNVFQTRAGCLIGAEHVNNSYECDIPIGAGICASYQTQTNSPRRARSVASQSIIAYTMSLGAENSVAYSNNSIAIPTNFTISVTTEILPVSMTKTSVDCTMYICGDSTECSNLLLQYGSFCTQLNRALTGIAVEQDKNTQEVFAQVKQIYKTPPIKDFGGFNFSQILPDPSKPSKRSFIEDLLFNKVTLADAGFIKQYGDCLGDIAARDLICAQKFNGLTVLPPLLTDEMIAQYTSALLAGTITSGWTFGAGAALQIPFAMQMAYRFNGIGVTQNVLYENQKLIANQFNSAIGKIQDSLSSTASALGKLQDVVNQNAQALNTLVKQLSSNFGAISSVLNDILSRLDPPEAEVQIDRLITGRLQSLQTYVTQQLIRAAEIRASANLAATKMSECVLGQSKRVDFCGKGYHLMSFPQSAPHGVVFLHVTYVPAQEKNFTTAPAICHDGKAHFPREGVFVSNGTHWFVTQRNFYEPQIITTDNTFVSGNCDVVIGIVNNTVYDPLQPELDSFKEELDKYFKNHTSPDVDLGDISGINASVVNIQKEIDRLNEVAKNLNESLIDLQELGKYEQYIKGGGSGGGQIYEGKLTAEGLRFGIVASRFNHALVDRLVEGAIDAIVRHGGREEDITLVRVPGSWEIPVAAGELARKEDIDAVIAIGVLIRGATPHFDYIASEVSKGLADLSLELRKPITFGVITADTLEQAIERAGTKHGNKGWEAALSAIEMANLFKSLR

SEQ ID NO: 3752 - protein, 1371 aa, Artificial Sequence
  SARS-CoV-2/USA/WI-13/2020__EPI_ISL_417516 spike protein (1-1211)(K986P_V987P) LumSynth construct
MFVFLVLLPLVSSQCVNLTTRTQLPPAYTNSFTRGVYYPDKVFRSSVLHSTQDLFLPFFSNVTWFHAIHVSGTNGTKRFDNPVLPFNDGVYFASTEKSNIIRGWIFGTTLDSKTQSLLIVNNATNVVIKVCEFQFCNDPFLGVYYHKNNKSWMESEFRVYSSANNCTFEYVSQPFLMDLEGKQGNFKNLREFVFKNIDGYFKIYSKHTPINLVRDLPQGFSALEPLVDLPIGINITRFQTLLALHRSYLTPGDSSSGWTAGAAAYYVGYLQPRTFLLKYNENGTITDAVDCALDPLSETKCTLKSFTVEKGIYQTSNFRVLPTESIVRFPNITNLCPFGEVFNATRFASVYAWNRKRISNCVADYSVLYNSASFSTFKCYGVSPTKLNDLCFTNVYADSFVIRGDEVRQIAPGQTGKIADYNYKLPDDFTGCVIAWNSNNLDSKVGGNYNYLYRLFRKSNLKPFERDISTEIYQAGSTPCNGVEGFNCYFPLQSYGFQPTNGVGYQPYRVVVLSFELLHAPATVCGPKKSTNLVKNKCVNFNFNGLTGTGVLTESNKKFLPFQQFGRDIADTTDAVRDPQTLEILDITPCSFGGVSVITPGTNTSNQVAVLYQGVNCTEVPVAIHADQLTPTWRVYSTGSNVFQTRAGCLIGAEHVNNSYECDIPIGAGICASYQTQTNSPRRARSVASQSIIAYTMSLGAENSVAYSNNSIAIPTNFTISVTTEILPVSMTKTSVDCTMYICGDSTECSNLLLQYGSFCTQLNRALTGIAVEQDKNTQEVFAQVKQIYKTPPIKDFGGFNFSQILPDPSKPSKRSFIEDLLFNKVTLADAGFIKQYGDCLGDIAARDLICAQKFNGLTVLPPLLTDEMIAQYTSALLAGTITSGWTFGAGAALQIPFAMQMAYRFNGIGVTQNVLYENQKLIANQFNSAIGKIQDSLSSTASALGKLQDVVNQNAQALNTLVKQLSSNFGAISSVLNDILSRLDPPEAEVQIDRLITGRLQSLQTYVTQQLIRAAEIRASANLAATKMSECVLGQSKRVDFCGKGYHLMSFPQSAPHGVVFLHVTYVPAQEKNFTTAPAICHDGKAHFPREGVFVSNGTHWFVTQRNFYEPQIITTDNTFVSGNCDVVIGIVNNTVYDPLQPELDSFKEELDKYFKNHTSPDVDLGDISGINASVVNIQKEIDRLNEVAKNLNESLIDLQELGKYEQYIKGGGSGGGQIYEGKLTAEGLRFGIVASRFNHALVDRLVEGAIDAIVRHGGREEDITLVRVPGSWEIPVAAGELARKEDIDAVIAIGVLIRGATPHFDYIASEVSKGLADLSLELRKPITFGVITADTLEQAIERAGTKHGNKGWEAALSAIEMANLFKSLR

SEQ ID NO: 3753 - protein, 1370 aa, Artificial Sequence
  SARS-CoV-2/India/1-27/2020__EPI_ISL_413522 spike protein (1-1210)(K985P_V986P) LumSynth construct
MFVFLVLLPLVSSQCVNLTTRTQLPPAYTNSFTRGVYYPDKVFRSSVLHSTQDLFLPFFSNVTWFHAIHVSGTNGTKRFDNPVLPFNDGVYFASTEKSNIIRGWIFGTTLDSKTQSLLIVNNATNVVIKVCEFQFCNDPFLGVYHKNNKSWMESEFRVYSSANNCTFEYVSQPFLMDLEGKQGNFKNLREFVFKNIDGYFKIYSKHTPINLVRDLPQGFSALEPLVDLPIGINITRFQTLLALHRSYLTPGDSSSGWTAGAAAYYVGYLQPRTFLLKYNENGTITDAVDCALDPLSETKCTLKSFTVEKGIYQTSNFRVQPTESIVRFPNITNLCPFGEVFNATRFASVYAWNRKRISNCVADYSVLYNSASFSTFKCYGVSPTKLNDLCFTNVYADSFVIRGDEVIQIAPGQTGKIADYNYKLPDDFTGCVIAWNSNNLDSKVGGNYNYLYRLFRKSNLKPFERDISTEIYQAGSTPCNGVEGFNCYFPLQSYGFQPTNGVGYQPYRVVVLSFELLHAPATVCGPKKSTNLVKNKCVNFNFNGLTGTGVLTESNKKFLPFQQFGRDIADTTDAVRDPQTLEILDITPCSFGGVSVITPGTNTSNQVAVLYQDVNCTEVPVAIHADQLTPTWRVYSTGSNVFQTRAGCLIGAEHVNNSYECDIPIGAGICASYQTQTNSPRRARSVASQSIIAYTMSLGAENSVAYSNNSIAIPTNFTISVTTEILPVSMTKTSVDCTMYICGDSTECSNLLLQYGSFCTQLNRALTGIAVEQDKNTQEVFAQVKQIYKTPPIKDFGGFNFSQILPDPSKPSKRSFIEDLLFNKVTLADAGFIKQYGDCLGDIAARDLICAQKFNGLTVLPPLLTDEMIAQYTSALLAGTITSGWTFGAGAALQIPFAMQMAYRFNGIGVTQNVLYENQKLIANQFNSAIGKIQDSLSSTASALGKLQDVVNQNAQALNTLVKQLSSNFGAISSVLNDILSRLDPPEAEVQIDRLITGRLQSLQTYVTQQLIRAAEIRASANLAATKMSECVLGQSKRVDFCGKGYHLMSFPQSAPHGVVFLHVTYVPAQEKNFTTAPAICHDGKAHFPREGVFVSNGTHWFVTQRNFYEPQIITTDNTFVSGNCDVVIGIVNNTVYDPLQPELDSFKEELDKYFKNHTSPDVDLGDISGINASVVNIQKEIDRLNEVAKNLNESLIDLQELGKYEQYIKGGGSGGGQIYEGKLTAEGLRFGIVASRFNHALVDRLVEGAIDAIVRHGGREEDITLVRVPGSWEIPVAAGELARKEDIDAVIAIGVLIRGATPHFDYIASEVSKGLADLSLELRKPITFGVITADTLEQAIERAGTKHGNKGWEAALSAIEMANLFKSLR

SEQ ID NO: 3754 - protein, 1365 aa, Artificial Sequence
  SARS-CoV-2/pangolin/Guangxi/P4L/2017__EPI_ISL_410538 spike protein (1-1205)(K980P_V981P) LumSynth construct
MFVFLFVLPLVSSQCVNLTTRTGIPPGYTNSSTRGVYYPDKVFRSSILHLTQDLFLPFFSNVTWFNTINYQGGFKKFDNPVLPFNDGVYFASTEKSNIIRGWIFGTTLDARTQSLLIVNNATNVVIKVCEFQFCTDPFLGVYYHNNNKTWVENEFRVYSSANNCTFEYISQPFLMDLEGKQGNFKNLREFVFKNVDGYFKIYSKHTPIDLVRDLPRGFAALEPLVDLPIGINITRFQTLLALHRSYLTPGNLESGWTTGAAAYYVGYLQQRTFLLSYNQNGTITDAVDCSLDPLSETKCTLKSLTVEKGIYQTSNFRVQPTISIVRFPNITNLCPFGEVFNASKFASVYAWNRKRISNCVADYSVLYNSTSFSTFKCYGVSPTKLNDLCFTNVYADSFVVKGDEVRQIAPGQTGVIADYNYKLPDDFTGCVIAWNSVKQDALTGGNYGYLYRLFRKSKLKPFERDISTEIYQAGSTPCNGQVGLNCYYPLERYGFHPTTGVNYQPFRVVVLSFELLNGPATVCGPKLSTTLVKDKCVNFNFNGLTGTGVLTTSKKQFLPFQQFGRDISDTTDAVRDPQTLEILDITPCSFGGVSVITPGTNTSNQVAVLYQDVNCTEVPMAIHAEQLTPAWRVYSAGANVFQTRAGCLVGAEHVNNSYECDIPVGAGICASYHSMSSLRSVNQRSIIAYTMSLGAENSVAYSNNSIAIPTNFTISVTTEILPVSMTKTSVDCTMYICGDSIECSNLLLQYGSFCTQLNRALTGIAVEQDKNTQEVFAQVKQIYKTPPIKDFGGFNFSQILPDPSKPSKRSFIEDLLFNKVTLADAGFIKQYGDCLGDIAARDLICAQKFNGLTVLPPLLTDEMIAQYTSALLAGTITSGWTFGAGAALQIPFAMQMAYRFNGIGVTQNVLYENQKLIANQFNSAIGKIQDSLSSTASALGKLQDVVNQNAQALNTLVKQLSSNFGAISSVLNDILSRLDPPEAEVQIDRLITGRLQSLQTYVTQQLIRAAEIRASANLAATKMSECVLGQSKRVDFCGKGYHLMSFPQSAPHGVVFLHVTYVPAQEKNFTTAPAICHEGKAHFPREGVFVSNGTHWFITQRNFYEPQIITTDNTFVSGSCDVVIGIVNNTVYDPLQPELDSFKEELDKYFKNHTSPDVDLGDISGINASVVNIQKEIDRLNEVAKNLNESPIDLQELGKYEQYIKGGGSGGGQIYEGKLTAEGLRFGIVASRFNHALVDRLVEGAIDAIVRHGGREEDITLVRVPGSWEIPVAAGELARKEDIDAVIAIGVLIRGATPHFDYIASEVSKGLADLSLELRKPITFGVITADTLEQAIERAGTKHGNKGWEAALSAIEMANLFKSLR

SEQ ID NO: 3755 - protein, 1365 aa, Artificial Sequence
  SARS-CoV-2/pangolin/Guangxi/P5L/2017__EPI_ISL_410540 spike protein (1-1205)(K980P_V981P) LumSynth construct
MFVFLFVLPLVSSQCVNLTTRTGIPPGYTNSSTRGVYYPDKVFRSSILHLTQDLFLPFFSNVTWFNTINYQGGFKKFDNPVLPFNDGVYFASTEKSNIIRGWIFGTTLDARTQSLLIVNNATNVVIKVCEFQFCTDPFLGVYYHNNNKTWVENEFRVYSSANNCTFEYISQPFLMDLEGKQGNFKNLREFVFKNVDGYFKIYSKHTPIDLVRDLPRGFAALEPLVDLPIGINITRFQTLLALHRSYLTPGKLESGWTTGAAAYYVGYLQQRTFLLSYNQNGTITDAVDCSLDPLSETKCTLKSLTVEKGIYQTSNFRVQPTISIVRFPNITNLCPFGEVFNASKFASVYAWNRKRISNCVADYSVLYNSTSFSTFKCYGVSPTKLNDLCFTNVYADSFVVKGDEVRQIAPGQTGVIADYNYKLPDDFTGCVIAWNSVKQDALTGGNYGYLYRLFRKSKLKPFERDISTEIYQAGSTPCNGQVGLNCYYPLERYGFHPTTGVNYQPFRVVVLSFELLNGPATVCGPKLSTTLVKDKCVNFNFNGLTGTGVLTTSKKQFLPFQQFGRDISDTTDAVRDPQTLEILDITPCSFGGVSVITPGTNTSNQVAVLYQDVNCTEVPMAIHAEQLTPAWRVYSAGANVFQTRAGCLVGAEHVNNSYECDIPVGAGICASYHSMSSFRSVNQRSIIAYTMSLGAENSVAYSNNSIAIPTNFTISVTTEILPVSMTKTSVDCTMYICGDSIECSNLLLQYGSFCTQLNRALTGIAVEQDKNTQEVFAQVKQIYKTPPIKDFGGFNFSQILPDPSKPSKRSFIEDLLFNKVTLADAGFIKQYGDCLGDIAARDLICAQKFNGLTVLPPLLTDEMIAQYTSALLAGTITSGWTFGAGAALQIPFAMQMAYRFNGIGVTQNVLYENQKLIANQFNSAIGKIQDSLSSTASALGKLQDVVNQNAQALNTLVKQLSSNFGAISSVLNDILSRLDPPEAEVQIDRLITGRLQSLQTYVTQQLIRAAEIRASANLAATKMSECVLGQSKRVDFCGKGYHLMSFPQSAPHGVVFLHVTYVPAQEKNFTTAPAICHEGKAHFPREGVFVSNGTHWFITQRNFYEPQIITTDNTFVSGSCDVVIGIVNNTVYDPLQPELDSFKEELDKYFKNHTSPDVDLGDISGINASVVNIQKEIDRLNEVAKNLNESLIDLQELGKYEQYIKGGGSGGGQIYEGKLTAEGLRFGIVASRFNHALVDRLVEGAIDAIVRHGGREEDITLVRVPGSWEIPVAAGELARKEDIDAVIAIGVLIRGATPHFDYIASEVSKGLADLSLELRKPITFGVITADTLEQAIERAGTKHGNKGWEAALSAIEMANLFKSLR

SEQ ID NO: 3756 - protein, 1365 aa, Artificial Sequence
  SARS-CoV-2/pangolin/Guangxi/P5E/2017__EPI_ISL_410541 spike protein (1-1205)(K980P_V981P) LumSynth construct
MFVFLFVLPLVSSQCVNLTTRTGIPPGYTNSSTRGVYYPDKVFRSSILHLTQDLFLPFFSNVTWFNTITYQGGSKKFDNPVLPFNDGVYFASTEKSNIIRGWIFGTTLDARTQSLLIVNNATNVVIKVCEFQFCTDPFLGVYYHNNNKTWVENEFRVYSSANNCTFEYISQPFLMDLEGKQGNFKNLREFVFKNVDGYFKIYSKHTPIDLVRDLPRGFAALEPLVDLPIGINITRFQTLLALHRSYLTPGKLESGWTTGAAAYYVGYLQQRTFLLSYNQNGTITDAVDCSLDPLSETKCTLKSLTVEKGIYQTSNFRVQPTISIVRFPNITNLCPFGEVFNASKFASVYAWNRKRISNCVADYSVLYNSTSFSTFKCYGVSPTKLNDLCFTNVYADSFVVKGDEVRQIAPGQTGVIADYNYKLPDDFTGCVIAWNSVKQDALTGDNYGYLYRLFRKSKLKPFERDISTEIYQAGSTPCNGQVGLNCYYPLERYGFHPTTGVNYQPFRVVVLSFELLNGPATVCGPKLSTTLVKDKCVNFNFNGLTGTGVLTTSKKQFLPFQQFGRDISDTTDAVRDPQTLEILDITPCSFGGVSVITPGTNTSNQVAVLYQDVNCTEVPMAIHAEQLTPAWRVYSAGANVFQTRAGCLVGAEHVNNSYECDIPVGAGICASYHSMSSFRSVNQRSIIAYTMSLGAENSVAYSNNSIAIPTNFTISVTTEILPVSMTKTSVDCTMYICGDSIECSNLLLQYGSFCTQLNRALTGIAVEQDKNTQEVFAQVKQIYKTPPIKDFGGFNFSQILPDPSKPSKRSFIEDLLFNKVTLADAGFIKQYGDCLGDIAARDLICAQKFNGLTVLPPLLTDEMIAQYTSALLAGTITSGWTFGAGAALQIPFAMQMAYRFNGIGVTQNVLYENQKLIANQFNSAIGKIQDSLSSTASALGKLQDVVNQNAQALNTLVKQLSSNFGAISSVLNDILSRLDPPEAEVQIDRLITGRLQSLQTYVTQQLIRAAEIRASANLAATKMSECVLGQSKRVDFCGKGYHLMSFPQSAPHGVVFLHVTYVPAQEKNFTTAPAICHEGKAHFPREGVFVSNGTHWFITQRNFYEPQIITTDNTFVSGSCDVVIGIVNNTVYDPLQPELDSFKEELDKYFKNHTSPDVDLGDISGINASVVNIQKEIDRLNEVAKNLNESLIDLQELGKYEQYIKGGGSGGGQIYEGKLTAEGLRFGIVASRFNHALVDRLVEGAIDAIVRHGGREEDITLVRVPGSWEIPVAAGELARKEDIDAVIAIGVLIRGATPHFDYIASEVSKGLADLSLELRKPITFGVITADTLEQAIERAGTKHGNKGWEAALSAIEMANLFKSLR

SEQ ID NO: 3757 - protein, 1363 aa, Artificial Sequence
  SARS-CoV-2/pangolin/Guangxi/P1E/2017__EPI_ISL_410539 spike protein (1-1203)(K978P_V979P) LumSynth construct
MFVFLFVLPLVSSQCVNLTTRTGIQPGYTNSSTRGVYYPDKVFRSSILHLTQDLFLPFFSNVTWFNTINYQGGFKKFDNPVLPFNDGVYFASTEKSNIIRGWIFGTTLDARTQSLLIVNNATNVVIKVCEFQFCTDPFLGVYYHNNNKTWVENEFRVYSSANNCTFEYISQPFLMDLEGKQGNFKNLREFVFKNVDGYFKIYSKHTPIDLVRDLPRGFAALEPLVDLPIGINITRFQTLLALHRSYLTPGKLESGWTTGAAAYYVGYLQQRTFLLSYNQNGTITDAVDCSLDPLSETKCTLKSLTVEKGIYQTSNFRVQPTISIVRFPNITNLCPFGEVFNASKFASVYAWNRKRISNCVADYSVLYNSTSFSTFKCYGVSPTKLNDLCFTNVYADSFVVKGDEVRQIAPGQTGVIADYNYKLPDDFTGCVIAWNSVKQDALTGGNYLYRLFRKSKLKPFERDISTEIYQAGSTPCNGQVGLNCYYPLERYGFHPTTGVNYQPFRVVVLSFELLNGPATVCGPKLSTTLVKDKCVNFNFNGLTGTGVLTTSKKQFLPFQQFGRDISDTTDAVRDPQTLEILDITPCSFGGVSVITPGTNTSNQVAVLYQDVNCTEVPMAIHAEQLTPAWRVYSAGANVFQTRAGCLVGAEHVNNSYECDIPVGAGICASYHSMSSLRSVNQRSIIAYTMSLGAENSVAYSNNSIAIPTNFTISVTTEILPVSMTKTSVDCTMYICGDSIECSNLLLQYGSFCTQLNRALTGIAVEQDKNTQEVFAQVKQIYKTPPIKDFGGFNFSQILPDPSKPSKRSFIEDLLFNKVTLADAGFIKQYGDCLGDIAARDLICAQKFNGLTVLPPLLTDEMIAQYTSALLAGTITSGWTFGAGAALQIPFAMQMAYRFNGIGVTQNVLYENQKLIANQFNSAIGKIQDSLSSTASALGKLQDVVNQNAQALNTLVKQLSSNFGAISSVLNDILSRLDPPEAEVQIDRLITGRLQSLQTYVTQQLIRAAEIRASANLAATKMSECVLGQSKRVDFCGKGYHLMSFPQSAPHGVVFLHVTYVPAQEKNFTTAPAICHEGKAHFPREGVFVSNGTHWFITQRNFYEPQIITTDNTFVSGSCDVVIGIVNNTVYDPLQPELDSFKEELDKYFKNHTSPDVDLGDISGINASVVNIQKEIDRLNEVAKNLNESLIDLQELGKYEQYIKGGGSGGGQIYEGKLTAEGLRFGIVASRFNHALVDRLVEGAIDAIVRHGGREEDITLVRVPGSWEIPVAAGELARKEDIDAVIAIGVLIRGATPHFDYIASEVSKGLADLSLELRKPITFGVITADTLEQAIERAGTKHGNKGWEAALSAIEMANLFKSLR

SEQ ID NO: 3758 - protein, 1371 aa, Artificial Sequence
  SARS-CoV-2/Wuhan/WIV05/2019__EPI_ISL_402128 spike protein (1-1211)(K986P_V987P_T887W_A1020W) LumSynth construct
MFVFLVLLPLVSSQCVNLTTRTQLPPAYTNSFTRGVYYPDKVFRSSVLHSTQDLFLPFFSNVTWFHAIHVSGTNGTKRFDNPVLPFNDGVYFASTEKSNIIRGWIFGTTLDSKTQSLLIVNNATNVVIKVCEFQFCNDPFLGVYYHKNNKSWMESEFRVYSSANNCTFEYVSQPFLMDLEGKQGNFKNLREFVFKNIDGYFKIYSKHTPINLVRDLPQGFSALEPLVDLPIGINITRFQTLLALHRSYLTPGDSSSGWTAGAAAYYVGYLQPRTFLLKYNENGTITDAVDCALDPLSETKCTLKSFTVEKGIYQTSNFRVQPTESIVRFPNITNLCPFGEVFNATRFASVYAWNRKRISNCVADYSVLYNSASFSTFKCYGVSPTKLNDLCFTNVYADSFVIRGDEVRQIAPGQTGKIADYNYKLPDDFTGCVIAWNSNNLDSKVGGNYNYLYRLFRKSNLKPFERDISTEIYQAGSTPCNGVEGFNCYFPLQSYGFQPTNGVGYQPYRVVVLSFELLHAPATVCGPKKSTNLVKNKCVNFNFNGLTGTGVLTESNKKFLPFQQFGRDIADTTDAVRDPQTLEILDITPCSFGGVSVITPGTNTSNQVAVLYQDVNCTEVPVAIHADQLTPTWRVYSTGSNVFQTRAGCLIGAEHVNNSYECDIPIGAGICASYQTQTNSPRRARSVASQSIIAYTMSLGAENSVAYSNNSIAIPTNFTISVTTEILPVSMTKTSVDCTMYICGDSTECSNLLLQYGSFCTQLNRALTGIAVEQDKNTQEVFAQVKQIYKTPPIKDFGGFNFSQILPDPSKPSKRSFIEDLLFNKVTLADAGFIKQYGDCLGDIAARDLICAQKFNGLTVLPPLLTDEMIAQYTSALLAGTITSGWWFGAGAALQIPFAMQMAYRFNGIGVTQNVLYENQKLIANQFNSAIGKIQDSLSSTASALGKLQDVVNQNAQALNTLVKQLSSNFGAISSVLNDILSRLDPPEAEVQIDRLITGRLQSLQTYVTQQLIRAAEIRWSANLAATKMSECVLGQSKRVDFCGKGYHLMSFPQSAPHGVVFLHVTYVPAQEKNFTTAPAICHDGKAHFPREGVFVSNGTHWFVTQRNFYEPQIITTDNTFVSGNCDVVIGIVNNTVYDPLQPELDSFKEELDKYFKNHTSPDVDLGDISGINASVVNIQKEIDRLNEVAKNLNESLIDLQELGKYEQYIKGGGSGGGQIYEGKLTAEGLRFGIVASRFNHALVDRLVEGAIDAIVRHGGREEDITLVRVPGSWEIPVAAGELARKEDIDAVIAIGVLIRGATPHFDYIASEVSKGLADLSLELRKPITFGVITADTLEQAIERAGTKHGNKGWEAALSAIEMANLFKSLR

SEQ ID NO: 3759 - protein, 1367 aa, Artificial Sequence
  SARS-CoV-2/bat/Yunnan/RaTG13/2013__EPI_ISL_402131 spike protein (1-1207)(K982P_V983P_T883W_A1016W) LumSynth construct
MFVFLVLLPLVSSQCVNLTTRTQLPPAYTNSSTRGVYYPDKVFRSSVLHLTQDLFLPFFSNVTWFHAIHVSGTNGIKRFDNPVLPFNDGVYFASTEKSNIIRGWIFGTTLDSKTQSLLIVNNATNVVIKVCEFQFCNDPFLGVYYHKNNKSWMESEFRVYSSANNCTFEYVSQPFLMDLEGKQGNFKNLREFVFKNIDGYFKIYSKHTPINLVRDLPPGFSALEPLVDLPIGINITRFQTLLALHRSYLTPGDSSSGWTAGAAAYYVGYLQPRTFLLKYNENGTITDAVDCALDPLSETKCTLKSFTVEKGIYQTSNFRVQPTDSIVRFPNITNLCPFGEVFNATTFASVYAWNRKRISNCVADYSVLYNSTSFSTFKCYGVSPTKLNDLCFTNVYADSFVITGDEVRQIAPGQTGKIADYNYKLPDDFTGCVIAWNSKHIDAKEGGNFNYLYRLFRKANLKPFERDISTEIYQAGSKPCNGQTGLNCYYPLYRYGFYPTDGVGHQPYRVVVLSFELLNAPATVCGPKKSTNLVKNKCVNFNFNGLTGTGVLTESNKKFLPFQQFGRDIADTTDAVRDPQTLEILDITPCSFGGVSVITPGTNASNQVAVLYQDVNCTEVPVAIHADQLTPTWRVYSTGSNVFQTRAGCLIGAEHVNNSYECDIPIGAGICASYQTQTNSRSVASQSIIAYTMSLGAENSVAYSNNSIAIPTNFTISVTTEILPVSMTKTSVDCTMYICGDSTECSNLLLQYGSFCTQLNRALTGIAVEQDKNTQEVFAQVKQIYKTPPIKDFGGFNFSQILPDPSKPSKRSFIEDLLFNKVTLADAGFIKQYGDCLGDIAARDLICAQKFNGLTVLPPLLTDEMIAQYTSALLAGTITSGWWFGAGAALQIPFAMQMAYRFNGIGVTQNVLYENQKLIANQFNSAIGKIQDSLSSTASALGKLQDVVNQNAQALNTLVKQLSSNFGAISSVLNDILSRLDPPEAEVQIDRLITGRLQSLQTYVTQQLIRAAEIRWSANLAATKMSECVLGQSKRVDFCGKGYHLMSFPQSAPHGVVFLHVTYVPAQEKNFTTAPAICHDGKAHFPREGVFVSNGTHWFVTQRNFYEPQIITTDNTFVSGSCDVVIGIVNNTVYDPLQPELDSFKEELDKYFKNHTSPDVDLGDISGINASVVNIQKEIDRLNEVAKNLNESLIDLQELGKYEQYIKGGGSGGGQIYEGKLTAEGLRFGIVASRFNHALVDRLVEGAIDAIVRHGGREEDITLVRVPGSWEIPVAAGELARKEDIDAVIAIGVLIRGATPHFDYIASEVSKGLADLSLELRKPITFGVITADTLEQAIERAGTKHGNKGWEAALSAIEMANLFKSLR

SEQ ID NO: 3760 - protein, 1371 aa, Artificial Sequence
  SARS-CoV-2/Wuhan/HBCDC-HB-01/2019__EPI_ISL_402132 spike protein (1-1211)(K986P_V987P_T887W_A1020W) LumSynth construct
MFVFLVLLPLVSSQCVNLTTRTQLPPAYTNSITRGVYYPDKVFRSSVLHSTQDLFLPFFSNVTWFHAIHVSGTNGTKRFDNPVLPFNDGVYFASTEKSNIIRGWIFGTTLDSKTQSLLIVNNATNVVIKVCEFQFCNDPFLGVYYHKNNKSWMESEFRVYSSANNCTFEYVSQPFLMDLEGKQGNFKNLREFVFKNIDGYFKIYSKHTPINLVRDLPQGFSALEPLVDLPIGINITRFQTLLALHRSYLTPGDSSSGWTAGAAAYYVGYLQPRTFLLKYNENGTITDAVDCALDPLSETKCTLKSFTVEKGIYQTSNFRVQPTESIVRFPNITNLCPFGEVFNATRFASVYAWNRKRISNCVADYSVLYNSASFSTFKCYGVSPTKLNDLCFTNVYADSFVIRGDEVRQIAPGQTGKIADYNYKLPDDFTGCVIAWNSNNLDSKVGGNYNYLYRLFRKSNLKPFERDISTEIYQAGSTPCNGVEGFNCYFPLQSYGFQPTNGVGYQPYRVVVLSFELLHAPATVCGPKKSTNLVKNKCVNFNFNGLTGTGVLTESNKKFLPFQQFGRDIADTTDAVRDPQTLEILDITPCSFGGVSVITPGTNTSNQVAVLYQDVNCTEVPVAIHADQLTPTWRVYSTGSNVFQTRAGCLIGAEHVNNSYECDIPIGAGICASYQTQTNSPRRARSVASQSIIAYTMSLGAENSVAYSNNSIAIPTNFTISVTTEILPVSMTKTSVDCTMYICGDSTECSNLLLQYGSFCTQLNRALTGIAVEQDKNTQEVFAQVKQIYKTPPIKDFGGFNFSQILPDPSKPSKRSFIEDLLFNKVTLADAGFIKQYGDCLGDIAARDLICAQKFNGLTVLPPLLTDEMIAQYTSALLAGTITSGWWFGAGAALQIPFAMQMAYRFNGIGVTQNVLYENQKLIANQFNSAIGKIQDSLSSTASALGKLQDVVNQNAQALNTLVKQLSSNFGAISSVLNDILSRLDPPEAEVQIDRLITGRLQSLQTYVTQQLIRAAEIRWSANLAATKMSECVLGQSKRVDFCGKGYHLMSFPQSAPHGVVFLHVTYVPAQEKNFTTAPAICHDGKAHFPREGVFVSNGTHWFVTQRNFYEPQIITTDNTFVSGNCDVVIGIVNNTVYDPLQPELDSFKEELDKYFKNHTSPDVDLGDISGINASVVNIQKEIDRLNEVAKNLNESLIDLQELGKYEQYIKGGGSGGGQIYEGKLTAEGLRFGIVASRFNHALVDRLVEGAIDAIVRHGGREEDITLVRVPGSWEIPVAAGELARKEDIDAVIAIGVLIRGATPHFDYIASEVSKGLADLSLELRKPITFGVITADTLEQAIERAGTKHGNKGWEAALSAIEMANLFKSLR

SEQ ID NO: 3761 - protein, 1371 aa, Artificial Sequence
  SARS-CoV-2/Guangdong/20SF028/2020__EPI_ISL_403936 spike protein (1-1211)(K986P_V987P_T887W_A1020W) LumSynth construct
MFVFLVLLPLVSSQCVNLTTRTQLPPAYTNSFTRGVYYPDKVFRSSVLYSTQDLFLPFFSNVTWFHAIHVSGTNGTKRFDNPVLPFNDGVYFASTEKSNIIRGWIFGTTLDSKTQSLLIVNNATNVVIKVCEFQFCNDPFLGVYYHKNNKSWMESEFRVYSSANNCTFEYVSQPFLMDLEGKQGNFKNLREFVFKNIDGYFKIYSKHTPINLVRDLPQGFSALEPLVDLPIGINITRFQTLLALHRSYLTPGDSSSGWTAGAAAYYVGYLQPRTFLLKYNENGTITDAVDCALDPLSETKCTLKSFTVEKGIYQTSNFRVQPTESIVRFPNITNLCPFGEVFNATRFASVYAWNRKRISNCVADYSVLYNSASFSTFKCYGVSPTKLNDLCFTNVYADSFVIRGDEVRQIAPGQTGKIADYNYKLPDDFTGCVIAWNSNNLDSKVGGNYNYLYRLFRKSNLKPFERDISTEIYQAGSTPCNGVEGFNCYFPLQSYGFQPTNGVGYQPYRVVVLSFELLHAPATVCGPKKSTNLVKNKCVNFNFNGLTGTGVLTESNKKFLPFQQFGRDIADTTDAVRDPQTLEILDITPCSFGGVSVITPGTNTSNQVAVLYQDVNCTEVPVAIHADQLTPTWRVYSTGSNVFQTRAGCLIGAEHVNNSYECDIPIGAGICASYQTQTNSPRRARSVASQSIIAYTMSLGAENSVAYSNNSIAIPTNFTISVTTEILPVSMTKTSVDCTMYICGDSTECSNLLLQYGSFCTQLNRALTGIAVEQDKNTQEVFAQVKQIYKTPPIKDFGGFNFSQILPDPSKPSKRSFIEDLLFNKVTLADAGFIKQYGDCLGDIAARDLICAQKFNGLTVLPPLLTDEMIAQYTSALLAGTITSGWWFGAGAALQIPFAMQMAYRFNGIGVTQNVLYENQKLIANQFNSAIGKIQDSLSSTASALGKLQDVVNQNAQALNTLVKQLSSNFGAISSVLNDILSRLDPPEAEVQIDRLITGRLQSLQTYVTQQLIRAAEIRWSANLAATKMSECVLGQSKRVDFCGKGYHLMSFPQSAPHGVVFLHVTYVPAQEKNFTTAPAICHDGKAHFPREGVFVSNGTHWFVTQRNFYEPQIITTDNTFVSGNCDVVIGIVNNTVYDPLQPELDSFKEELDKYFKNHTSPDVDLGDISGINASVVNIQKEIDRLNEVAKNLNESLIDLQELGKYEQYIKGGGSGGGQIYEGKLTAEGLRFGIVASRFNHALVDRLVEGAIDAIVRHGGREEDITLVRVPGSWEIPVAAGELARKEDIDAVIAIGVLIRGATPHFDYIASEVSKGLADLSLELRKPITFGVITADTLEQAIERAGTKHGNKGWEAALSAIEMANLFKSLR

SEQ ID NO: 3762 - protein, 1371 aa, Artificial Sequence
  SARS-CoV-2/Shenzhen/SZTH-001/2020__EPI_ISL_406592 spike protein (1-1211)(K986P_V987P_T887W_A1020W) LumSynth construct
MFVFLVLLPLVSSQCVNLTTRTQLPPAYTNSFTRGVYYPDKVFRSSVLHSTQDLFLPFFSNVTWFHAIHVSGTNGTKRFDNPVLPFNDGVYFASTEKSNIIRGWIFGTTLDSKTQSLLIVNNATNVVIKVCEFQFCNDPFLGVYYHKNNKSWMESEFRVYSSANNCTFEYVSQPFLMDLEGKQGNFKNLREFVFKNIDGYFKIYSKHTPINLVRDLPQGFSALEPLVDLPIGINITRFQTLLALHRSYLTPGDSSSGWTAGAAAYYVGYLQPRTFLLKYNENGTITDAVDCALDPLSETKCTLKSFTVEKGIYQTSNFRVQPTESIVRFPNITNLCPFGEVFNATRFASVYAWNRKRISNCVADYSVLYNSASFSTFKCYGVSPTKLNDLCFTNVYADSFVIRGDEVRQIAPGQTGKIADYNYKLPDDFTGCVIAWNSNNLDSKVGGNYNYLYRLFRKSNLKPFERDISTEIYQAGSTPCNGVEGFNCYFPLQSYGFQPTNGVGYQPYRVVVLSFELLHAPATVCGPKKSTNLVKNKCVNFNFNGLTGTGVLTESNKKFLPFQQFGRDIADTTDAVRDPQTLEILDITPCSFGGVSVITPGTNTSNQVAVLYQDVNCTEVPVAIHADQLTPTWRVYSTGSNVFQTRAGCLIGAEHVNNSYECDIPIGAGICASYQTQTNSPRRARSVASQSIIAYTMSLGAENSVAYSNNSIAIPTNFTISVTTEILPVSMTKTSVDCTMYICGDSTECSNLLLQYGSFCTQLNRALTGIAVEQDKNTQEVFAQVKQIYKTPPIKDFGGFNFSQILPDPSKPSKRSFIEDLLFNKVTLADAGFIKQYGDCLGDIAARDLICAQKFNGLTVLPPLLTDEMIAQYTSALLAGTITSGWWFGAGAALQIPFAMQMAYRFNGIGVTQNVLYENQKLIANQFNSAIGKIQDSLSSTASALGKLQDVVNQNAQALNTLVKQLSSNFGAISSVLNDILSRLDPPEAEVQIDRLITGRLQSLQTYVTQQLIRAAEIRWSANLAATKMSECVLGQSKRVDFCGKGYHLMSFPQSAPHGVVFLHVTYVPAQEKNFTTAPAICHDGKAHFPREGVFVSNGTHWFVTQRNFYEPQIITTDNTFVSGNCDVLIGIVNNTVYDPLQPELDSFKEELDKYFKNHTSPDVDLGDISGINASVVNIQKEIDRLNEVAKNLNESLIDLQELGKYEQYIKGGGSGGGQIYEGKLTAEGLRFGIVASRFNHALVDRLVEGAIDAIVRHGGREEDITLVRVPGSWEIPVAAGELARKEDIDAVIAIGVLIRGATPHFDYIASEVSKGLADLSLELRKPITFGVITADTLEQAIERAGTKHGNKGWEAALSAIEMANLFKSLR

SEQ ID NO: 3763 - protein, 1371 aa, Artificial Sequence
  SARS-CoV-2/Shenzhen/SZTH-004/2020__EPI_ISL_406595 spike protein (1-1211)(K986P_V987P_T887W_A1020W) LumSynth construct
MFVFLVLLPLVSSQCVNLTTRTQLPPAYTNSFTRGVYYPDKVFRSSVLHSTQDLFLPFFSNVTWFHAIHVSGTNGTKRFDNPVLPFNDGVYFASTEKSNIIRGWIFGTTLDSKTQSLLIVNNATNVVIKVCEFQFCNDPFLGVYYHKNNKSWMESEFRVYSSANNCTFEYVSQPFLMDLEGKQGNFKNLREFVFKNIDGYFKIYSKHTPINLVRDLPQGFSALEPLVDLPIGINITRFQTLLALHRSYLTPGDSSSGWTAGAAAYYVGYLQPRTFLLKYNENGTITDAVDCALDPLSETKCTLKSFTVEKGIYQTSNFRVQPTESIVRFPNITNLCPFGEVFNATRFASVYAWDRKRISNCVAYYSVLYNSASFSTFKCYGVSPTKLNDLCFTNVYADSFVIRGDEVRQIAPGQTGKIADYNYKLPDDFTGCVIAWNSNNLDSKVGGNYNYLYRLFRKSNLKPFERDISTEIYQAGSTPCNGVEGFNCYFPLQSYGFQPTNGVGYQPYRVVVLSFELLHAPATVCGPKKSTNLVKNKCVNFNFNGLTGTGVLTESNKKFLPFQQFGRDIADTTDAVRDPQTLEILDITPCSFGGVSVITPGTNTSNQVAVLYQDVNCTEVPVAIHADQLTPTWRVYSTGSNVFQTRAGCLIGAEHVNNSYECDIPIGAGICASYQTQTNSPRRARSVASQSIIAYTMSLGAENSVAYSNNSIAIPTNFTISVTTEILPVSMTKTSVDCTMYICGDSTECSNLLLQYGSFCTQLNRALTGIAVEQDKNTQEVFAQVKQIYKTPPIKDFGGFNFSQILPDPSKPSKRSFIEDLLFNKVTLADAGFIKQYGDCLGDIAARDLICAQKFNGLTVLPPLLTDEMIAQYTSALLAGTITSGWWFGAGAALQIPFAMQMAYRFNGIGVTQNVLYENQKLIANQFNSAIGKIQDSLSSTASALGKLQDVVNQNAQALNTLVKQLSSNFGAISSVLNDILSRLDPPEAEVQIDRLITGRLQSLQTYVTQQLIRAAEIRWSANLAATKMSECVLGQSKRVDFCGKGYHLMSFPQSAPHGVVFLHVTYVPAQEKNFTTAPAICHDGKAHFPREGVFVSNGTHWFVTQRNFYEPQIITTDNTFVSGNCDVVIGIVNNTVYDPLQPELDSFKEELDKYFKNHTSPDVDLGDISGINASVVNIQKEIDRLNEVAKNLNESLIDLQELGKYEQYIKGGGSGGGQIYEGKLTAEGLRFGIVASRFNHALVDRLVEGAIDAIVRHGGREEDITLVRVPGSWEIPVAAGELARKEDIDAVIAIGVLIRGATPHFDYIASEVSKGLADLSLELRKPITFGVITADTLEQAIERAGTKHGNKGWEAALSAIEMANLFKSLR

SEQ ID NO: 3764 - protein, 1371 aa, Artificial Sequence
  SARS-CoV-2/France/IDF0372/2020__EPI_ISL_406596 spike protein (1-1211)(K986P_V987P_T887W_A1020W) LumSynth construct
MFVFLVLLPLVSSQCVNLTTRTQLPPAYTNSFTRGVYYPDKVFRSSVLHSTQDLFLPFFSNVTWFHAIHVSGTNGTKRFDNPVLPFNDGVYFASTEKSNIIRGWIFGTTLDSKTQSLLIVNNATNVVIKVCEFQFCNDPFLGVYYHKNNKSWMESEFRVYSSANNCTFEYVSQPFLMDLEGKQGNFKNLREFVFKNIDGYFKIYSKHTPINLVRDLPQGFSALEPLVDLPIGINITRFQTLLALHRSYLTPGDSSSGWTAGAAAYYVGYLQPRTFLLKYNENGTITDAVDCALDPLSETKCTLKSFTVEKGIYQTSNFRVQPTESIVRFPNITNLCPFGEVFNATRFASVYAWNRKRISNCVADYSFLYNSASFSTFKCYGVSPTKLNDLCFTNVYADSFVIRGDEVRQIAPGQTGKIADYNYKLPDDFTGCVIAWNSNNLDSKVGGNYNYLYRLFRKSNLKPFERDISTEIYQAGSTPCNGVEGFNCYFPLQSYGFQPTNGVGYQPYRVVVLSFELLHAPATVCGPKKSTNLVKNKCVNFNFNGLTGTGVLTESNKKFLPFQQFGRDIADTTDAVRDPQTLEILDITPCSFGGVSVITPGTNTSNQVAVLYQDVNCTEVPVAIHADQLTPTWRVYSTGSNVFQTRAGCLIGAEHVNNSYECDIPIGAGICASYQTQTNSPRRARSVASQSIIAYTMSLGAENSVAYSNNSIAIPTNFTISVTTEILPVSMTKTSVDCTMYICGDSTECSNLLLQYGSFCTQLNRALTGIAVEQDKNTQEVFAQVKQIYKTPPIKDFGGFNFSQILPDPSKPSKRSFIEDLLFNKVTLADAGFIKQYGDCLGDIAARDLICAQKFNGLTVLPPLLTDEMIAQYTSALLAGTITSGWWFGAGAALQIPFAMQMAYRFNGIGVTQNVLYENQKLIANQFNSAIGKIQDSLSSTASALGKLQDVVNQNAQALNTLVKQLSSNFGAISSVLNDILSRLDPPEAEVQIDRLITGRLQSLQTYVTQQLIRAAEIRWSANLAATKMSECVLGQSKRVDFCGKGYHLMSFPQSAPHGVVFLHVTYVPAQEKNFTTAPAICHDGKAHFPREGVFVSNGTHWFVTQRNFYEPQIITTDNTFVSGNCDVVIGIVNNTVYDPLQPELDSFKEELDKYFKNHTSPDVDLGDISGINASVVNIQKEIDRLNEVAKNLNESLIDLQELGKYEQYIKGGGSGGGQIYEGKLTAEGLRFGIVASRFNHALVDRLVEGAIDAIVRHGGREEDITLVRVPGSWEIPVAAGELARKEDIDAVIAIGVLIRGATPHFDYIASEVSKGLADLSLELRKPITFGVITADTLEQAIERAGTKHGNKGWEAALSAIEMANLFKSLR

SEQ ID NO: 3765 - protein, 1371 aa, Artificial Sequence
  SARS-CoV-2/Australia/VIC01/2020__EPI_ISL_406844 spike protein (1-1211)(K986P_V987P_T887W_A1020W) LumSynth construct
MFVFLVLLPLVSSQCVNLTTRTQLPPAYTNSFTRGVYYPDKVFRSSVLHSTQDLFLPFFSNVTWFHAIHVSGTNGTKRFDNPVLPFNDGVYFASTEKSNIIRGWIFGTTLDSKTQSLLIVNNATNVVIKVCEFQFCNDPFLGVYYHKNNKSWMESEFRVYSSANNCTFEYVSQPFLMDLEGKQGNFKNLREFVFKNIDGYFKIYSKHTPINLVRDLPQGFSALEPLVDLPIGINITRFQTLLALHRRYLTPGDSSSGWTAGAAAYYVGYLQPRTFLLKYNENGTITDAVDCALDPLSETKCTLKSFTVEKGIYQTSNFRVQPTESIVRFPNITNLCPFGEVFNATRFASVYAWNRKRISNCVADYSVLYNSASFSTFKCYGVSPTKLNDLCFTNVYADSFVIRGDEVRQIAPGQTGKIADYNYKLPDDFTGCVIAWNSNNLDSKVGGNYNYLYRLFRKSNLKPFERDISTEIYQAGSTPCNGVEGFNCYFPLQSYGFQPTNGVGYQPYRVVVLSFELLHAPATVCGPKKSTNLVKNKCVNFNFNGLTGTGVLTESNKKFLPFQQFGRDIADTTDAVRDPQTLEILDITPCSFGGVSVITPGTNTSNQVAVLYQDVNCTEVPVAIHADQLTPTWRVYSTGSNVFQTRAGCLIGAEHVNNSYECDIPIGAGICASYQTQTNSPRRARSVASQSIIAYTMSLGAENSVAYSNNSIAIPTNFTISVTTEILPVSMTKTSVDCTMYICGDSTECSNLLLQYGSFCTQLNRALTGIAVEQDKNTQEVFAQVKQIYKTPPIKDFGGFNFSQILPDPSKPSKRSFIEDLLFNKVTLADAGFIKQYGDCLGDIAARDLICAQKFNGLTVLPPLLTDEMIAQYTSALLAGTITSGWWFGAGAALQIPFAMQMAYRFNGIGVTQNVLYENQKLIANQFNSAIGKIQDSLSSTASALGKLQDVVNQNAQALNTLVKQLSSNFGAISSVLNDILSRLDPPEAEVQIDRLITGRLQSLQTYVTQQLIRAAEIRWSANLAATKMSECVLGQSKRVDFCGKGYHLMSFPQSAPHGVVFLHVTYVPAQEKNFTTAPAICHDGKAHFPREGVFVSNGTHWFVTQRNFYEPQIITTDNTFVSGNCDVVIGIVNNTVYDPLQPELDSFKEELDKYFKNHTSPDVDLGDISGINASVVNIQKEIDRLNEVAKNLNESLIDLQELGKYEQYIKGGGSGGGQIYEGKLTAEGLRFGIVASRFNHALVDRLVEGAIDAIVRHGGREEDITLVRVPGSWEIPVAAGELARKEDIDAVIAIGVLIRGATPHFDYIASEVSKGLADLSLELRKPITFGVITADTLEQAIERAGTKHGNKGWEAALSAIEMANLFKSLR

SEQ ID NO: 3766 - protein, 1371 aa, Artificial Sequence
  SARS-CoV-2/Germany/BavPat1/2020__EPI_ISL_406862 spike protein (1-1211)(K986P_V987P_T887W_A1020W) LumSynth construct
MFVFLVLLPLVSSQCVNLTTRTQLPPAYTNSFTRGVYYPDKVFRSSVLHSTQDLFLPFFSNVTWFHAIHVSGTNGTKRFDNPVLPFNDGVYFASTEKSNIIRGWIFGTTLDSKTQSLLIVNNATNVVIKVCEFQFCNDPFLGVYYHKNNKSWMESEFRVYSSANNCTFEYVSQPFLMDLEGKQGNFKNLREFVFKNIDGYFKIYSKHTPINLVRDLPQGFSALEPLVDLPIGINITRFQTLLALHRSYLTPGDSSSGWTAGAAAYYVGYLQPRTFLLKYNENGTITDAVDCALDPLSETKCTLKSFTVEKGIYQTSNFRVQPTESIVRFPNITNLCPFGEVFNATRFASVYAWNRKRISNCVADYSVLYNSASFSTFKCYGVSPTKLNDLCFTNVYADSFVIRGDEVRQIAPGQTGKIADYNYKLPDDFTGCVIAWNSNNLDSKVGGNYNYLYRLFRKSNLKPFERDISTEIYQAGSTPCNGVEGFNCYFPLQSYGFQPTNGVGYQPYRVVVLSFELLHAPATVCGPKKSTNLVKNKCVNFNFNGLTGTGVLTESNKKFLPFQQFGRDIADTTDAVRDPQTLEILDITPCSFGGVSVITPGTNTSNQVAVLYQGVNCTEVPVAIHADQLTPTWRVYSTGSNVFQTRAGCLIGAEHVNNSYECDIPIGAGICASYQTQTNSPRRARSVASQSIIAYTMSLGAENSVAYSNNSIAIPTNFTISVTTEILPVSMTKTSVDCTMYICGDSTECSNLLLQYGSFCTQLNRALTGIAVEQDKNTQEVFAQVKQIYKTPPIKDFGGFNFSQILPDPSKPSKRSFIEDLLFNKVTLADAGFIKQYGDCLGDIAARDLICAQKFNGLTVLPPLLTDEMIAQYTSALLAGTITSGWWFGAGAALQIPFAMQMAYRFNGIGVTQNVLYENQKLIANQFNSAIGKIQDSLSSTASALGKLQDVVNQNAQALNTLVKQLSSNFGAISSVLNDILSRLDPPEAEVQIDRLITGRLQSLQTYVTQQLIRAAEIRWSANLAATKMSECVLGQSKRVDFCGKGYHLMSFPQSAPHGVVFLHVTYVPAQEKNFTTAPAICHDGKAHFPREGVFVSNGTHWFVTQRNFYEPQIITTDNTFVSGNCDVVIGIVNNTVYDPLQPELDSFKEELDKYFKNHTSPDVDLGDISGINASVVNIQKEIDRLNEVAKNLNESLIDLQELGKYEQYIKGGGSGGGQIYEGKLTAEGLRFGIVASRFNHALVDRLVEGAIDAIVRHGGREEDITLVRVPGSWEIPVAAGELARKEDIDAVIAIGVLIRGATPHFDYIASEVSKGLADLSLELRKPITFGVITADTLEQAIERAGTKHGNKGWEAALSAIEMANLFKSLR

SEQ ID NO: 3767 - protein, 1371 aa, Artificial Sequence
  SARS-CoV-2/Wuhan/HBCDC-HB-02/2020__EPI_ISL_412978 spike protein (1-1211)(K986P_V987P_T887W_A1020W) LumSynth construct
MFVFLVLLPLVSSQCVNLTTRTQLPPAYTNSFTRGVYYPDKVFRSSVLHSTQDLFLPFFSNVTWFHAIHVSGTNGTKRFDNPVLPFNDGVYFASTEKSNIIRGWIFGTTLDSKTQSLLIVNNATNVVIKVCEFQFCNDPFLGVYYHKNNKSWMESEFRVYSSANNCTFEYVSQPFLMDLEGKQGNFKNLREFVFKNIDGYFKIYSKHTPINLVRDLPQGFSALEPLVDLPIGINITRFQTLLALHRSYLTPGDSSSGWTAGAAAYYVGYLQPRTFLLKYNENGTITDAVDCALDPLSETKCTLKSFTVEKGIYQTSNFRVQPTESIVRFPNITNLCPFGEVFNATRFASVYAWNRKRISNCVADYSVLYNSASFSTFKCYGVSPTKLNDLCFTNVYADSFVIRGDEVRQIAPGQTGKIADYNYKLPDDFTGCVIAWNSNNLDSKVGGNYNYLYRLFRKSNLKPFERDISTEIYQAGSTPCNGVEGFNCYFPLQSYGFQPTNGVGYQPYRVVVLSFELLHAPATVCGPKKSTNLVKNKCVNFNFNGLTGTGVLTESNKKFLPFQQFGRDIADTTDAVRDPQTLEILDITPCSFGGVSVITPGTNTSNQVAVLYQDVNCTEVPVAIHADQLTPTWRVYSTGSNVFQTRAGCLIGAEHVNNSYECDIPIGAGICASYQTQTNSPRRARSVASQSIIAYTMSLGAENSVAYSNNSIAIPTNFTISVTTEILPVSMTKTSVDCTMYICGDSTECSNFLLQYGSFCTQLNRALTGIAVEQDKNTQEVFAQVKQIYKTPPIKDFGGFNFSQILPDPSKPSKRSFIEDLLFNKVTLADAGFIKQYGDCLGDIAARDLICAQKFNGLTVLPPLLTDEMIAQYTSALLAGTITSGWWFGAGAALQIPFAMQMAYRFNGIGVTQNVLYENQKLIANQFNSAIGKIQDSLSSTASALGKLQDVVNQNAQALNTLVKQLSSNFGAISSVLNDILSRLDPPEAEVQIDRLITGRLQSLQTYVTQQLIRAAEIRWSANLAATKMSECVLGQSKRVDFCGKGYHLMSFPQSAPHGVVFLHVTYVPAQEKNFTTAPAICHDGKAHFPREGVFVSNGTHWFVTQRNFYEPQIITTDNTFVSGNCDVVIGIVNNTVYDPLQPELDSFKEELDKYFKNHTSPDVDLGDISGINASVVNIQKEIDRLNEVAKNLNESLIDLQELGKYEQYIKGGGSGGGQIYEGKLTAEGLRFGIVASRFNHALVDRLVEGAIDAIVRHGGREEDITLVRVPGSWEIPVAAGELARKEDIDAVIAIGVLIRGATPHFDYIASEVSKGLADLSLELRKPITFGVITADTLEQAIERAGTKHGNKGWEAALSAIEMANLFKSLR

SEQ ID NO: 3768 - protein, 1371 aa, Artificial Sequence
  SARS-CoV-2/Australia/QLD02/2020__EPI_ISL_407896 spike protein (1-1211)(K986P_V987P_T887W_A1020W) LumSynth construct
MFVFLVLLPLVSSQCVNLTTRTQLPPAYTNSFTRGVYYPDKVFRSSVLHSTQDLFLPFFSNVTWFHAIHVSGTNGTKRFDNPVLPFNDGVYFASTEKSNIIRGWIFGTTLDSKTQSLLIVNNATNVVIKVCEFQFCNDPFLGVYYHKNNKSWMESEFRVYSSANNCTFEYVSQPFLMDLEGKQGNFKNLREFVFKNIDGYFKIYSKHTPINLVRDLPQGFSALEPLVDLPIGINITRFQTLLALHRSYLTPGDSSSGWTAGAAAYYVGYLQPRTFLLKYNENGTITDAVDCALDPLSETKCTLKSFTVEKGIYQTSNFRVQPTESIVRFPNITNLCPFGEVFNATRFASVYAWNRKRISNCVADYSVLYNSASFSTFKCYGVSPTKLNDLCFTNVYADSFVIRGDEVRQIAPGQTGKIADYNYKLPDDFTGCVIAWNSNNLDSKVGGNYNYLYRLFRKSNLKPFERDISTEIYQAGSTPCNGVEGFNCYFPLQSYGFQPTNGVGYQPYRVVVLSFELLHAPATVCGPKKSTNLVKNKCVNFNFNGLTGTGVLTESNKKFLPFQQFGRDIADTTDAVRDPQTLEILDITPCSFGGVSVITPGTNTSNQVAVLYQDVNCTEVPVAIHADQLTPTWRVYSTGSNVFQTRAGCLIGAEHVNNSYECDIPIGAGICASYQTQTNSPRRARSVASQSIIAYTMSLGAENSVAYSNNSIAIPTNFTISVTTEILPVSMTKTSVDCTMYICGDSTECSNLLLQYGSFCTQLNRALTGIAVEQDKNTQEVFAQVKQIYKTPPIKDFGGFNFSQILPDPSKPSKRSFIEDLLFNKVTLADAGFIKQYGDCLGDIAARDLICAQKFNGLTVLPPLLTDEMIAQYTSALLAGTITSGWWFGAGAALQIPFAMQMAYRFNGIGVTQNVLYENQKLIANQFNSAIGKIQDSLSSTASALGKLQDVVNQNAQALNTLVKQLSSNFGAISSVLNDILSRLDPPEAEVQIDRLITGRLQSLQTYVTQQLIRAAEIRWSANLAATKMSECVLGQSKRVDFCGKGYHLMSFPQSAPHGVVFLHVTYVPAQEKNFTTAPAICHDGKAHFPREGVFVSNGTHWFVTQRNFYEPQIITTDNTFVSGNCDVVIGIVNNTVYDPLQLELDSFKEELDKYFKNHTSPDVDLGDISGINASVVNIQKEIDRLNEVAKNLNESLIDLQELGKYEQYIKGGGSGGGQIYEGKLTAEGLRFGIVASRFNHALVDRLVEGAIDAIVRHGGREEDITLVRVPGSWEIPVAAGELARKEDIDAVIAIGVLIRGATPHFDYIASEVSKGLADLSLELRKPITFGVITADTLEQAIERAGTKHGNKGWEAALSAIEMANLFKSLR

SEQ ID NO: 3769 - protein, 1371 aa, Artificial Sequence
  SARS-CoV-2/India/1-31/2020__EPI_ISL_413523 spike protein (1-1211)(K986P_V987P_T887W_A1020W) LumSynth construct
MFVFLVLLPLVSSQCVNLTTRTQLPPAYTNSFTRGVYYPDKVFRSSVLHSTQDLFLPFFSNVTWFHAIHVSGTNGTKRFDNPVLPFNDGVYFASTEKSNIIRGWIFGTTLDSKTQSLLIVNNATNVVIKVCEFQFCNDPFLGVYYHKNNKSWMESEFRVYSSANNCTFEYVSQPFLMDLEGKQGNFKNLREFVFKNIDGYFKIYSKHTPINLVRDLPQGFSALEPLVDLPIGINITRFQTLLALHRSYLTPGDSSSGWTAGAAAYYVGYLQPRTFLLKYNENGTITDAVDCALDPLSETKCTLKSFTVEKGIYQTSNFRVQPTESIVRFPNITNLCPFGEVFNATRFASVYAWNRKRISNCVADYSVLYNSASFSTFKCYGVSPTKLNDLCFTNVYADSFVIRGDEVRQIAPGQTGKIADYNYKLPDDFTGCVIAWNSNNLDSKVGGNYNYLYRLFRKSNLKPFERDISTEIYQAGSTPCNGVEGFNCYFPLQSYGFQPTNGVGYQPYRVVVLSFELLHAPATVCGPKKSTNLVKNKCVNFNFNGLTGTGVLTESNKKFLPFQQFGRDIADTTDAVRDPQTLEILDITPCSFGGVSVITPGTNTSNQVAVLYQDVNCTEVPVAIHADQLTPTWRVYSTGSNVFQTRAGCLIGAEHVNNSYECDIPIGAGICASYQTQTNSPRRARSVASQSIIAYTMSLGAENSVAYSNNSIAIPTNFTISVTTEILPVSMTKTSVDCTMYICGDSTECSNLLLQYGSFCTQLNRALTGIAVEQDKNTQEVFAQVKQIYKTPPIKDFGGFNFSQILPDPSKPSKRSFIEDLLFNKVTLADAGFIKQYGDCLGDIAARDLICAQKFNGLTVLPPLLTDEMIAQYTSALLAGTITSGWWFGAGAALQIPFAMQMAYRFNGIGVTQNVLYENQKLIANQFNSVIGKIQDSLSSTASALGKLQDVVNQNAQALNTLVKQLSSNFGAISSVLNDILSRLDPPEAEVQIDRLITGRLQSLQTYVTQQLIRAAEIRWSANLAATKMSECVLGQSKRVDFCGKGYHLMSFPQSAPHGVVFLHVTYVPAQEKNFTTAPAICHDGKAHFPREGVFVSNGTHWFVTQRNFYEPQIITTDNTFVSGNCDVVIGIVNNTVYDPLQPELDSFKEELDKYFKNHTSPDVDLGDISGINASVVNIQKEIDRLNEVAKNLNESLIDLQELGKYEQYIKGGGSGGGQIYEGKLTAEGLRFGIVASRFNHALVDRLVEGAIDAIVRHGGREEDITLVRVPGSWEIPVAAGELARKEDIDAVIAIGVLIRGATPHFDYIASEVSKGLADLSLELRKPITFGVITADTLEQAIERAGTKHGNKGWEAALSAIEMANLFKSLR

SEQ ID NO: 3770 - protein, 1371 aa, Artificial Sequence
  SARS-CoV-2/Guangdong/GD2020087-P0008/2020__EPI_ISL_413863 spike protein (1-1211)(K986P_V987P_T887W_A1020W) LumSynth construct
MFVFLVLLPLVSSQCVNLTTRTQLPPAYTNSFTRGVYYPDKVFRSSVLHSTQDLFLPFFSNVTWFHAIHVSGTNGTKRFDNPVLPFNDGVYFASTEKSNIIRGWIFGTTLDSKTQSLLIVNNATNVVIKVCEFQFCNDPFLGVYYHKNNKSWMESEFRVYSSANNCTFEYVSQPFLMDLEGKQGNFKNLREFVFKNIDGYFKIYSKHTPINLVRDLPQGFSALEPLVDLPIGINITRFQTLLALHRSYLTPGDSSSGWTAGAAAYYVGYLQPRTFLLKYNENGTITDAVDCALDPLSETKCTLKSFTVEKGIYQTSNFRVQPTESIVRFPNITNLCPFGEVFNATRFASVYAWNRKRISNCVADYSVLYNSASFSTFKCYGVSPTKLNDLCFTNVYADSFVIRGDEVREIAPGQTGKIADYNYKLPDDFTGCVIAWNSNNLDSKVGGNYNYLYRLFRKSNLKPFERDISTEIYQAGSTPCNGVEGFNCYFPLQSYGFQPTNGVGYQPYRVVVLSFELLHAPATVCGPKKSTNLVKNKCVNFNFNGLTGTGVLTESNKKFLPFQQFGRDIADTTDAVRDPQTLEILDITPCSFGGVSVITPGTNTSNQVAVLYQDVNCTEVPVAIHADQLTPTWRVYSTGSNVFQTRAGCLIGAEHVNNSYECDIPIGAGICASYQTQTNSPRRARSVASQSIIAYTMSLGAENSVAYSNNSIAIPTNFTISVTTEILPVSMTKTSVDCTMYICGDSTECSNLLLQYGSFCTQLNRALTGIAVEQDKNTQEVFAQVKQIYKTPPIKDFGGFNFSQILPDPSKPSKRSFIEDLLFNKVTLADAGFIKQYGDCLGDIAARDLICAQKFNGLTVLPPLLTDEMIAQYTSALLAGTITSGWWFGAGAALQIPFAMQMAYRFNGIGVTQNVLYENQKLIANQFNSAIGKIQDSLSSTASALGKLQDVVNQNAQALNTLVKQLSSNFGAISSVLNDILSRLDPPEAEVQIDRLITGRLQSLQTYVTQQLIRAAEIRWSANLAATKMSECVLGQSKRVDFCGKGYHLMSFPQSAPHGVVFLHVTYVPAQEKNFTTAPAICHDGKAHFPREGVFVSNGTHWFVTQRNFYEPQIITTDNTFVSGNCDVVIGIVNNTVYDPLQPELDSFKEELDKYFKNHTSPDVDLGDISGINASVVNIQKEIDRLNEVAKNLNESLIDLQELGKYEQYIKGGGSGGGQIYEGKLTAEGLRFGIVASRFNHALVDRLVEGAIDAIVRHGGREEDITLVRVPGSWEIPVAAGELARKEDIDAVIAIGVLIRGATPHFDYIASEVSKGLADLSLELRKPITFGVITADTLEQAIERAGTKHGNKGWEAALSAIEMANLFKSLR

SEQ ID NO: 3771 - protein, 1371 aa, Artificial Sequence
  SARS-CoV-2/Sweden/01/2020__EPI_ISL_411951 spike protein (1-1211)(K986P_V987P_T887W_A1020W) LumSynth construct
MFVFLVLLPLVSSQCVNLTTRTQLPPAYTNSFTRGVYYPDKVFRSSVLHSTQDLFLPFFSNVTWFHAIHVSGTNGTKRFDNPVLPFNDGVYFASTEKSNIIRGWIFGTTLDSKTQSLLIVNNATNVVIKVCEFQFCNDPFLGVYYHKNNKSWMESEFRVYSSANNCTFEYVSQPFLMDLEGKQGNFKNLREFVFKNIDGYFKIYSKHTPINLVRDLPQGFSALEPLVDLPIGINITRFQTLLALHRSYLTPGDSSSGWTAGAAAYYVGYLQPRTFLLKYNENGTITDAVDCALDPLSETKCTLKSFTVEKGIYQTSNFRVQPTESIVRFPNITNLCPFGEVFNATRFASVYAWNRKRISNCVADYSVLYNSASFSTFKCYGVSPTKLNDLCFTNVYADSFVIRGDEVRQIAPGQTGKIADYNYKLPDDFTGCVIAWNSNNLDSKVGGNYNYLYRLFRKSNLKPFERDISTEIYQAGSTPCNGVEGFNCYFPLQSYGFQPTNGVGYQPYRVVVLSFELLHAPATVCGPKKSTNLVKNKCVNFNFNGLTGTGVLTESNKKFLPFQQFGRDIADTTDAVRDPQTLEILDITPCSFGGVSVITPGTNTSNQVAVLYQDVNCTEVPVAIHADQLTPTWRVYSTGSNVFQTRAGCLIGAEHVNNSYECDIPIGAGICASYQTQTNSPRRARSVASQSIIAYTMSLGAENSVAYSNNSIAIPTNFTISVTTEILPVSMTKTSVDCTMYICGDSTECSNLLLQYGSFCTQLNRALTGIAVEQDKNTQEVFAQVKQIYKTPPIKDCGGFNFSQILPDPSKPSKRSFIEDLLFNKVTLADAGFIKQYGDCLGDIAARDLICAQKFNGLTVLPPLLTDEMIAQYTSALLAGTITSGWWFGAGAALQIPFAMQMAYRFNGIGVTQNVLYENQKLIANQFNSAIGKIQDSLSSTASALGKLQDVVNQNAQALNTLVKQLSSNFGAISSVLNDILSRLDPPEAEVQIDRLITGRLQSLQTYVTQQLIRAAEIRWSANLAATKMSECVLGQSKRVDFCGKGYHLMSFPQSAPHGVVFLHVTYVPAQEKNFTTAPAICHDGKAHFPREGVFVSNGTHWFVTQRNFYEPQIITTDNTFVSGNCDVVIGIVNNTVYDPLQPELDSFKEELDKYFKNHTSPDVDLGDISGINASVVNIQKEIDRLNEVAKNLNESLIDLQELGKYEQYIKGGGSGGGQIYEGKLTAEGLRFGIVASRFNHALVDRLVEGAIDAIVRHGGREEDITLVRVPGSWEIPVAAGELARKEDIDAVIAIGVLIRGATPHFDYIASEVSKGLADLSLELRKPITFGVITADTLEQAIERAGTKHGNKGWEAALSAIEMANLFKSLR

SEQ ID NO: 3772 - protein, 1371 aa, Artificial Sequence
  SARS-CoV-2/Tianmen/HBCDC-HB-07/2020__EPI_ISL_412983 spike protein (1-1211)(K986P_V987P_T887W_A1020W) LumSynth construct
MFVFLVLLPLVSSQCVNLTTRTQLPPAYTNSFTRGVYYPDKVFRSSVLHSTQDLFLPFFSNVTWFHAIHVSGTNGTKRFDNPVLPFNDGVYFASTEKSNIIRGWIFGTTLDSKTQSLLIVNNATNVVIKVCEFQFCNDPFLGVYYHKNNKSWMESEFRVYSSANNCTFEYVSQPFLMDLEGKQGNFKNLREFVFKNIDGYFKIYSKHTPINLVRDLPQGFSALEPLVDLPIGINITRFQTLLALHRSYLTPGDSSSGWTAGAAAYYVGYLQPRTFLLKYNENGTITDAVDCALDPLSETKCTLKSFTVEKGIYQTSNFRVQPTESIVRFPNITNLCPFGEVFNATRFASVYAWNRKRISNCVADYSVLYNSASFSTFKCYGVSPTKLNDLCFTNVYADSFVIRGDEVRQIAPGQTGKIADYNYKLPDDFTGCVIAWNSNNLDSKVGGNYNYLYRLFRKSNLKPFERDISTEIYQAGSTPCNGVEGFNCYFPLQSYGFQPTNGVGYQPYRVVVLSFELLHAPATVCGPKKSTNLVKNKCVNFNFNGLTGTGVLTESNKKFLPFQQFGRDIADTTDAVRDPQTLEILDITPCSFGGVSVITPGTNTSNQVAVLYQDLNCTEVPVAIHADQLTPTWRVYSTGSNVFQTRAGCLIGAEHVNNSYECDIPIGAGICASYQTQTNSPRRARSVASQSIIAYTMSLGAENSVAYSNNSIAIPTNFTISVTTEILPVSMTKTSVDCTMYICGDSTECSNLLLQYGSFCTQLNRALTGIAVEQDKNTQEVFAQVKQIYKTPPIKDFGGFNFSQILPDPSKPSKRSFIEDLLFNKVTLADAGFIKQYGDCLGDIAARDLICAQKFNGLTVLPPLLTDEMIAQYTSALLAGTITSGWWFGAGAALQIPFAMQMAYRFNGIGVTQNVLYENQKLIANQFNSAIGKIQDSLSSTASALGKLQDVVNQNAQALNTLVKQLSSNFGAISSVLNDILSRLDPPEAEVQIDRLITGRLQSLQTYVTQQLIRAAEIRWSANLAATKMSECVLGQSKRVDFCGKGYHLMSFPQSAPHGVVFLHVTYVPAQEKNFTTAPAICHDGKAHFPREGVFVSNGTHWFVTQRNFYEPQIITTDNTFVSGNCDVVIGIVNNTVYDPLQPELDSFKEELDKYFKNHTSPDVDLGDISGINASVVNIQKEIDRLNEVAKNLNESLIDLQELGKYEQYIKGGGSGGGQIYEGKLTAEGLRFGIVASRFNHALVDRLVEGAIDAIVRHGGREEDITLVRVPGSWEIPVAAGELARKEDIDAVIAIGVLIRGATPHFDYIASEVSKGLADLSLELRKPITFGVITADTLEQAIERAGTKHGNKGWEAALSAIEMANLFKSLR

SEQ ID NO: 3773 - protein, 1371 aa, Artificial Sequence
  SARS-CoV-2/Hong Kong/case42_VM20002493/2020__EPI_ISL_414527 spike protein (1-1211)(K986P_V987P_T887W_A1020W) LumSynth construct
MFVFLVLLPLVSSQCVNLTTRTQLPPAYTNSFTRGVYYPDKVFRSSVLHSTQDLFLPFFSNVTWFHAIHVSGTNGTKRFDNPVLPFNDGVYFASTEKSNIIRGWIFGTTLDSKTQSLLIVNNATNVVIKVCEFQFCNDPFLGVYYHKNNKSWMESEFRVYSSANNCTFEYVSQPFLMDLEGKQGNFKNLREFVFKNIDGYFKIYSKHTPINLVRDLPQGFSALEPLVDLPIGINITRFQTLLALHRSYLTPGDSSSGWTAGAAAYYVGYLQPRTFLLKYNENGTITDAVDCALDPLSETKCTLKSFTVEKGIYQTSNFRVQPTESIVRFPNITNLCPFGEVFNATRFASVYAWNRKRISNCVADYSVLYNSASFSTFKCYGVSPTKLNDLCFTNVYADSFVIRGDEVRQIAPGQTGKIADYNYKLPDDFTGCVIAWNSNNLDSKVGGNYNYLYRLFRKSNLKPFERDISTEIYQAGSTPCNGVEGFNCYFPLQSYGFQPTNGVGYQPYRVVVLSFELLHAPATVCGPKKSTNLVKNKCVNFNFNGLTGTGVLTESNKKFLPFQQFGRDIADTTDAVRDPQTLEILDITPCSFGGVSVITPGTNTSNQVAVLYQDVNCTEVPVAIHADQLTPTWRVYSTGSNVFQTRAGCLIGAEHVNNSYECDIPIGAGICASYQTQTNSPRRARSVASQSIIAYTMSLGAENSVAYSNNSIAIPTNFAISVTTEILPVSMTKTSVDCTMYICGDSTECSNLLLQYGSFCTQLNRALTGIAVEQDKNTQEVFAQVKQIYKTPPIKDFGGFNFSQILPDPSKPSKRSFIEDLLFNKVTLADAGFIKQYGDCLGDIAARDLICAQKFNGLTVLPPLLTDEMIAQYTSALLAGTITSGWWFGAGAALQIPFAMQMAYRFNGIGVTQNVLYENQKLIANQFNSAIGKIQDSLSSTASALGKLQDVVNQNAQALNTLVKQLSSNFGAISSVLNDILSRLDPPEAEVQIDRLITGRLQSLQTYVTQQLIRAAEIRWSANLAATKMSECVLGQSKRVDFCGKGYHLMSFPQSAPHGVVFLHVTYVPAQEKNFTTAPAICHDGKAHFPREGVFVSNGTHWFVTQRNFYEPQIITTDNTFVSGNCDVVIGIVNNTVYDPLQPELDSFKEELDKYFKNHTSPDVDLGDISGINASVVNIQKEIDRLNEVAKNLNESLIDLQELGKYEQYIKGGGSGGGQIYEGKLTAEGLRFGIVASRFNHALVDRLVEGAIDAIVRHGGREEDITLVRVPGSWEIPVAAGELARKEDIDAVIAIGVLIRGATPHFDYIASEVSKGLADLSLELRKPITFGVITADTLEQAIERAGTKHGNKGWEAALSAIEMANLFKSLR

SEQ ID NO: 3774 - protein, 1371 aa, Artificial Sequence
  SARS-CoV-2/USA/CruiseA-23/2020__EPI_ISL_414482 spike protein (1-1211)(K986P_V987P_T887W_A1020W) LumSynth construct
MFVFLVLLPLVSSQCVNLTTRTQLPPAYTNSFTRGVYYPDKVFRSSVLHSTQDLFLPFFSNVTWFHAIHVSGTNGTKRFDNPVLPFNDGVYFASTEKSNIIRGWIFGTTLDSKTQSLLIVNNATNVVIKVCEFQFCNDPFLGVYYHKNNKSWMESEFRVYSSANNCTFEYVSQPFLMDLEVKQGNFKNLREFVFKNIDGYFKIYSKHTPINLVRDLPQGFSALEPLVDLPIGINITRFQTLLALHRSYLTPGDSSSGWTAGAAAYYVGYLQPRTFLLKYNENGTITDAVDCALDPLSETKCTLKSFTVEKGIYQTSNFRVQPTESIVRFPNITNLCPFGEVFNATRFASVYAWNRKRISNCVADYSVLYNSASFSTFKCYGVSPTKLNDLCFTNVYADSFVIRGDEVRQIAPGQTGKIADYNYKLPDDFTGCVIAWNSNNLDSKVGGNYNYLYRLFRKSNLKPFERDISTEIYQAGSTPCNGVEGFNCYFPLQSYGFQPTNGVGYQPYRVVVLSFELLHAPATVCGPKKSTNLVKNKCVNFNFNGLTGTGVLTESNKKFLPFQQFGRDIADTTDAVRDPQTLEILDITPCSFGGVSVITPGTNTSNQVAVLYQDVNCTEVPVAIHADQLTPTWRVYSTGSNVFQTRAGCLIGAEHVNNSYECDIPIGAGICASYQTQTNSPRRARSVASQSIIAYTMSLGAENSVAYSNNSIAIPTNFTISVTTEILPVSMTKTSVDCTMYICGDSTECSNLLLQYGSFCTQLNRALTGIAVEQDKNTQEVFAQVKQIYKTPPIKDFGGFNFSQILPDPSKPSKRSFIEDLLFNKVTLADAGFIKQYGDCLGDIAARDLICAQKFNGLTVLPPLLTDEMIAQYTSALLAGTITSGWWFGAGAALQIPFAMQMAYRFNGIGVTQNVLYENQKLIANQFNSAIGKIQDSLSSTASALGKLQDVVNQNAQALNTLVKQLSSNFGAISSVLNDILSRLDPPEAEVQIDRLITGRLQSLQTYVTQQLIRAAEIRWSANLAATKMSECVLGQSKRVDFCGKGYHLMSFPQSAPHGVVFLHVTYVPAQEKNFTTAPAICHDGKAHFPREGVFVSNGTHWFVTQRNFYEPQIITTDNTFVSGNCDVVIGIVNNTVYDPLQPELDSFKEELDKYFKNHTSPDVDLGDISGINASVVNIQKEIDRLNEVAKNLNESLIDLQELGKYEQYIKGGGSGGGQIYEGKLTAEGLRFGIVASRFNHALVDRLVEGAIDAIVRHGGREEDITLVRVPGSWEIPVAAGELARKEDIDAVIAIGVLIRGATPHFDYIASEVSKGLADLSLELRKPITFGVITADTLEQAIERAGTKHGNKGWEAALSAIEMANLFKSLR

SEQ ID NO: 3775 - protein, 1371 aa, Artificial Sequence
  SARS-CoV-2/Hong Kong/case85_VM20002868/2020__EPI_ISL_414519 spike protein (1-1211)(K986P_V987P_T887W_A1020W) LumSynth construct
MFVFLVLVPLVSSQCVNLTTRTQLPPAYTNSFTRGVYYPDKVFRSSVLHSTQDLFLPFFSNVTWFHAIHVSGTNGTKRFDNPVLPFNDGVYFASTEKSNIIRGWIFGTTLDSKTQSLLIVNNATNVVIKVCEFQFCNDPFLGVYYHKNNKSWMESEFRVYSSANNCTFEYVSQPFLMDLEGKQGNFKNLREFVFKNIDGYFKIYSKHTPINLVRDLPQGFSALEPLVDLPIGINITRFQTLLALHRSYLTPGDSSSGWTAGAAAYYVGYLQPRTFLLKYNENGTITDAVDCALDPLSETKCTLKSFTVEKGIYQTSNFRVQPTESIVRFPNITNLCPFGEVFNATRFASVYAWNRKRISNCVADYSVLYNSASFSTFKCYGVSPTKLNDLCFTNVYADSFVIRGDEVRQIAPGQTGKIADYNYKLPDDFTGCVIAWNSNNLDSKVGGNYNYLYRLFRKSNLKPFERDISTEIYQAGSTPCNGVEGFNCYFPLQSYGFQPTNGVGYQPYRVVVLSFELLHAPATVCGPKKSTNLVKNKCVNFNFNGLTGTGVLTESNKKFLPFQQFGRDIADTTDAVRDPQTLEILDITPCSFGGVSVITPGTNTSNQVAVLYQDVNCTEVPVAIHADQLTPTWRVYSTGSNVFQTRAGCLIGAEHVNNSYECDIPIGAGICASYQTQTNSPRRARSVASQSIIAYTMSLGAENSVAYSNNSIAIPTNFTISVTTEILPVSMTKTSVDCTMYICGDSTECSNLLLQYGSFCTQLNRALTGIAVEQDKNTQEVFAQVKQIYKTPPIKDFGGFNFSQILPDPSKPSKRSFIEDLLFNKVTLADAGFIKQYGDCLGDIAARDLICAQKFNGLTVLPPLLTDEMIAQYTSALLAGTITSGWWFGAGAALQIPFAMQMAYRFNGIGVTQNVLYENQKLIANQFNSAIGKIQDSLSSTASALGKLQDVVNQNAQALNTLVKQLSSNFGAISSVLNDILSRLDPPEAEVQIDRLITGRLQSLQTYVTQQLIRAAEIRWSANLAATKMSECVLGQSKRVDFCGKGYHLMSFPQSAPHGVVFLHVTYVPAQEKNFTTAPAICHDGKAHFPREGVFVSNGTHWFVTQRNFYEPQIITTDNTFVSGNCDVVIGIVNNTVYDPLQPELDSFKEELDKYFKNHTSPDVDLGDISGINASVVNIQKEIDRLNEVAKNLNESLIDLQELGKYEQYIKGGGSGGGQIYEGKLTAEGLRFGIVASRFNHALVDRLVEGAIDAIVRHGGREEDITLVRVPGSWEIPVAAGELARKEDIDAVIAIGVLIRGATPHFDYIASEVSKGLADLSLELRKPITFGVITADTLEQAIERAGTKHGNKGWEAALSAIEMANLFKSLR

SEQ ID NO: 3776 - protein, 1371 aa, Artificial Sequence; identical to SEQ ID NO: 3766
  SARS-CoV-2/England/200990660/2020__EPI_ISL_414523 spike protein (1-1211)(K986P_V987P_T887W_A1020W) LumSynth construct

SEQ ID NO: 3777 - protein, 1371 aa, Artificial Sequence
  SARS-CoV-2/Australia/NSW09/2020__EPI_ISL_413595 spike protein (1-1211)(K986P_V987P_T887W_A1020W) LumSynth construct
MFVFLVLLPLVSSQCVNLTTRTQLPPAYTNSFTRGVYYPDKVFRSSVLHSTQDLFLPFFSNVTWFHAIHVSGTNGTKRFDNPVLPFNDGVYFASTEKSNIIRGWIFGTTLDSKTQSLLIVNNATNVVIKVCEFQFCNDPFLGVYYHKNNKSWMESEFRVYSSANNCTFEYVSQPFLMDLEGKQGNFKNLREFVFKNIDGYFKIYSKHTPINLVRDLPQGFSALEPLVDLPIGINITRFQTLLALHRSYLTPGDSSSGWTAGAAAYYVGYLQPRTFLLKYNENGTITDAVDCALDPLSETKCTLKSFTVEKGIYQTSNFRVQPTESIVRFPNITNLCPFGEVFNATRFASVYAWNRKRISNCVADYSVLYNSASFSTFKCYGVSPTKLNDLCFTNVYADSFVIRGDEVRQIAPGQTGKIADYNYKLPDDFTGCVIAWNSNNLDSKVGGNYNYLYRLFRKSNLKPFERDISTEIYQAGSTPCNGVEGFNCYFPLQSYGFQPTNGVGYQPYRVVVLSFELLHAPATVCGPKKSTNLVKNKCVNFNFNGLTGTGVLTESNKKFLPFQQFGRDIADTTDAVRDPQTLEILDITPCSFGGVSVITPGTNTSNQVAVLYQDVNCTEVPVAIHADQLTPTWRVYSTGSNVFQTRAGCLIGAEHVNNSYECDIPIGAGICASYQTQTNSPRRARSVASQSIIAYTMSLGAENSVAYSNNSIAIPTNFTISVTTEILPVSMTKTSVDCTMYICGDSTECSNLLLQYGSFCTQLNRALTGIAVEQDKNTQEVFAQVKQIYKTPPIKDFGGFNFSQILPDPSKPSKRSFIEDLLFNKVTLADAGFIKQYGDCLGDIAARDLICAQKFNGLTVLPPLLTDEMIAQYTSALLAGTITSGWWFGAGAALQIPFAMQMAYRFNGIGVTQNVLYENQKLIANQFNSAIGKIQDSLSFTASALGKLQDVVNQNAQALNTLVKQLSSNFGAISSVLNDILSRLDPPEAEVQIDRLITGRLQSLQTYVTQQLIRAAEIRWSANLAATKMSECVLGQSKRVDFCGKGYHLMSFPQSAPHGVVFLHVTYVPAQEKNFTTAPAICHDGKAHFPREGVFVSNGTHWFVTQRNFYEPQIITTDNTFVSGNCDVVIGIVNNTVYDPLQPELDSFKEELDKYFKNHTSPDVDLGDISGINASVVNIQKEIDRLNEVAKNLNESLIDLQELGKYEQYIKGGGSGGGQIYEGKLTAEGLRFGIVASRFNHALVDRLVEGAIDAIVRHGGREEDITLVRVPGSWEIPVAAGELARKEDIDAVIAIGVLIRGATPHFDYIASEVSKGLADLSLELRKPITFGVITADTLEQAIERAGTKHGNKGWEAALSAIEMANLFKSLR

SEQ ID NO: 3778 - protein, 1371 aa, Artificial Sequence; identical to SEQ ID NO: 3758
  SARS-CoV-2/Australia/NSW10/2020__EPI_ISL_413596 spike protein (1-1211)(K986P_V987P_T887W_A1020W) LumSynth construct

SEQ ID NO: 3779 - protein, 1371 aa, Artificial Sequence
  SARS-CoV-2/Switzerland/1000477797/2020__EPI_ISL_413023 spike protein (1-1211)(K986P_V987P_T887W_A1020W) LumSynth construct
MFVFLVLLPLVSSQCVNLTTRTQLPPAYTNSFTRGVYYPDKVFRSSVLHSTQDLFLPFFSNVTWFHAIHVSGTNGTKRFDNPVLPFNDGVYFASTEKSNIIRGWIFGTTLDSKTQSLLIVNNATNVVIKVCEFQFCNDPFLGVYYHKNNKSWMESEFRVYSSANNCTFEYVSQPFLMDLEGKQGNFKNLREFVFKNIDGYFNIYSKHTPINLVRDLPQGFSALEPLVDLPIGINITRFQTLLALHRSYLTPGDSSSGWTAGAAAYYVGYLQPRTFLLKYNENGTITDAVDCALDPLSETKCTLKSFTVEKGIYQTSNFRVQPTESIVRFPNITNLCPFGEVFNATRFASVYAWNRKRISNCVADYSVLYNSASFSTFKCYGVSPTKLNDLCFTNVYADSFVIRGDEVRQIAPGQTGKIADYNYKLPDDFTGCVIAWNSNNLDSKVGGNYNYLYRLFRKSNLKPFERDISTEIYQAGSTPCNGVEGFNCYFPLQSYGFQPTNGVGYQPYRVVVLSFELLHAPATVCGPKKSTNLVKNKCVNFNFNGLTGTGVLTESNKKFLPFQQFGRDIADTTDAVRDPQTLEILDITPCSFGGVSVITPGTNTSNQVAVLYQGVNCTEVPVAIHADQLTPTWRVYSTGSNVFQTRAGCLIGAEHVNNSYECDIPIGAGICASYQTQTNSPRRARSVASQSIIAYTMSLGAENSVAYSNNSIAIPTNFTISVTTEILPVSMTKTSVDCTMYICGDSTECSNLLLQYGSFCTQLNRALTGIAVEQDKNTQEVFAQVKQIYKTPPIKDFGGFNFSQILPDPSKPSKRSFIEDLLFNKVTLADAGFIKQYGDCLGDIAARDLICAQKFNGLTVLPPLLTDEMIAQYTSALLAGTITSGWWFGAGAALQIPFAMQMAYRFNGIGVTQNVLYENQKLIANQFNSAIGKIQDSLSSTASALGKLQDVVNQNAQALNTLVKQLSSNFGAISSVLNDILSRLDPPEAEVQIDRLITGRLQSLQTYVTQQLIRAAEIRWSANLAATKMSECVLGQSKRVDFCGKGYHLMSFPQSAPHGVVFLHVTYVPAQEKNFTTAPAICHDGKAHFPREGVFVSNGTHWFVTQRNFYEPQIITTDNTFVSGNCDVVIGIVNNTVYDPLQPELDSFKEELDKYFKNHTSPDVDLGDISGINASVVNIQKEIDRLNEVAKNLNESLIDLQELGKYEQYIKGGGSGGGQIYEGKLTAEGLRFGIVASRFNHALVDRLVEGAIDAIVRHGGREEDITLVRVPGSWEIPVAAGELARKEDIDAVIAIGVLIRGATPHFDYIASEVSKGLADLSLELRKPITFGVITADTLEQAIERAGTKHGNKGWEAALSAIEMANLFKSLR

SEQ ID NO: 3780 - protein, 1371 aa, Artificial Sequence
  SARS-CoV-2/Belgium/BA-02291/2020__EPI_ISL_415159 spike protein (1-1211)(K986P_V987P_T887W_A1020W) LumSynth construct
MFVFLVLLPLVSSQCVNLTTRTQLPPAYTNSFTRGVYYPDKVFRSSVLHSTQDLFLPFFSNVTWFHAIHVSGTNGTKRFDNPVLPFNDGVYFASTEKSNIIRGWIFGTTLDSKTQSLLIVNNATNVVIKVCEFQFCNDPFLGVYYHKNNKSWMESEFRVYSSANNCTFEYVSQPFLMDLEGKQGNFKNLREFVFKNIDGYFKIYSKHTPINLVRDLPQGFSALEPLVDLPIGINITRFQTLLALHRSYLTPGDSSSGWTAGAAAYYVGYLQPRTFLLKYNENGTITDAVDCALDPLSETKCTLKSFTVEKGIYQTSNFRVQPTESIVRFPNITNLCPFGEVFNATRFASVYAWNRKRISNCVADYSVLYNSASFSTFKCYGVSPTKLNDLCFTNVYADSFVIRGDEVRQIAPGQTGKIADYNYKLPDDFTGCVIAWNSNNLDSKVGGNYNYLYRLFRRSNLKPFERDISTEIYQAGSTPCNGVEGFNCYFPLQSYGFQPTNGVGYQPYRVVVLSFELLPAPATVCGPKKSTNLVKNKCVNFNFNGLTGTGVLTESNKKFLPFQQFGRDIADTTDAVRDPQTLEILDITPCSFGGVSVITPGTNTSNQVAVLYQGVNCTEVPVAIHADQLTPTWRVYSTGSNVFQTRAGCLIGAEHVNNSYECDIPIGAGICASYQTQTNSPRRARSVASQSIIAYTMSLGAENSVAYSNNSIAIPTNFTISVTTEILPVSMTKTSVDCTMYICGDSTECSNLLLQYGSFCTQLNRALTGIAVEQDKNTQEVFAQVKQIYKTPPIKDFGGFNFSQILPDPSKPSKRSFIEDLLFNKVTLADAGFIKQYGDCLGDIAARDLICAQKFNGLTVLPPLLTDEMIAQYTSALLAGTITSGWWFGAGAALQIPFAMQMAYRFNGIGVTQNVLYENQKLIANQFNSAIGKIQDSLSSAAPALGKLQDVVNQNAQALNTLVKQLSSNFGAISSVLNDILSRLDPPEAEVQIDRLITGRLQSLQTYVTQQLIRAAEIRWSANLAATKMSECVLGQSKRVDFCGKGYHLMSFPQSAPHGVVFLHVTYVPAQEKNFTTAPAICHDGKAHFPREGVFVSNGTHWFVTQRNFYEPQIITTDNTFVSGNCDVVIGIVNNTVYDPLQPELDSFKEELDKYFKNHTSPDVDLGDISGINASVVNIQKEIDRLNEVAKNLNESLIDLQELGKYEQYIKGGGSGGGQIYEGKLTAEGLRFGIVASRFNHALVDRLVEGAIDAIVRHGGREEDITLVRVPGSWEIPVAAGELARKEDIDAVIAIGVLIRGATPHFDYIASEVSKGLADLSLELRKPITFGVITADTLEQAIERAGTKHGNKGWEAALSAIEMANLFKSLR

SEQ ID NO: 3781 - protein, 1371 aa, Artificial Sequence
  SARS-CoV-2/USA/WA8-UW5/2020__EPI_ISL_413486 spike protein (1-1211)(K986P_V987P_T887W_A1020W) LumSynth construct
MFVFLVLLPLVSSQCVNLTTRTQLPPAYTNSFTRGVYYPDKVFRSSVLHSTQDLFLPFFSNVTWFHAIHVSGTNGTKRFDNPVLPFNDGVYFASTEKSNIIRGWIFGTTLDSKTQSLLIVNNATNVVIKVCEFQFCNDPFLGVYYHKNNKSWMESEFRVYSSANNCTFEYVSQPFLMDLEGKQGNFKNLREFVFKNIDGYFKIYSKHTPINLVRDLPQGFSALEPLVDLPIGINITRFQTLLALHRSYLTPGDSSSGWTAGAAAYYVGYLQPRTFLLKYNENGTITDAVDCALDPLSETKCTLKSFTVEKGIYQTSNFRVQPTESIVRFPNITNLCPFGEVFNATRFASVYAWNRKRISNCVADYSVLYNSASFSTFKCYGVSPTKLNDLCFTNVYADSFVIRGDEVRQIAPGQTGKIADYNYKLPDDFTGCVIAWNSNNLDSKVGGNYNYLYRLFRKSNLKPFERDISTEIYQAGSTPCNGVEGFNCYFPLQSYGFQPTNGVGYQPYRVVVLSFELLHAPATVCGPKKSTNLVKNKCVNFNFNGLTGTGVLTESNKKFLPFQQFGRDIADTTDAVRDPQTLEILDITPCSFGGVSVITPGTNTSNQVAVLYQDVNCTEVPVAIHADQLTPTWRVYSTGSNVFQTRAGCLIGAEYVNNSYECDIPIGAGICASYQTQTNSPRRARSVASQSIIAYTMSLGAENSVAYSNNSIAIPTNFTISVTTEILPVSMTKTSVDCTMYICGDSTECSNLLLQYGSFCTQLNRALTGIAVEQDKNTQEVFAQVKQIYKTPPIKDFGGFNFSQILPDPSKPSKRSFIEDLLFNKVTLADAGFIKQYGDCLGDIAARDLICAQKFNGLTVLPPLLTDEMIAQYTSALLAGTITSGWWFGAGAALQIPFAMQMAYRFNGIGVTQNVLYENQKLIANQFNSAIGKIQDSLSSTASALGKLQDVVNQNAQALNTLVKQLSSNFGAISSVLNDILSRLDPPEAEVQIDRLITGRLQSLQTYVTQQLIRAAEIRWSANLAATKMSECVLGQSKRVDFCGKGYHLMSFPQSAPHGVVFLHVTYVPAQEKNFTTAPAICHDGKAHFPREGVFVSNGTHWFVTQRNFYEPQIITTDNTFVSGNCDVVIGIVNNTVYDPLQPELDSFKEELDKYFKNHTSPDVDLGDISGINASVVNIQKEIDRLNEVAKNLNESLIDLQELGKYEQYIKGGGSGGGQIYEGKLTAEGLRFGIVASRFNHALVDRLVEGAIDAIVRHGGREEDITLVRVPGSWEIPVAAGELARKEDIDAVIAIGVLIRGATPHFDYIASEVSKGLADLSLELRKPITFGVITADTLEQAIERAGTKHGNKGWEAALSAIEMANLFKSLR

SEQ ID NO: 3782 - protein, 1371 aa, Artificial Sequence
  SARS-CoV-2/England/20102000506/2020__EPI_ISL_415147 spike protein (1-1211)(K986P_V987P_T887W_A1020W) LumSynth construct
MFVFLVLLPLVSSQCVNLTTRTQLPPAYTNSFTRGVYYPDKVFRSSVLHSTQDLFLPFFSNVTWFHAIHVSGTNGTKRFDNPVLPFNDGVYFASTEKSNIIRGWIFGTTLDSKTQSLLIVNNATNVVIKVCEFQFCNDPFLGVYYHKNNKSWMESEFRVYSSANNCTFEYVSQPFLMDLEGKQGNFKNLREFVFKNIDGYFKIYSKHTPINLVRDLPQGFSALEPLVDLPIGINITRFQTLLALHRSYLTPGDSSSGWTAGAAAYYVGYLQPRTFLLKYNENGTITDAVDCALDPLSETKCTLKSFTVEKGIYQTSNFRVQPTESIVRFPNITNLCPFGEVFNATRFASVYAWNRKRISNCVADYSVLYNSASFSTFKCYGVSPTKLNDLCFTNVYADSFVIRGDEVRQIAPGQTGKIADYNYKLPDDFTGCVIAWNSNNLDSKVGGNYNYLYRLFRKSNLKPFERDISTEIYQAGSTPCNGVEGFNCYFPLQSYGFQPTNGVGYQPYRVVVLSFELLHAPATVCGPKKSTNLVKNKCVNFNFNGLTGTGVLTESNKKFLPFQQFGRDIADTTDAVRDPQTLEILDITPCSFGGVSVITPGTNTSNQVAVLYQGVNCTEVPVAIHADQLTPTWRVYSTGSNVFQTRAGCLIGAEHVNNSYECDIPIGAGICASYQTQTNSPRRARSVASQSIIAYTMSLGAENSVAYSNNSIAIPTNFTISVTTEILPVSMTKTSVDCTMYICGDSTECSNLLLQYGSFCTQLNRALTGIAVEQDKNTQEVFAQVKQIYKTPPIKDFGGFNFSQILPDPSKPSKRSFIEDLLFNKVTLADAGFIKQYGYCLGDIAARDLICAQKFNGLTVLPPLLTDEMIAQYTSALLAGTITSGWWFGAGAALQIPFAMQMAYRFNGIGVTQNVLYENQKLIANQFNSAIGKIQDSLSSTASALGKLQDVVNQNAQALNTLVKQLSSNFGAISSVLNDILSRLDPPEAEVQIDRLITGRLQSLQTYVTQQLIRAAEIRWSANLAATKMSECVLGQSKRVDFCGKGYHLMSFPQSAPHGVVFLHVTYVPAQEKNFTTAPAICHDGKAHFPREGVFVSNGTHWFVTQRNFYEPQIITTDNTFVSGNCDVVIGIVNNTVYDPLQPELDSFKEELDKYFKNHTSPDVDLGDISGINASVVNIQKEIDRLNEVAKNLNESLIDLQELGKYEQYIKGGGSGGGQIYEGKLTAEGLRFGIVASRFNHALVDRLVEGAIDAIVRHGGREEDITLVRVPGSWEIPVAAGELARKEDIDAVIAIGVLIRGATPHFDYIASEVSKGLADLSLELRKPITFGVITADTLEQAIERAGTKHGNKGWEAALSAIEMANLFKSLR

SEQ ID NO: 3783 - protein, 1371 aa, Artificial Sequence
  SARS-CoV-2/Belgium/VAG-03013/2020__EPI_ISL_415155 spike protein (1-1211)(K986P_V987P_T887W_A1020W) LumSynth construct
MFVFLVLLPLVSSQCVNLTTRTQLPPAYTNSFTRGVYYPDKVFRSSVLHSTQDLFLPFFSNVTWFHAIHVSGTNGTKRFDNPVLPFNDGVYFASTEKSNIIRGWIFGTTLDSKTQSLLIVNNATNVVIKVCEFQFCNDPFLGVYYHKNNKSWMESEFRVYSSANNCTFEYVSQPFLMDLEGKQGNFKNLREFVFKNIDGYFKIYSKHTPINLVRDLPQGFSALEPLVDLPIGINITRFQTLLALHRSYLTPGDSSSGWTAGAAAYYVGYLQPRTFLLKYNENGTITDAVDCALDPLSETKCTLKSFTVEKGIYQTSNFRVQPTESIVRFPNITNLCPFGEVFNATRFASVYAWNRKRISNCVADYSVLYNSASFSTFKCYGVSPTKLNDLCFTNVYADSFVIRGDEVRQIAPGQTGKIADYNYKLPDDFTGCVIAWNSNNLDSKVGGNYNYLYRLFRKSNLKPFERDISTEIYQAGSTPCNGVEGFNCYFPLQSYGFQPTNGVGYQPYRVVVLSFELLHAPATVCGPKKSTNLVKNKCVNFNFNGLTGTGVLTESNKKFLPFQQFGRDIADTTDAVRDPQTLEILDITPCSFGGVSVITPGTNTSNQVAVLYQGVNCTEVPVAIHADQLTPTWRVYSTGSNVFQTRAGCLIGAEHVNNSYECDIPIGAGICASYQTQTNSPRRARSVASQSIIAYTMSLGAENSVAYSNNSIAIPTNFTISVTTEILPVSMTKTSVDCTMYICGDSTECSNLLLQYGSFCTQLNRALTGIAVEQDKNTQEVFAQVKQIYKTPPIKDFGGFNFSQILPDPSKPSKRSFIEDLLFNKVTLADAGFIKQYGDCLGDIAARDLICAQKFNGLTVLPPLLTDEMIAQYTSALLAGTITSGWWFGAGAALQIPFAMQMAYRFNGIGVTQNVLYENQKLIANQFNSAIGKIQDSLSSTATALGKLQDVVNQNAQALNTLVKQLSSNFGAISSVLNDILSRLDPPEAEVQIDRLITGRLQSLQTYVTQQLIRAAEIRWSANLAATKMSECVLGQSKRVDFCGKGYHLMSFPQSAPHGVVFLHVTYVPAQEKNFTTAPAICHDGKAHFPREGVFVSNGTHWFVTQRNFYEPQIITTDNTFVSGNCDVVIGIVNNTVYDPLQPELDSFKEELDKYFKNHTSPDVDLGDISGINASVVNIQKEIDRLNEVAKNLNESLIDLQELGKYEQYIKGGGSGGGQIYEGKLTAEGLRFGIVASRFNHALVDRLVEGAIDAIVRHGGREEDITLVRVPGSWEIPVAAGELARKEDIDAVIAIGVLIRGATPHFDYIASEVSKGLADLSLELRKPITFGVITADTLEQAIERAGTKHGNKGWEAALSAIEMANLFKSLR

SEQ ID NO: 3784 - protein, 1371 aa, Artificial Sequence
  SARS-CoV-2/Belgium/BC-03016/2020__EPI_ISL_415157 spike protein (1-1211)(K986P_V987P_T887W_A1020W) LumSynth construct
MFVFLVLLPLVSSQCVNLTTRTQLPPAYTNSFTRGVYYPDKVFRSSVLHSTQDLFLPFFSNVTWFHAIHVSGTNGTKRFDNPVLPFNDGVYFASTEKSNIIRGWIFGTTLDSKTQSLLIVNNATNVVIKVCEFQFCNDPFLGVYYHKNNKSWMESEFRVYSSANNCTFEYVSQPFLMDLEGKQGNFKNLREFVFKNIDGYFKIYSKHTPINLVRDLPQGFSALEPLVDLPIGINITRFQTLLALHRSYLTPGDSSSGWTAGAAAYYVGYLQPRTFLLKYNENGTITDAVDCALDPLSETKCTLKSFTVEKGIYQTSNFRVQPTESIVRFPNITNLCPFGEVFNATRFASVYAWNRKRISNCVADYSVLYNSASFSTFKCYGVSPTKLNDLCFTNVYADSFVIRGDEVRQIAPGQTGKIADYNYKLPDDFTGCVIAWNSNNLDSKVGGNYNYLYRLFRKSNLKPFERDISTEIYQAGSTPCNGVEGFNCYFPLQSYGFQPTNGVGYQPYRVVVLSFELLHAPATVCGPKKSTNLVKNKCVNFNFNGLTGTGVLTESNKKFLPFQQFGRDIADTTDAVRDPQTLEILDITPCSFGGVSVITPGTNTSNQVAVLYQGVNCTEVPVAIHADQLTPTWRVYSTGSNVFQTRAGCLIGAEHVNNSYECDIPIGAGICASYQTQTNSPRRARSVASQSIIAYTMSLGAENSVAYSNNSIAIPTNFTISVTTEILPVSMTKTSVDCTMYICGDSTECSNLLLQYGSFCTQLNRALTGIAVEQDKNTQEVFAQVKQIYKTPPIKDFGGFNFSQILPDPSKPSKRSFIEDLLFNKVTLADAGFIKQYGDCLGDIAARDLICAQKFNGLTVLPPLLTDEMIAQYTSALLAGTITSGWWFGAGAALQIPFAMQMAYRFNGIGVTQNVLYENQKLIANQFNSAIGKIQDSLSSTAPALGKLQDVVNQNAQALNTLVKQLSSNFGAISSVLNDILSRLDPPEAEVQIDRLITGRLQSLQTYVTQQLIRAAEIRWSANLAATKMSECVLGQSKRVDFCGKGYHLMSFPQSAPHGVVFLHVTYVPAQEKNFTTAPAICHDGKAHFPREGVFVSNGTHWFVTQRNFYEPQIITTDNTFVSGNCDVVIGIVNNTVYDPLQPELDSFKEELDKYFKNHTSPDVDLGDISGINASVVNIQKEIDRLNEVAKNLNESLIDLQELGKYEQYIKGGGSGGGQIYEGKLTAEGLRFGIVASRFNHALVDRLVEGAIDAIVRHGGREEDITLVRVPGSWEIPVAAGELARKEDIDAVIAIGVLIRGATPHFDYIASEVSKGLADLSLELRKPITFGVITADTLEQAIERAGTKHGNKGWEAALSAIEMANLFKSLR

SEQ ID NO: 3785 - protein, 1371 aa, Artificial Sequence
  SARS-CoV-2/Germany/BavPat3/2020__EPI_ISL_414521 spike protein (1-1211)(K986P_V987P_T887W_A1020W) LumSynth construct
MFVFLVLLPLVSSQCVNLTTRTQLPPAYTNSFTRGVYYPDKVFRSSVLHSTQDLFLPFFSNVTWFHAIHVSGTNGTKRFDNPVLPFNDGVYFASTEKSNIIRGWIFGTTLDSKTQSLLIVNNATNVVIKVCEFQFCNDPFLGVYYHKNNKSWMESEFRVYSSANNCTFEYVSQPFLMDLEGKQGNFKNLREFVFKNIDGYFKIYSKHTPINLVRDLPQGFSALEPLVDLPIGINITRFQTLLALHRSYLTPGDSSSGWTAGAAAYYVGYLQPRTFLLKYNENGTITDAVDCALDPLSETKCTLKSFTVEKGIYQTSNFRVQPTESIVRFPNITNLCPFGEVFNATRFASVYAWNRKRISNCVADYSVLYNSASFSTFKCYGVSPTKLNDLCFTNVYADSFVIRGDEVRQIAPGQTGKIADYNYKLPDDFTGCVIAWNSNNLDSKVGGNYNYLYRLFRKSNLKPFERDISTEIYQAGSTPCNGVEGFNCYFPLQSYGFQPTNGVGYQPYRVVVLSFELLHAPATVCGPKKSTNLVKNKCVNFNFNGLTGTGVLTESNKKFLPFQQFGRDIADTTDAVRDPQTLEILDITPCSFGGVSVITPGTNTSNQVAVLYQDVNCTEVPVAIHADQLTPTWRVYSTGSNVFQTRAGCLIGAEHVNNSYECDIPIGAGICASYQTQTNSPRRARSVASQSIIAYTMSLGAENSVAYSNNSIAIPTNFTISVTTEILPVSMTKTSVDCTMYICGDSTECSNLLLQYGSFCTQLNRALTGIAVEQDKNTQQVFAQVKQIYKTPPIKDFGGFNFSQILPDPSKPSKRSFIEDLLFNKVTLADAGFIKQYGDCLGDIAARDLICAQKFNGLTVLPPLLTDEMIAQYTSALLAGTITSGWWFGAGAALQIPFAMQMAYRFNGIGVTQNVLYENQKLIANQFNSAIGKIQDSLSSTASALGKLQDVVNQNAQALNTLVKQLSSNFGAISSVLNDILSRLDPPEAEVQIDRLITGRLQSLQTYVTQQLIRAAEIRWSANLAATKMSECVLGQSKRVDFCGKGYHLMSFPQSAPHGVVFLHVTYVPAQEKNFTTAPAICHDGKAHFPREGVFVSNGTHWFVTQRNFYEPQIITTDNTFVSGNCDVVIGIVNNTVYDPLQPELDSFKEELDKYFKNHTSPDVDLGDISGINASVVNIQKEIDRLNEVAKNLNESLIDLQELGKYEQYIKGGGSGGGQIYEGKLTAEGLRFGIVASRFNHALVDRLVEGAIDAIVRHGGREEDITLVRVPGSWEIPVAAGELARKEDIDAVIAIGVLIRGATPHFDYIASEVSKGLADLSLELRKPITFGVITADTLEQAIERAGTKHGNKGWEAALSAIEMANLFKSLR

SEQ ID NO: 3786 - protein, 1371 aa, Artificial Sequence
  SARS-CoV-2/France/HF1805/2020__EPI_ISL_414628 spike protein (1-1211)(K986P_V987P_T887W_A1020W) LumSynth construct
MFVFLVLLPLVSSQCVNLTTRTQLPPAYTNSFTRGVYYPDKVFRSSVLHSTQDLFLPFFSNVTWFHAIHVSGTNGTKRFDNPVLPFNDGVYFASTEKSNIIRGWIFGTTLDSKTQSLLIVNNATNVVIKVCEFQFCNDPFLGVYYHKNNKSWMESEFRVYSSANNCTFEYVSQPFLMDLEGKQGNFKNLREFVFKNIDGYFKIYSKHTPINLVRDLPQGFSALEPLVDLPIGINITRFQTLLALHRSYLTPGDSSSGWTAGAAAYYVGYLQPRTFLLKYNENGTITDAVDCALDPLSETKCTLKSFTVEKGIYQTSNFRVQPTESIVRFPNITNLCPFGEVFNATRFASVYAWNRKRISNCVADYSVLYNSASFSTFKCYGVSPTKLNDLCFTNVYADSFVIRGDEVRQIAPGQTGKIADYNYKLPDDFTGCVIAWNSNNLDSKVGGNYNYLYRLFRKSNLKPFERDISTEIYQAGSTPCNGVEGFNCYFPLQSYGFQPTNGVGYQPYRVVVLSFELLHAPATVCGPKKSTNLVKNKCVNFNFNGLTGTGVLTESNKKFLPFQQFGRDIADTTDAVRDPQTLEILDITPCSFGGVSVITPGTNTSNQVAVLYQGVNCTEVPVAIHADQLTPTWRVYSTGSNVFQTRAGCLIGAEHVNNSYECDIPIGAGICASYQTQTNSPRRARSVASQSIIAYTMSLGAENSVAYSNNSIAIPTNFTISVTTEILPVSMTKTSVDCTMYICGDSTECSNLLLQYGSFCTQLNRALTGIAVEQDKNTQEVFAQVKQIYKTPPIKDFGGFNFSQILPDPSKPSKRSFIEDLLFNKVTLADAGFIKQYGDCLGDIAARDLICAQKFNGLTVLPPLLTDEMIAQYTSALLAGTITSGWWFGAGAALQIPFAMQMAYRFNGIGVTQNVLYENQKLIANQFNSAIGKIQDSLSSTASALGKLQDVVNQNAQALNTLVKQLSSNFGAISSVLNDILSRLDPPEAEVQIDRLITGRLQSLQTYVTQQLIRAAEIRWSANLAATKMSECVLGQSKRVDFCGKGYHLMSFPQSAPHGVVFLHVTYVPAQEKNFTTAPAICHDGKAHFPREGVFVSNGTHWFVTQRNFYEPQIITTDNTFVSGNCDVVIGVVNNTVYDPLQPELDSFKEELDKYFKNHTSPDVDLGDISGINASVVNIQKEIDRLNEVAKNLNESLIDLQELGKYEQYIKGGGSGGGQIYEGKLTAEGLRFGIVASRFNHALVDRLVEGAIDAIVRHGGREEDITLVRVPGSWEIPVAAGELARKEDIDAVIAIGVLIRGATPHFDYIASEVSKGLADLSLELRKPITFGVITADTLEQAIERAGTKHGNKGWEAALSAIEMANLFKSLR

SEQ ID NO: 3787 - protein, 1371 aa, Artificial Sequence
  SARS-CoV-2/Netherlands/ZuidHolland_9/2020__EPI_ISL_414445 spike protein (1-1211)(K986P_V987P_T887W_A1020W) LumSynth construct
MFVFLVLLPLVSSQCVNLTTRTQLPPAYTNSFTRGVYYPDKVFRSSVLHSTQDLFLPFFSNVTWFHAIHVSGTNGTKRFDNPVLPFNDGVYFASTEKSNIIRGWIFGTTLDSKTQSLLIVNNATNVVIKVCEFQFCNDPFLGVYYHKNNKSWMESEFRVYSSANNCTFEYVSQPFLMDLEGKQGNFKNLREFVFKNIDGYFKIYSKHTPINLVRDLPQGFSALEPLVDLPIGINITRFQTLLALHRSYLTPGDSSSGWTAGAAAYYVGYLQPRTFLLKYNENGTITDAVDCALDPLSETKCTLKSFTVEKGIYQTSNFRVQPTESIVRFPNITNLCPFGEVFNATRFASVYAWNRKRISNCVADYSVLYNSASFSTFKCYGVSPTKLNDLCFTNVYADSFVIRGDEVRQIAPGQTGKIADYNYKLPDDFTGCVIAWNSNNLDSKVGGNYNYLYRLFRKSNLKPFERDISTEIYQAGSTPCNGVEGFNCYFPLQSYGFQPTNGVGYQPYRVVVLSFELLHAPATVCGPKKSTNLVKNKCVNFNFNGLTGTGVLTESNKKFLPFQQFGRDIADTTDAVRDPQTLEILDITPCSFGGVSVITPGTNTSNQVAVLYQGVNCTEVPVAIHADQLTPTWRVYSTGSNVFQTRAGCLIGAEHVNNSYECDIPIGAGICASYQTQTNSPRRARSVASQSIIAYTMSLGAENSVAYSNNSIAIPTNFTISVTTEILPVSMTKTSVDCTMYICGDSTECSNLLLQYGSFCTQLNRALTGIAVEQDKNTQEVFAQVKQIYKTPPIKDFGGFNFSQILPDPSKPSKRSFIEDLLFNKVTLADAGFIKQYGDCLGDIAARDLICVQKFNGLTVLPPLLTDEMIAQYTSALLAGTITSGWWFGAGAALQIPFAMQMAYRFNGIGVTQNVLYENQKLIANQFNSAIGKIQDSLSSTASALGKLQDVVNQNAQALNTLVKQLSSNFGAISSVLNDILSRLDPPEAEVQIDRLITGRLQSLQTYVTQQLIRAAEIRWSANLAATKMSECVLGQSKRVDFCGKGYHLMSFPQSAPHGVVFLHVTYVPAQEKNFTTAPAICHDGKAHFPREGVFVSNGTHWFVTQRNFYEPQIITTDNTFVSGNCDVVIGIVNNTVYDPLQPELDSFKEELDKYFKNHTSPDVDLGDISGINASVVNIQKEIDRLNEVAKNLNESLIDLQELGKYEQYIKGGGSGGGQIYEGKLTAEGLRFGIVASRFNHALVDRLVEGAIDAIVRHGGREEDITLVRVPGSWEIPVAAGELARKEDIDAVIAIGVLIRGATPHFDYIASEVSKGLADLSLELRKPITFGVITADTLEQAIERAGTKHGNKGWEAALSAIEMANLFKSLR

SEQ ID NO: 3788 - protein, 1371 aa, Artificial Sequence
  SARS-CoV-2/Finland/FIN03032020A/2020__EPI_ISL_413602 spike protein (1-1211)(K986P_V987P_T887W_A1020W) LumSynth construct
MFVFLVLLPLVSSQCVNLTTRTQLPPAYTNSFTRGVYYPDKVFRSSVLHSTQDLFLPFFSNVTWFHAIHVSGTNGTKRFDNPVLPFNDGVYFASTEKSNIIRGWIFGTTLDSKTQSLLIVNNATNVVIKVCEFQFCNDPFLGVYYHKNNKSWMESEFRVYSSANNCTFEYVSQPFLMDLEGKQGNFKNLREFVFKNIDGYFKIYSKHTPINLVRDLPQGFSALEPLVDLPIGINITRFQTLLALHRSYLTPGDSSSGWTAGAAAYYVGYLQPRTFLLKYNENGTITDAVDCALDPLSETKCTLKSFTVEKGIYQTSNFRVQPTESIVRFPNITNLCPFGEVFNATRFASVYAWNRKRISNCVADYSVLYNSASFSTFKCYGVSPTKLNDLCFTNVYADSFVIRGDEVRQIAPGQTGKIADYNYKLPDDFTGCVISWNSNNLDSKVGGNYNYLYRLFRKSNLKPFERDISTEIYQAGSTPCNGVEGFNCYFPLQSYGFQPTNGVGYQPYRVVVLSFELLHAPATVCGPKKSTNLVKNKCVNFNFNGLTGTGVLTESNKKFLPFQQFGRDIADTTDAVRDPQTLEILDITPCSFGGVSVITPGTNTSNQVAVLYQGVNCTEVPVAIHADQLTPTWRVYSTGSNVFQTRAGCLIGAEHVNNSYECDIPIGAGICASYQTQTNSPRRARSVASQSIIAYTMSLGAENSVAYSNNSIAIPTNFTISVTTEILPVSMTKTSVDCTMYICGDSTECSNLLLQYGSFCTQLNRALTGIAVEQDKNTQEVFAQVKQIYKTPPIKDFGGFNFSQILPDPSKPSKRSFIEDLLFNKVTLADAGFIKQYGDCLGDIAARDLICAQKFNGLTVLPPLLTDEMIAQYTSALLAGTITSGWWFGAGAALQIPFAMQMAYRFNGIGVTQNVLYENQKLIANQFNSAIGKIQDSLSSTASALGKLQDVVNQNAQALNTLVKQLSSNFGAISSVLNDILSRLDPPEAEVQIDRLITGRLQSLQTYVTQQLIRAAEIRWSANLAATKMSECVLGQSKRVDFCGKGYHLMSFPQSAPHGVVFLHVTYVPAQEKNFTTAPAICHDGKAHFPREGVFVSNGTHWFVTQRNFYEPQIITTDNTFVSGNCDVVIGIVNNTVYDPLQPELDSFKEELDKYFKNHTSPDVDLGDISGINASVVNIQKEIDRLNEVAKNLNESLIDLQELGKYEQYIKGGGSGGGQIYEGKLTAEGLRFGIVASRFNHALVDRLVEGAIDAIVRHGGREEDITLVRVPGSWEIPVAAGELARKEDIDAVIAIGVLIRGATPHFDYIASEVSKGLADLSLELRKPITFGVITADTLEQAIERAGTKHGNKGWEAALSAIEMANLFKSLR

SEQ ID NO: 3789 - protein, 1371 aa, Artificial Sequence
  SARS-CoV-2/France/GE1977/2020__EPI_ISL_414632 spike protein (1-1211)(K986P_V987P_T887W_A1020W) LumSynth construct
MFVFLVLLPLVSSQCVNLTTRTQLPPAYTNSFTRGVYYPDKVFRSSVLHSTQDLFLPFFSNVTWFHAIHVSGTNGTKRFDNPVLPFNDGVYFASTEKSNIIRGWIFGTTLDSKTQSLLIVNNATNVVIKVCEFQFCNDPFLGVYYHKNNKSWMESEFRVYSSANNCTFEYVSQPFLMDLEGKQGNFKNLREFVFKNIDGYFKIYSKHTPINLVRDLPQGFSALEPLVDLPIGINITRFQTLLALHRSYLTPGDSSSGWTAGAAAYYVGYLQPRTFLLKYNENGTITDAVDCALDPLSETKCTLKSFTVEKGIYQTSNFRVQPTESIVRFPNITNLCPFGEVFNATRFASVYAWNRKRISNCVADYSVLYNSASFSTFKCYGVSPTKLNDLCFTNVYADSFVIRGDEVRQIAPGQTGKIADYNYKLPDDFTGCVIAWNSNNLDSKVGGNYNYLYRLFRKSNLKPFERDISTEIYQAGSTPCNGVEGFNCYFPLQSYGFQPTNGVGYQPYRVVVLSFELLHAPATVCGPKKSTNLVKNKCVNFNFNGLTGTGVLTESNKKFLPFQQFGRDIADTTDAVRDPQTLEILDITPCSFGGVSVITPGTNTSNQVAVLYQGVNCTEVPVAIHADQLTPTWRVYSTGSNVFQTRAGCLIGAEHVNNSYECDIPIGAGICASYQTQTNSPRRARSVASQSIIAYTMSLGAENSVAYSNNSIAIPTNFTISVTTEILPVSMTKTSVDCTMYICGDSTECSNLLLQYGSFCTQLNRALTGIAVEQDKNTQEVFAQVKQIYKTPPIKDFGGFNFSQILPDPSKPSKRSFIEDLLFNKVTLADAGFIKQYGDCLGDIAARDLICAQKFNGLTVLPPLLTDEMIAQYTSALLAGTITSGWWFGAGAALQIPFAMQMAYRFNGIGVTQNVLYENQKLIANQFNSAIGKIQDSLFSTASALGKLQDVVNQNAQALNTLVKQLSSNFGAISSVLNDILSRLDPPEAEVQIDRLITGRLQSLQTYVTQQLIRAAEIRWSANLAATKMSECVLGQSKRVDFCGKGYHLMSFPQSAPHGVVFLHVTYVPAQEKNFTTAPAICHDGKAHFPREGVFVSNGTHWFVTQRNFYEPQIITTDNTFVSGNCDVVIGIVNNTVYDPLQPELDSFKEELDKYFKNHTSPDVDLGDISGINASVVNIQKEIDRLNEVAKNLNESLIDLQELGKYEQYIKGGGSGGGQIYEGKLTAEGLRFGIVASRFNHALVDRLVEGAIDAIVRHGGREEDITLVRVPGSWEIPVAAGELARKEDIDAVIAIGVLIRGATPHFDYIASEVSKGLADLSLELRKPITFGVITADTLEQAIERAGTKHGNKGWEAALSAIEMANLFKSLR

SEQ ID NO: 3790 - protein, 1371 aa, Artificial Sequence
  SARS-CoV-2/Finland/FIN-313/2020__EPI_ISL_414641 spike protein (1-1211)(K986P_V987P_T887W_A1020W) LumSynth construct
MFVFLVLLPLVSSQCVNLTTRTQLPPAYTNSFTRGVYYPDKVFRSSVLHSTQDLFLPFFSNVTWFHAIHVSGTNGTKRFDNPVLPFNDGVYFASTEKSNIIRGWIFGTTLDSKTQSLLIVNNATNVVIKVCEFQFCNDPFLGVYYHKNNKSWMESEFRVYSSANNCTFEYVSQPFLMDLEGKQGNFKNLREFVFKNIDGYFKIYSKHTPINLVRDLPQGFSALEPLVDLPIGINITRFKTLLALHRSYLTPGDSSSGWTAGAAAYYVGYLQPRTFLLKYNENGTITDAVDCALDPLSETKCTLKSFTVEKGIYQTSNFRVQPTESIVRFPNITNLCPFGEVFNATRFASVYAWNRKRISNCVADYSVLYNSASFSTFKCYGVSPTKLNDLCFTNVYADSFVIRGDEVRQIAPGQTGKIADYNYKLPDDFTGCVIAWNSNNLDSKVGGNYNYLYRLFRKSNLKPFERDISTEIYQAGSTPCNGVEGFNCYFPLQSYGFQPTNGVGYQPYRVVVLSFELLHAPATVCGPKKSTNLVKNKCVNFNFNGLTGTGVLTESNKKFLPFQQFGRDIADTTDAVRDPQTLEILDITPCSFGGVSVITPGTNTSNQVAVLYQGVNCTEVPVAIHADQLTPTWRVYSTGSNVFQTRAGCLIGAEHVNNSYECDIPIGAGICASYQTQTNSPRRARSVASQSIIAYTMSLGAENSVAYSNNSIAIPTNFTISVTTEILPVSMTKTSVDCTMYICGDSTECSNLLLQYGSFCTQLNRALTGIAVEQDKNTQEVFAQVKQIYKTPPIKDFGGFNFSQILPDPSKPSKRSFIEDLLFNKVTLADAGFIKQYGDCLGDIAARDLICAQKFNGLTVLPPLLTDEMIAQYTSALLAGTITSGWWFGAGAALQIPFAMQMAYRFNGIGVTQNVLYENQKLIANQFNSAIGKIQDSLSSTASALGKLQDVVNQNAQALNTLVKQLSSNFGAISSVLNDILSRLDPPEAEVQIDRLITGRLQSLQTYVTQQLIRAAEIRWSANLAATKMSECVLGQSKRVDFCGKGYHLMSFPQSAPHGVVFLHVTYVPAQEKNFTTAPAICHDGKAHFPREGVFVSNGTHWFVTQRNFYEPQIITTDNTFVSGNCDVVIGIVNNTVYDPLQPELDSFKEELDKYFKNHTSPDVDLGDISGINASVVNIQKEIDRLNEVAKNLNESLIDLQELGKYEQYIKGGGSGGGQIYEGKLTAEGLRFGIVASRFNHALVDRLVEGAIDAIVRHGGREEDITLVRVPGSWEIPVAAGELARKEDIDAVIAIGVLIRGATPHFDYIASEVSKGLADLSLELRKPITFGVITADTLEQAIERAGTKHGNKGWEAALSAIEMANLFKSLR

SEQ ID NO: 3791 - protein, 1371 aa, Artificial Sequence
  SARS-CoV-2/Netherlands/ZuidHolland_2/2020__EPI_ISL_414556 spike protein (1-1211)(K986P_V987P_T887W_A1020W) LumSynth construct
MFVFLVLLPLVSSQCVNLTTRTQLPPAYTNSFTRGVYYPDKVFRSSVLHSTQDLFLPFFSNVTWFHAIHVSGTNGTKRFDNPVLPFNDGVYFASTEKSNIIRGWIFGTTLDSKTQSLLIVNNATNVVIKVCEFQFCNDPFLGVYYHKNNKSWMESEFRVYSSANNCTFEYVSQPFLMDLEGKQGNFKNLREFVFKNIDGYFKIYSKHTPINLVRDLPQGFSALEPLVDLPIGINITRFQTLLALHRSYLTPGDSSSGWTAGAAAYYVGYLQPRTFLLKYNENGTITDAVDCALDPLSETKCTLKSFTVEKGIYQTSNFRVQPTESIVRFPNITNLCPFGEVFNATRFASVYAWNRKRISNCVADYSVLYNSASFSTFKCYGVSPTKLNDLCFTNVYADSFVIRGDEVRQIAPGQTGKIADYNYKLPDDFTGCVIAWNSNNLDSKVGGNYNYLYRLFRKSNLKPFERDISTEIYQAGSTPCNGVEGFNCYFPLQSYGFQPTNGVGYQPYRVVVLSFELLHAPATVCGPKKSTNLVKNKCVNFNFNGLTGTGVLTESNKKFLPFQQFGRDIADTTDAVRDPQTLEILDITPCSFGGVSVITPGTNTSNQVAVLYQGVNCTEVPVAIHADQLTPTWRVYSTGSNVFQTRAGCLIGAEHVNNSYECDIPIGAGICASYQTQTNSPRRARSVASQSIIAYTMSLGAENSVAYSNNSIAIPTNFTISVTTEILPVSMTKTSVDCTMYICGDSTECSNLLLQYGSFCTQLNRALTGIALEQDKNTQEVFAQVKQIYKTPPIKDFGGFNFSQILPDPSKPSKRSFIEDLLFNKVTLADAGFIKQYGDCLGDIAARDLICAQKFNGLTVLPPLLTDEMIAQYTSALLAGTITSGWWFGAGAALQIPFAMQMAYRFNGIGVTQNVLYENQKLIANQFNSAIGKIQDSLSSTASALGKLQDVVNQNAQALNTLVKQLSSNFGAISSVLNDILSRLDPPEAEVQIDRLITGRLQSLQTYVTQQLIRAAEIRWSANLAATKMSECVLGQSKRVDFCGKGYHLMSFPQSAPHGVVFLHVTYVPAQEKNFTTAPAICHDGKAHFPREGVFVSNGTHWFVTQRNFYEPQIITTDNTFVSGNCDVVIGIVNNTVYDPLQPELDSFKEELDKYFKNHTSPDVDLGDISGINASVVNIQKEIDRLNEVAKNLNESLIDLQELGKYEQYIKGGGSGGGQIYEGKLTAEGLRFGIVASRFNHALVDRLVEGAIDAIVRHGGREEDITLVRVPGSWEIPVAAGELARKEDIDAVIAIGVLIRGATPHFDYIASEVSKGLADLSLELRKPITFGVITADTLEQAIERAGTKHGNKGWEAALSAIEMANLFKSLR

SEQ ID NO: 3792 - protein, 1371 aa, Artificial Sequence
  SARS-CoV-2/USA/WA-UW31/2020__EPI_ISL_414618 spike protein (1-1211)(K986P_V987P_T887W_A1020W) LumSynth construct
MFVFLVLLPLVSSQCVNLTTRTQLPPAYTNSFTRGVYYPDKVFRSSVLHSTQDLFLPFFSNVTWFHAIHVSGTNGTKRFDNPVLPFNDGVYFASTEKSNIIRGWIFGTTLDSKTQSLLIVNNATNVVIKVCEFQFCNDPFLGVYYHKNNKSWMESEFRVYSSANNCTFEYVSQPFLMDLEGKQGNFKNLREFVFKNIDGYFKIYSKHTPINLVRDLPQGFSALEPLVDLPIGINITRFQTLLALHRSYLTPGDSSSGWTAGAAAYYVGYLQPRTFLLKYNENGTITDAVDCALDPLSETKCTLKSFTVEKGIYQTSNFRVQPTESIVRFPNITNLCPFGEVFNATRFASVYAWNRKRISNCVADYSVLYNSASFSTFKCYGVSPTKLNDLCFTNVYADSFVIRGDEVRQIAPGQTGKIADYNYKLPDDFTGCVIAWNSNNLDSKVGGNYNYLYRLFRKSNLKPFERDISTEIYQAGSTPCNGAEGFNCYFPLQSYGFQPTNGVGYQPYRVVVLSFELLHAPATVCGPKKSTNLVKNKCVNFNFNGLTGTGVLTESNKKFLPFQQFGRDIADTTDAVRDPQTLEILDITPCSFGGVSVITPGTNTSNQVAVLYQDVNCTEVPVAIHADQLTPTWRVYSTGSNVFQTRAGCLIGAEHVNNSYECDIPIGAGICASYQTQTNSPRRARSVASQSIIAYTMSLGAENSVAYSNNSIAIPTNFTISVTTEILPVSMTKTSVDCTMYICGDSTECSNLLLQYGSFCTQLNRALTGIAVEQDKNTQEVFAQVKQIYKTPPIKDFGGFNFSQILPDPSKPSKRSFIEDLLFNKVTLADAGFIKQYGDCLGDIAARDLICAQKFNGLTVLPPLLTDEMIAQYTSALLAGTITSGWWFGAGAALQIPFAMQMAYRFNGIGVTQNVLYENQKLIANQFNSAIGKIQDSLSSTASALGKLQDVVNQNAQALNTLVKQLSSNFGAISSVLNDILSRLDPPEAEVQIDRLITGRLQSLQTYVTQQLIRAAEIRWSANLAATKMSECVLGQSKRVDFCGKGYHLMSFPQSAPHGVVFLHVTYVPAQEKNFTTAPAICHDGKAHFPREGVFVSNGTHWFVTQRNFYEPQIITTDNTFVSGNCDVVIGIVNNTVYDPLQPELDSFKEELDKYFKNHTSPDVDLGDISGINASVVNIQKEIDRLNEVAKNLNESLIDLQELGKYEQYIKGGGSGGGQIYEGKLTAEGLRFGIVASRFNHALVDRLVEGAIDAIVRHGGREEDITLVRVPGSWEIPVAAGELARKEDIDAVIAIGVLIRGATPHFDYIASEVSKGLADLSLELRKPITFGVITADTLEQAIERAGTKHGNKGWEAALSAIEMANLFKSLR

SEQ ID NO: 3793 - protein, 1371 aa, Artificial Sequence
  SARS-CoV-2/South Korea/SNU01/2020__EPI_ISL_411929 spike protein (1-1211)(K986P_V987P_T887W_A1020W) LumSynth construct
MFVFLVLLPLVSSQCVNLTTRTQLPPAYTNSFTRGVYYPDKVFRSSVLHSTQDLFLPFFSNVTWFHAIHVSGTNGTKRFDNPVLPFNDGVYFASTEKSNIIRGWIFGTTLDSKTQSLLIVNNATNVVIKVCEFQFCNDPFLGVYYHKNNKSWMESEFRVYSSANNCTFEYVSQPFLMDLEGKQGNFKNLREFVFKNIDGYFKIYSKHTPINLVRDLPQGFWALEPLVDLPIGINITRFQTLLALHRSYLTPGDSSSGWTAGAAAYYVGYLQPRTFLLKYNENGTITDAVDCALDPLSETKCTLKSFTVEKGIYQTSNFRVQPTESIVRFPNITNLCPFGEVFNATRFASVYAWNRKRISNCVADYSVLYNSASFSTFKCYGVSPTKLNDLCFTNVYADSFVIRGDEVRQIAPGQTGKIADYNYKLPDDFTGCVIAWNSNNLDSKVGGNYNYLYRLFRKSNLKPFERDISTEIYQAGSTPCNGVEGFNCYFPLQSYGFQPTNGVGYQPYRVVVLSFELLHAPATVCGPKKSTNLVKNKCVNFNFNGLTGTGVLTESNKKFLPFQQFGRDIADTTDAVRDPQTLEILDITPCSFGGVSVITPGTNTSNQVAVLYQDVNCTEVPVAIHADQLTPTWRVYSTGSNVFQTRAGCLIGAEHVNNSYECDIPIGAGICASYQTQTNSPRRARSVASQSIIAYTMSLGAENSVAYSNNSIAIPTNFTISVTTEILPVSMTKTSVDCTMYICGDSTECSNLLLQYGSFCTQLNRALTGIAVEQDKNTQEVFAQVKQIYKTPPIKDFGGFNFSQILPDPSKPSKRSFIEDLLFNKVTLADAGFIKQYGDCLGDIAARDLICAQKFNGLTVLPPLLTDEMIAQYTSALLAGTITSGWWFGAGAALQIPFAMQMAYRFNGIGVTQNVLYENQKLIANQFNSAIGKIQDSLSSTASALGKLQDVVNQNAQALNTLVKQLSSNFGAISSVLNDILSRLDPPEAEVQIDRLITGRLQSLQTYVTQQLIRAAEIRWSANLAATKMSECVLGQSKRVDFCGKGYHLMSFPQSAPHGVVFLHVTYVPAQEKNFTTAPAICHDGKAHFPREGVFVSNGTHWFVTQRNFYEPQIITTDNTFVSGNCDVVIGIVNNTVYDPLQPELDSFKEELDKYFKNHTSPDVDLGDISGINASVVNIQKEIDRLNEVAKNLNESLIDLQELGKYEQYIKGGGSGGGQIYEGKLTAEGLRFGIVASRFNHALVDRLVEGAIDAIVRHGGREEDITLVRVPGSWEIPVAAGELARKEDIDAVIAIGVLIRGATPHFDYIASEVSKGLADLSLELRKPITFGVITADTLEQAIERAGTKHGNKGWEAALSAIEMANLFKSLR

SEQ ID NO: 3794 - protein, 1371 aa, Artificial Sequence
  SARS-CoV-2/China/WF0004/2020__EPI_ISL_413694 spike protein (1-1211)(K986P_V987P_T887W_A1020W) LumSynth construct
MFVFLVLLPLVSSQCVNLTTRTQLPPAYTNSFTRGVYYPDKVFRSSVLHSTQDLFLPFFSNVTWFHAIHVSGTNGTKRFDNPVLPFNDGVYFASTEKSNIIRGWIFGTTLDSKTQSLLIVNNATNVVIKVCEFQFCNDPFLGVYYHKNNKSWTESEFRVYSSANNCTFEYVSQPFLMDLEGKQGNFKNLREFVFKNIDGYFKIYSKHTPINLVRDLPQGFSALEPLVDLPIGINITRFQTLLALHRSYLTPGDSSSGWTAGAAAYYVGYLQPRTFLLKYNENGTITDAVDCALDPLSETKCTLKSFTVEKGIYQTSNFRVQPTESIVRFPNITNLCPFGEVFNATRFASVYAWNRKRISNCVADYSVLYNSASFSTFKCYGVSPTKLNDLCFTNVYADSFVIRGDEVRQIAPGQTGKIADYNYKLPDDFTGCVIAWNSNNLDSKVGGNYNYLYRLFRKSNLKPFERDISTEIYQAGSTPCNGVEGFNCYFPLQSYGFQPTNGVGYQPYRVVVLSFELLHAPATVCGPKKSTNLVKNKCVNFNFNGLTGTGVLTESNKKFLPFQQFGRDIADTTDAVRDPQTLEILDITPCSFGGVSVITPGTNTSNQVAVLYQDVNCTEVPVAIHADQLTPTWRVYSTGSNVFQTRAGCLIGAEHVNNSYECDIPIGAGICASYQTQTNSPRRARSVASQSIIAYTMSLGAENSVAYSNNSIAIPTNFTISVTTEILPVSMTKTSVDCTMYICGDSTECSNLLLQYGSFCTQLNRALTGIAVEQDKNTQEVFAQVKQIYKTPPIKDFGGFNFSQILPDPSKPSKRSFIEDLLFNKVTLADAGFIKQYGDCLGDIAARDLICAQKFNGLTVLPPLLTDEMIAQYTSALLAGTITSGWWFGAGAALQIPFAMQMAYRFNGIGVTQNVLYENQKLIANQFNSAIGKIQDSLSSTASALGKLQDVVNQNAQALNTLVKQLSSNFGAISSVLNDILSRLDPPEAEVQIDRLITGRLQSLQTYVTQQLIRAAEIRWSANLAATKMSECVLGQSKRFDFCGKGYHLMSFPQSAPHGVVFLHVTYVPAQEKNFTTAPAICHDGKAHFPREGVFVSNGTHWFVTQRNFYEPQIITTDNTFVSGNCDVVIGIVNNTVYDPLQPELDSFKEELDKYFKNHTSPDVDLGDISGINASVVNIQKEIDRLNEVAKNLNESLIDLQELGKYEQYIKGGGSGGGQIYEGKLTAEGLRFGIVASRFNHALVDRLVEGAIDAIVRHGGREEDITLVRVPGSWEIPVAAGELARKEDIDAVIAIGVLIRGATPHFDYIASEVSKGLADLSLELRKPITFGVITADTLEQAIERAGTKHGNKGWEAALSAIEMANLFKSLR

SEQ ID NO: 3795 - protein, 1371 aa, Artificial Sequence
  SARS-CoV-2/China/WF0028/2020__EPI_ISL_413791 spike protein (1-1211)(K986P_V987P_T887W_A1020W) LumSynth construct
MFVFLVLLPLVSSQCVNLTTRTQLPPAYTNSFTRGVYYPDKVFRSSVLHSTQDLFLPFFSNVTWFHAIHVSGTNGTKRFDNPVLPFNDGVYFASTEKSNIIRGWIFGTTLDSKTQSLLIVNNATNVVIKVCEFQFCNDPFLGVYYHKNNKSWMESEFRVYSSANNCTFEYVSQPFLMDLEGKQGNFKNLREFVFKNIDGYFKIYSKHTPINLVRDLPQGFSALEPLVDLPIGINITRFQTLLALHRSYLTPGDSSSGWTAGAAAYYVGYLQPRTFLLKYNENGTITDAVDCALDPLSETKCTLKSFTVEKGIYQTSNFRVQPTESIVRFPNITNLCPFGEVFNATRFASVYAWNRKRISNCVADYSVLYNSASFSTFKCYGVSPTKLNDLCFTNVYADSFVIRGDEVRQIAPGQTGKIADYNYKLPDDFTGCVIAWNSNNLDSKVGGNYNYLYRLFRKSNLKPFERDISTEIYQAGSTPCNGVEGFNCYFPLQSYGFQPTNGVGYQPYRVVVLSFELLHAPATVCGPKKSTNLVKNKCVNFNFNGLTGTGVLTESNKKFLPFQQFGRDIADTTDAVRDPQTLEILDITPCSFGGVSVITPGTNTSNQVAVLYQDVNCTEVPVAIHADQLTPTWRVYSTGSNVFQTRAGCLIGAEHVNNSYECDIPIGAGICASYQTQTNSPRRARSVASQSIIAYTMSLGAENSVAYSNNSIAIPTNFTISVTTEILPVSMTKTSVDCTMYICGDSTECSNLLLQYGSFCTQLNRALTGIAVEQDKNTQEVFAQVKQIYKTPPIKDFGGFNFSQILPDPSKPSKRSFIEDLLFNKVTLADAGFIKQYGDCLGDIAARDLICAQKFNGLTVLPPLLTDEMIAQYTSALLAGTITSGWWFGAGAALQIPFAMQMAYRFNGIGVTQNVLYENQKLIANQFNSAIGKIQDSLSSTASALGKLQDVVNQNAQALNTLVKQLSSNFGAISSVLNDILSRLDPPEAEVQIDRLITGRLQSLQTYVTQQLIRAAEIRWSANLAATKMSECVLGQSKRVDFCGKGYHLMSFPQSAPHGVVFLHVTYVPAQEKNFTTAPAICHDGKAHFPREGVFVSNGTHWFVTQRNFYEPQIITTDNTFVSGNCDVVIGIVNNTVYDPLQPELESFKEELDKYFKNHTSPDVDLGDISGINASVVNIQKEIDRLNEVAKNLNESLIDLQELGKYEQYIKGGGSGGGQIYEGKLTAEGLRFGIVASRFNHALVDRLVEGAIDAIVRHGGREEDITLVRVPGSWEIPVAAGELARKEDIDAVIAIGVLIRGATPHFDYIASEVSKGLADLSLELRKPITFGVITADTLEQAIERAGTKHGNKGWEAALSAIEMANLFKSLR

SEQ ID NO: 3796 - protein, 1371 aa, Artificial Sequence
  SARS-CoV-2/2019-nCoV/USA-CruiseA-18/2020__MT159716.1 spike protein (1-1211)(K986P_V987P_T887W_A1020W) LumSynth construct
MFVFLVLLPLVSSQCVNLTTRTQLPPAYTNSFTRGVYYPDKVFRSSVLHSTQDLFLPFFSNVTWFHAIHVSGTNGTKRFDNPVLPFNDGVYFASTEKSNIIRGWIFGTTLDSKTQSLLIVNNATNVVIKVCEFQFCNDPFLGVYYHKNNKSWMESELRVYSSANNCTFEYVSQPFLMDLEGKQGNFKNLREFVFKNIDGYFKIYSKHTPINLVRDLPQGFSALEPLVDLPIGINITRFQTLLALHRSYLTPGDSSSGWTAGAAAYYVGYLQPRTFLLKYNENGTITDAVDCALDPLSETKCTLKSFTVEKGIYQTSNFRVQPTESIVRFPNITNLCPFGEVFNATRFASVYAWNRKRISNCVADYSVLYNSASFSTFKCYGVSPTKLNDLCFTNVYADSFVIRGDEVRQIAPGQTGKIADYNYKLPDDFTGCVIAWNSNNLDSKVGGNYNYLYRLFRKSNLKPFERDISTEIYQAGSTPCNGVEGFNCYFPLQSYGFQPTNGVGYQPYRVVVLSFELLHAPATVCGPKKSTNLVKNKCVNFNFNGLTGTGVLTESNKKFLPFQQFGRDIADTTDAVRDPQTLEILDITPCSFGGVSVITPGTNTSNQVAVLYQDVNCTEVPVAIHADQLTPTWRVYSTGSNVFQTRAGCLIGAEHVNNSYECDIPIGAGICASYQTQTNSPRRARSVASQSIIAYTMSLGAENSVAYSNNSIAIPTNFTISVTTEILPVSMTKTSVDCTMYICGDSTECSNLLLQYGSFCTQLNRALTGIAVEQDKNTQEVFAQVKQIYKTPPIKDFGGFNFSQILPDPSKPSKRSFIEDLLFNKVTLADAGFIKQYGDCLGDIAARDLICAQKFNGLTVLPPLLTDEMIAQYTSALLAGTITSGWWFGAGAALQIPFAMQMAYRFNGIGVTQNVLYENQKLIANQFNSAIGKIQDSLSSTASALGKLQDVVNQNAQALNTLVKQLSSNFGAISSVLNDILSRLDPPEAEVQIDRLITGRLQSLQTYVTQQLIRAAEIRWSANLAATKMSECVLGQSKRVDFCGKGYHLMSFPQSAPHGVVFLHVTYVPAQEKNFTTAPAICHDGKAHFPREGVFVSNGTHWFVTQRNFYEPQIITTDNTFVSGNCDVVIGIVNNTVYDPLQPELDSFKEELDKYFKNHTSPDVDLGDISGINASVVNIQKEIDRLNEVAKNLNESLIDLQELGKYEQYIKGGGSGGGQIYEGKLTAEGLRFGIVASRFNHALVDRLVEGAIDAIVRHGGREEDITLVRVPGSWEIPVAAGELARKEDIDAVIAIGVLIRGATPHFDYIASEVSKGLADLSLELRKPITFGVITADTLEQAIERAGTKHGNKGWEAALSAIEMANLFKSLR

SEQ ID NO: 3797 - protein, 1371 aa, Artificial Sequence
  SARS-CoV-2/SARS-CoV-2/Yunnan-01/human/2020/CHN__MT049951.1 spike protein (1-1211)(K986P_V987P_T887W_A1020W) LumSynth construct
MFVFLVLLPLVSSQCVNLTTRTQLPPANTNSFTRGVYYPDKVFRSSVLHSTQDLFLPFFSNVTWFHAIHVSGTNGTKRFDNPVLPFNDGVYFASTEKSNIIRGWIFGTTLDSKTQSLLIVNNATNVVIKVCEFQFCNDPFLGVYYHKNNKSWMESEFRVYSSANNCTFEYVSQPFLMDLEGKQGNFKNLREFVFKNIDGYFKIYSKHTPINLVRDLPQGFSALEPLVDLPIGINITRFQTLLALHRSYLTPGDSSSGWTAGAAAYYVGYLQPRTFLLKYNENGTITDAVDCALDPLSETKCTLKSFTVEKGIYQTSNFRVQPTESIVRFPNITNLCPFGEVFNATRFASVYAWNRKRISNCVADYSVLYNSASFSTFKCYGVSPTKLNDLCFTNVYADSFVIRGDEVRQIAPGQTGKIADYNYKLPDDFTGCVIAWNSNNLDSKVGGNYNYLYRLFRKSNLKPFERDISTEIYQAGSTPCNGVEGFNCYFPLQSYGFQPTNGVGYQPYRVVVLSFELLHAPATVCGPKKSTNLVKNKCVNFNFNGLTGTGVLTESNKKFLPFQQFGRDIADTTDAVRDPQTLEILDITPCSFGGVSVITPGTNTSNQVAVLYQDVNCTEVPVAIHADQLTPTWRVYSTGSNVFQTRAGCLIGAEHVNNSYECDIPIGAGICASYQTQTNSPRRARSVASQSIIAYTMSLGAENSVAYSNNSIAIPTNFTISVTTEILPVSMTKTSVDCTMYICGDSTECSNLLLQYGSFCTQLNRALTGIAVEQDKNTQEVFAQVKQIYKTPPIKDFGGFNFSQILPDPSKPSKRSFIEDLLFNKVTLADAGFIKQYGDCLGDIAARDLICAQKFNGLTVLPPLLTDEMIAQYTSALLAGTITSGWWFGAGAALQIPFAMQMAYRFNGIGVTQNVLYENQKLIANQFNSAIGKIQDSLSSTASALGKLQDVVNQNAQALNTLVKQLSSNFGAISSVLNDILSRLDPPEAEVQIDRLITGRLQSLQTYVTQQLIRAAEIRWSANLAATKMSECVLGQSKRVDFCGKGYHLMSFPQSAPHGVVFLHVTYVPAQEKNFTTAPAICHDGKAHFPREGVFVSNGTHWFVTQRNFYEPQIITTDNTFVSGNCDVVIGIVNNTVYDPLQPELDSFKEELDKYFKNHTSPDVDLGDISGINASVVNIQKEIDRLNEVAKNLNESLIDLQELGKYEQYIKGGGSGGGQIYEGKLTAEGLRFGIVASRFNHALVDRLVEGAIDAIVRHGGREEDITLVRVPGSWEIPVAAGELARKEDIDAVIAIGVLIRGATPHFDYIASEVSKGLADLSLELRKPITFGVITADTLEQAIERAGTKHGNKGWEAALSAIEMANLFKSLR

SEQ ID NO: 3798 - protein, 1371 aa, Artificial Sequence
  SARS-CoV-2/USA/WA-UW292/2020__EPI_ISL_418077 spike protein (1-1211)(K986P_V987P_T887W_A1020W) LumSynth construct
MFVFLVLLPLVSSQCVNLTTRTQLPPAYTNSFTRGVYYPDKVFRSSVLHSTQDLFLPFFSNVTWFHAIHVSGTNGTKRFDNPVLPFNDGVYFASTEKSNIIRGWIFGTTLDSKTQSLLIVNNATNVVIKVCEFQFCNDPFLGVYYHKNNKSWMESEFRVYSSANNCTFEYVSQPFLMDLEGKQGNFKNLREFVFKNIDGYFKIYSKHTPINLVRDLPQGFSALEPLVDLPIGINITRFQTLLALHRSYLTPGDSSSGWTAGAAAYYVGYLQPRTFLLKYNENGTITDAVDCALDPLSETKCTLKSFTVEKGIYQTSNFRVQPTESIVRFPNITNLCPFGEVFNATRFASVYAWNRKRISNCVADYSVLYNSASFSTFKCYGVSPTKLNDLCFTNVYADSFVIRGDEVRQIAPGQTGKIADYNYKLPDDFTGCVIAWNSNNLDSKVGGNYNYLYRLFRKSNLKPFERDISTEIYQASSTPCNGVEGFNCYFPLQSYGFQPTNGVGYQPYRVVVLSFELLHAPATVCGPKKSTNLVKNKCVNFNFNGLTGTGVLTESNKKFLPFQQFGRDIADTTDAVRDPQTLEILDITPCSFGGVSVITPGTNTSNQVAVLYQDVNCTEVPVAIHADQLTPTWRVYSTGSNVFQTRAGCLIGAEHVNNSYECDIPIGAGICASYQTQTNSPRRARSVASQSIIAYTMSLGAENSVAYSNNSIAIPTNFTISVTTEILPVSMTKTSVDCTMYICGDSTECSNLLLQYGSFCTQLNRALTGIAVEQDKNTQEVFAQVKQIYKTPPIKDFGGFNFSQILPDPSKPSKRSFIEDLLFNKVTLADAGFIKQYGDCLGDIAARDLICAQKFNGLTVLPPLLTDEMIAQYTSALLAGTITSGWWFGAGAALQIPFAMQMAYRFNGIGVTQNVLYENQKLIANQFNSAIGKIQDSLSSTASALGKLQDVVNQNAQALNTLVKQLSSNFGAISSVLNDILSRLDPPEAEVQIDRLITGRLQSLQTYVTQQLIRAAEIRWSANLAATKMSECVLGQSKRVDFCGKGYHLMSFPQSAPHGVVFLHVTYVPAQEKNFTTAPAICHDGKAHFPREGVFVSNGTHWFVTQRNFYEPQIITTDNTFVSGNCDVVIGIVNNTVYDPLQPELDSFKEELDKYFKNHTSPDVDLGDISGINASVVNIQKEIDRLNEVAKNLNESLIDLQELGKYEQYIKGGGSGGGQIYEGKLTAEGLRFGIVASRFNHALVDRLVEGAIDAIVRHGGREEDITLVRVPGSWEIPVAAGELARKEDIDAVIAIGVLIRGATPHFDYIASEVSKGLADLSLELRKPITFGVITADTLEQAIERAGTKHGNKGWEAALSAIEMANLFKSLR

SEQ ID NO: 3799 - protein, 1371 aa, Artificial Sequence
  SARS-CoV-2/Iceland/192/2020__EPI_ISL_417819 spike protein (1-1211)(K986P_V987P_T887W_A1020W) LumSynth construct
MFVFFVLLPLVSSQCVNLTTRTQLPPAYTNSFTRGVYYPDKVFRSSVLHSTQDLFLPFFSNVTWFHAIHVSGTNGTKRFDNPVLPFNDGVYFASTEKSNIIRGWIFGTTLDSKTQSLLIVNNATNVVIKVCEFQFCNDPFLGVYYHKNNKSWMESEFRVYSSANNCTFEYVSQPFLMDLEGKQGNFKNLREFVFKNIDGYFKIYSKHTPINLVRDLPQGFSALEPLVDLPIGINITRFQTLLALHRSYLTPGDSSSGWTAGAAAYYVGYLQPRTFLLKYNENGTITDAVDCALDPLSETKCTLKSFTVEKGIYQTSNFRVQPTESIVRFPNITNLCPFGEVFNATRFASVYAWNRKRISNCVADYSVLYNSASFSTFKCYGVSPTKLNDLCFTNVYADSFVIRGDEVRQIAPGQTGKIADYNYKLPDDFTGCVIAWNSNNLDSKVGGNYNYLYRLFRKSNLKPFERDISTEIYQAGSTPCNGVEGFNCYFPLQSYGFQPTNGVGYQPYRVVVLSFELLHAPATVCGPKKSTNLVKNKCVNFNFNGLTGTGVLTESNKKFLPFQQFGRDIADTTDAVRDPQTLEILDITPCSFGGVSVITPGTNTSNQVAVLYQGVNCTEVPVAIHADQLTPTWRVYSTGSNVFQTRAGCLIGAEHVNNSYECDIPIGAGICASYQTQTNSPRRARSVASQSIIAYTMSLGAENSVAYSNNSIAIPTNFTISVTTEILPVSMTKTSVDCTMYICGDSTECSNLLLQYGSFCTQLNRALTGIAVEQDKNTQEVFAQVKQIYKTPPIKDFGGFNFSQILPDPSKPSKRSFIEDLLFNKVTLADAGFIKQYGDCLGDIAARDLICAQKFNGLTVLPPLLTDEMIAQYTSALLAGTITSGWWFGAGAALQIPFAMQMAYRFNGIGVTQNVLYENQKLIANQFNSAIGKIQDSLSSTASALGKLQDVVNQNAQALNTLVKQLSSNFGAISSVLNDILSRLDPPEAEVQIDRLITGRLQSLQTYVTQQLIRAAEIRWSANLAATKMSECVLGQSKRVDFCGKGYHLMSFPQSAPHGVVFLHVTYVPAQEKNFTTAPAICHDGKAHFPREGVFVSNGTHWFVTQRNFYEPQIITTDNTFVSGNCDVVIGIVNNTVYDPLQPELDSFKEELDKYFKNHTSPDVDLGDISGINASVVNIQKEIDRLNEVAKNLNESLIDLQELGKYEQYIKGGGSGGGQIYEGKLTAEGLRFGIVASRFNHALVDRLVEGAIDAIVRHGGREEDITLVRVPGSWEIPVAAGELARKEDIDAVIAIGVLIRGATPHFDYIASEVSKGLADLSLELRKPITFGVITADTLEQAIERAGTKHGNKGWEAALSAIEMANLFKSLR

SEQ ID NO: 3800 - protein, 1371 aa, Artificial Sequence
  SARS-CoV-2/Belgium/ULG-6939/2020__EPI_ISL_417020 spike protein (1-1211)(K986P_V987P_T887W_A1020W) LumSynth construct
MFVFLVLLPLVSSQCVNLTTRTQLPPAYTNSFTRGVYYPDKVFRSSVLHSTQDLFLPFFSNVTWFHAIHVSGTNGTKRFDNPVLPFNDGVYFASTEKSNIIRGWIFGTTLDSKTQSLLIVNNATNVVIKVCEFQFCNDPFLGVYYHKNNKSWMESEFRVYSSANNCTFEYVSQPFLMDLEGKQGNFKNLREFVFKNIDGYFKIYSKHTPINLVRDLPQGFSALEPLVDLPIGINITRFQTLLALHRSYLTPGDSSSGWTAGAAAYYVGYLQPRTFLLKYNENGTITDAVDCALDPLSETKCTLKSFTVEKGIYQTSNFRVQPTESIVRFPNITNLCPFGEVFNATRFASVYAWNRKRISNCVADYSVLYNSASFSTFKCYGVSPTKLNDLCFTNVYADSFVIRGDEVRQIAPGQTGKIADYNYKLPDDFTGCVIAWNSNNLDSKVGGNYNYLYRLFRKSNLKPFERDISTEIYQAGSTPCNGVEGFNCYFPLQSYGFQPTNGVGYQPYRVVVLSFELLHAPATVCGPKKSTNLVKNKCVNFNFNGLTGTGVLTESNKKFLPFQQFGRDIADTTDAVRDPQTLEILDITPCSFGGVSVITPGTNTSNQVAVLYQGVNCTEVPVAIHADQLTPTWRVYSTGSNVFQTRAGCLIGAEHVNNSYECDIPIGAGICASYQTQTNSPRRARSVASQSIIAYTMSLGAENSVVYSNNSIAIPTNFTISVTTEILPVSMTKTSVDCTMYICGDSTECSNLLLQYGSFCTQLNRALTGIAVEQDKNTQEVFAQVKQIYKTPPIKDFGGFNFSQILPDPSKPSKRSFIEDLLFNKVTLADAGFIKQYGDCLGDIAARDLICAQKFNGLTVLPPLLTDEMIAQYTSALLAGTITSGWWFGAGAALQIPFAMQMAYRFNGIGVTQNVLYENQKLIANQFNSAIGKIQDSLSSTASALGKLQDVVNQNAQALNTLVKQLSSNFGAISSVLNDILSRLDPPEAEVQIDRLITGRLQSLQTYVTQQLIRAAEIRWSANLAATKMSECVLGQSKRVDFCGKGYHLMSFPQSAPHGVVFLHVTYVPAQEKNFTTAPAICHDGKAHFPREGVFVSNGTHWFVTQRNFYEPQIITTDNTFVSGNCDVVIGIVNNTVYDPLQPELDSFKEELDKYFKNHTSPDVDLGDISGINASVVNIQKEIDRLNEVAKNLNESLIDLQELGKYEQYIKGGGSGGGQIYEGKLTAEGLRFGIVASRFNHALVDRLVEGAIDAIVRHGGREEDITLVRVPGSWEIPVAAGELARKEDIDAVIAIGVLIRGATPHFDYIASEVSKGLADLSLELRKPITFGVITADTLEQAIERAGTKHGNKGWEAALSAIEMANLFKSLR

SEQ ID NO: 3801 - protein, 1371 aa, Artificial Sequence
  SARS-CoV-2/France/HF2496/2020__EPI_ISL_418231 spike protein (1-1211)(K986P_V987P_T887W_A1020W) LumSynth construct
MFVFLVLLPLVSSQCVNLTTRTQLPPAYTNSFTRGVYYPDKVFRSSVLHSTQDLFLPFFSNVTWFHAIHVSGTNGTKRFDNPVLPFNDGVYFASTEKSNIIRGWIFGTTLDSKTQSLLIVNNATNVVIKVCEFQFCNDPFLGVYYHKNNKSWMESEFRVYSSANNCTFEYVSQPFLMDLEGKQGNFKNLREFVFKNIDGYFKIYSKHTPINLVRDLPQGFSALEPLVDLPIGINITRFQTLLALHRSYLTPGDSSSGWTAGAAAYYVGYLQPRTFLLKYNENGTITDAVDCALDPLSETKCTLKSFTVEKGIYQTSNFRVQPTESIVRFPNITNLCPFGEVFNATRFASVYAWNRKRISNCVADYSVLYNSASFSTFKCYGVSPTKLNDLCFTNVYADSFVIRGDEVRQIAPGQTGKIADYNYKLPDDFTGCVIAWNSNNLDSKVGGNYNYLYRLFRKSNLKPFERDISTEIYQAGSTPCNGVEGFNCYFPLQSYGFQPTNGVGYQPYRVVVLSFELLHAPATVCGPKKSTNLVKNKCVNFNFNGLTGTGVLTESNKKFLPFQQFGRDIADTTDAVRDPQTLEILDITPCSFGGVSVITPGTNTSNQVAVLYQGVNCTEVPVAIHADQLTPTWRVYSTGSNVFQTRAGCLIGAEHVNNSYECDIPIGAGICASYQTQTNSPRRARSVASQSIIAYTMSLGAENSVAYSNNSIAIPTNFTISVTTEILPVSMTKTSVDCTMYICGDSTECSNLLLQYGSFCTQLNRALTGIAVEQDKNTQEVFAQVKQIYKTPPIKDFGGFNFSQILPDPSKPSKRSFIEDLLFNKVTLADAGFIKQYGDCLGDIVARDLICAQKFNGLTVLPPLLTDEMIAQYTSALLAGTITSGWWFGAGAALQIPFAMQMAYRFNGIGVTQNVLYENQKLIANQFNSAIGKIQDSLSSTASALGKLQDVVNQNAQALNTLVKQLSSNFGAISSVLNDILSRLDPPEAEVQIDRLITGRLQSLQTYVTQQLIRAAEIRWSANLAATKMSECVLGQSKRVDFCGKGYHLMSFPQSAPHGVVFLHVTYVPAQEKNFTTAPAICHDGKAHFPREGVFVSNGTHWFVTQRNFYEPQIITTDNTFVSGNCDVVIGIVNNTVYDPLQPELDSFKEELDKYFKNHTSPDVDLGDISGINASVVNIQKEIDRLNEVAKNLNESLIDLQELGKYEQYIKGGGSGGGQIYEGKLTAEGLRFGIVASRFNHALVDRLVEGAIDAIVRHGGREEDITLVRVPGSWEIPVAAGELARKEDIDAVIAIGVLIRGATPHFDYIASEVSKGLADLSLELRKPITFGVITADTLEQAIERAGTKHGNKGWEAALSAIEMANLFKSLR

SEQ ID NO: 3802 - protein, 1371 aa, Artificial Sequence
  SARS-CoV-2/USA/WA-UW291/2020__EPI_ISL_418076 spike protein (1-1211)(K986P_V987P_T887W_A1020W) LumSynth construct
MFVFLVLLPLVSSQCVNLTTRTQLPPAYTNSFTRGVYYPDKVFRSSVLHSTQDLFLPFFSNVTWFHAIHVSGTNGTKRFDNPVLPFNDGVYFASTEKSNIIRGWIFGTTLDSKTQSLLIVNNATNVVIKVCEFQFCNDPFLGVYYHKNNKSWMESEFRVYSSANNCTFEYVSQPFLMDLEGKQGNFKNLREFVFKNIDGYFKIYSKHTPINLVRDLPQGFSALEPLVDLPIGINITRFQTLLALHRSYLTPGDSSSGWTAGAAAYYVGYLQPRTFLLKYNENGTITDAVDCALDPLSETKCTLKSFTVEKGIYQTSNFRVQPTESIVRFPNITNLCPFGEVFNATRFASVYAWNRKRISNCVADYSVLYNSASFSTFKCYGVSPTKLNDLCFTNVYADSFVIRGDEVRQIAPGQTGKIADYNYKLPDDFTGCVIAWNSNNLDSKVGGNYNYLYRLFRKSNLKPFERDISTEIYQAGSTPCNGVEGFNCYFPLQSYGFQPTNGVGYQPYRVVVLSFELLHAPATVCGPKKSTNLVKNKCVNFNFNGLTGTGVLTESNKKFLPFQQFGRDIADTTDAVRDPQTLEILDITPCSFGGVSVITPGTNTSNQVAVLYQGVNCTEVPVAIHADQLTPTWRVYSTGSNVFQTRAGCLIGAEHVNNSYECDIPIGAGICASYQTQTNSPRRARSVASQSIIAYTMSLGAENSVAYSNNSIAIPTNFTISVTTEILPVSMTKTSVDCTMYICGDSTECSNLLLQYGSFCTQLNRALTGIAVEQDKNTQEVFAQVKQIYKTPPIKDFGGFNFSQILPDPSKPSKRSFIEDLLFNKVTLADAGFIKQYGDCLGDIAARDLICAQKFNGLTVLPPLLTDEMIAQYTSALLAGTITSGWWFGAGAALQIPFAMQMAYRFNGIGVTQNVLYENQKLIANQFNSAIGKIQYSLSSTASALGKLQDVVNQNAQALNTLVKQLSSNFGAISSVLNDILSRLDPPEAEVQIDRLITGRLQSLQTYVTQQLIRAAEIRWSANLAATKMSECVLGQSKRVDFCGKGYHLMSFPQSAPHGVVFLHVTYVPAQEKNFTTAPAICHDGKAHFPREGVFVSNGTHWFVTQRNFYEPQIITTDNTFVSGNCDVVIGIVNNTVYDPLQPELDSFKEELDKYFKNHTSPDVDLGDISGINASVVNIQKEIDRLNEVAKNLNESLIDLQELGKYEQYIKGGGSGGGQIYEGKLTAEGLRFGIVASRFNHALVDRLVEGAIDAIVRHGGREEDITLVRVPGSWEIPVAAGELARKEDIDAVIAIGVLIRGATPHFDYIASEVSKGLADLSLELRKPITFGVITADTLEQAIERAGTKHGNKGWEAALSAIEMANLFKSLR

SEQ ID NO: 3803 - protein, 1371 aa, Artificial Sequence; identical to SEQ ID NO: 3766
  SARS-CoV-2/Portugal/PT0034/2020__EPI_ISL_418019 spike protein (1-1211)(K986P_V987P_T887W_A1020W) LumSynth construct

SEQ ID NO: 3804 - protein, 1371 aa, Artificial Sequence
  SARS-CoV-2/Iceland/202/2020__EPI_ISL_417750 spike protein (1-1211)(K986P_V987P_T887W_A1020W) LumSynth construct
MFVFLVLLPLVSSQCVNLTTRTQLPPAYTNSFTRGVYYPDKVFRSSVLHSTQDLFLPFFSNVTWFHAIHVSGTNGTKRFDNPVLPFNDGVYFASTEKSNIIRGWIFGTTLDSKTQSLLIVNNATNVVIKVCEFQFCNDPFLGVYYHKNNKSWMESEFRVYSSANNCTFEYVSQPFLMDLEGKQGNFKNLREFVFKNIDGYFKIYSKHTPINLVRDLPQGFSALEPLVDLPIGINITRFQTLLALHRSYLTPGDSSSGWTAGAAAYYVGYLQPRTFLLKYNENGTITDAVDCALDPLSETKCTLKSFTVEKGIYQTSNFRVQPTESIVRFPNITNLCPFGEVFNATRFASVYAWNRKRISNCVADYSVLYNSASFSTFKCYGVSPTKLNDLCFTNVYADSFVIRGDEVRQIAPGQTGKIADYNYKLPDDFTGCVIAWNSNNLDSKVGGNYNYLYRLFRKSNLKPFERDISTEIYQAGSTPCNGVEGFNCYFPLQSYGFQPTNGVGYQPYRVVVLSFELLHAPATVCGPKKSTNLVKNKCVNFNFNGLTGTGVLTESNKKFLPFQQFGRDIADTTDAVRDPQTLEILDITPCSFGGVSVITPGTNTSNQVAVLYQDVNCTEVPVAIHADQLTPTWRVYSTGSNVFQTRAGCLIGAEHVNNSYECDIPIGAGICASYQTQTNSPRRARSVASQSIIAYTMSLGAENSVAYSNNSIAIPTNFTISVTTEILPVSMTKTSVDCTMYICGDSTECSNLLLQYGSFCTQLNRALTGIAVEQDKNTQEVFAQVKQIYKTPPIKDFGGFNFSQILPDPSKPSKRSFIEDLLFNKVTLADAGFIKQYGDCLGDIAARDLICAQKFNGLTVLPPLLTDEMIAQYTSALLAGTITSGWWFGAGAALQIPFAMQMAYRFNGIGVTQNVLYENQKLIANQFNSAIGKIQDSLSSTASALGKLQDVVNQNAQALNTLVKQLSSNFGAISSVLNDILSRLDPPEAEVQIDRLITGRLQSLQTYVTQQLIRAAEIRWSANLAATKMSECVLGQSKRVDFCGKGYHLMSFPQSAPHGVVFLHVTYVPAQEKNFTTAPAICHDGKAHFPREGVFVSNGTHWFVTQRNFYEPQIITTDNTFVSGNCDVVIGIVNNTVYDPLQPELDSFKEELDKYFKNHTSPDVDLGDIPGINASVVNIQKEIDRLNEVAKNLNESLIDLQELGKYEQYIKGGGSGGGQIYEGKLTAEGLRFGIVASRFNHALVDRLVEGAIDAIVRHGGREEDITLVRVPGSWEIPVAAGELARKEDIDAVIAIGVLIRGATPHFDYIASEVSKGLADLSLELRKPITFGVITADTLEQAIERAGTKHGNKGWEAALSAIEMANLFKSLR

SEQ ID NO: 3805 - protein, 1371 aa, Artificial Sequence
  SARS-CoV-2/USA/WA-UW261/2020__EPI_ISL_418046 spike protein (1-1211)(K986P_V987P_T887W_A1020W) LumSynth construct
MFVFLVLLPLVSSQCVNLTTRTQLPPAYTNSFTRGVYYPDKVFRSSVLHSTQDLFLPFFSNVTWFHAIHVSGTNGTKRFDNPVLPFNDGVYFASTEKSNIIRGWIFGTTLDSKTQSLLIVNNATNVVIKVCEFQFCNDPFLGVYYHKNNKSWMESEFRVYSSANNCTFEYVSQPFLMDLEGKQGNFKNLREFVFKNIDGYFKIYSKHTPINLVRDLPQGFSALEPLVDLPIGINITRFQTLLALHRSYLTPGDSSSGWTAGAAAYYVGYLQPRTFLLKYNENGTITDAVDCALDPLSETKCTLKSFTVEKGIYQTSNFRVQPTESIVRFPNITNLCPFGEVFNATRFTSVYAWNRKRISNCVADYSVLYNSASFSTFKCYGVSPTKLNDLCFTNVYADSFVIRGDEVRQIAPGQTGKIADYNYKLPDDFTGCVIAWNSNNLDSKVGGNYNYLYRLFRKSNLKPFERDISTEIYQAGSTPCNGVEGFNCYFPLQSYGFQPTNGVGYQPYRVVVLSFELLHAPATVCGPKKSTNLVKNKCVNFNFNGLTGTGVLTESNKKFLPFQQFGRDIADTTDAVRDPQTLEILDITPCSFGGVSVITPGTNTSNQVAVLYQDVNCTEVPVAIHADQLTPTWRVYSTGSNVFQTRAGCLIGAEHVNNSYECDIPIGAGICASYQTQTNSPRRARSVASQSIIAYTMSLGAENSVAYSNNSIAIPTNFTISVTTEILPVSMTKTSVDCTMYICGDSTECSNLLLQYGSFCTQLNRALTGIAVEQDKNTQEVFAQVKQIYKTPPIKDFGGFNFSQILPDPSKPSKRSFIEDLLFNKVTLADAGFIKQYGDCLGDIAARDLICAQKFNGLTVLPPLLTDEMIAQYTSALLAGTITSGWWFGAGAALQIPFAMQMAYRFNGIGVTQNVLYENQKLIANQFNSAIGKIQDSLSSTASALGKLQDVVNQNAQALNTLVKQLSSNFGAISSVLNDILSRLDPPEAEVQIDRLITGRLQSLQTYVTQQLIRAAEIRWSANLAATKMSECVLGQSKRVDFCGKGYHLMSFPQSAPHGVVFLHVTYVPAQEKNFTTAPAICHDGKAHFPREGVFVSNGTHWFVTQRNFYEPQIITTDNTFVSGNCDVVIGIVNNTVYDPLQPELDSFKEELDKYFKNHTSPDVDLGDISGINASVVNIQKEIDRLNEVAKNLNESLIDLQELGKYEQYIKGGGSGGGQIYEGKLTAEGLRFGIVASRFNHALVDRLVEGAIDAIVRHGGREEDITLVRVPGSWEIPVAAGELARKEDIDAVIAIGVLIRGATPHFDYIASEVSKGLADLSLELRKPITFGVITADTLEQAIERAGTKHGNKGWEAALSAIEMANLFKSLR

SEQ ID NO: 3806 - protein, 1371 aa, Artificial Sequence
  SARS-CoV-2/Portugal/PT0035/2020__EPI_ISL_418020 spike protein (1-1211)(K986P_V987P_T887W_A1020W) LumSynth construct
MFVFLVLLPLVSSQCVNLTTRTQLPPAYTNSFTRGVYYPDKVFRSSVLHSTQDLFLPFFSNVTWFHAIHVSGTNGTKRFDNPVLPFNDGVYFASTEKSNIIRGWIFGTTLDSKTQSLLIVNNATNVVIKVCEFQFCNDPFLGVYYHKNNKSWMESEFRVYSSANNCTFEYVSQPFLMDLEGKQGNFKNLREFVFKNIDGYFKIYSKHTPINLVRDLPQGFSALEPLVDLPIGINITRFQTLLALHRSYLTPGDSSSGWTAGAAAYYVGYLQPRTFLLKYNENGTITDAVDCALDPLSETKCTLKSFTVEKGIYQTSNFRVQPTESIVRFPNITNLCPFGEVFNATRFASVYAWNRKRISNCVADYSVLYNSASFSTFKCYGVSPTKLNDLCFTNVYADSFVIRGDEVRQIAPGQTGKIADYNYKLPDDFTGCVIAWNSNNLDSKVGGNYNYLYRLFRKSNLKPFERDISTEIYQAGSTPCNGVEGFNCYFPLQSYGFQPTNGVGYQPYRVVVLSFELLHAPATVCGPKKSTNLVKNKCVNFNFNGLTGTGVLTESNKKFLPFQQFGRDIADTTDAVRDPQTLEILDITPCSFGGVSVITPGTNTSNQVAVLYQDVNCTEVPVAIHADQLTPTWRVYSTGSNVFQTRAGCLIGAEHVNNSYECDIPIGAGICASYQTQTNSPRRARSVASQSIIAYTMSLGAENSVAYSNNSIAIPTNFTISVTTEILPVSMTKTSVDCTMYICGDSTECSNLLLQYGSFCTQLNRALTGIAVEQDKNTQEVFAQVKQIYKTPPIKDFGGFNFSQILPDPSKPSKRSFIEDLLFNKVTLADAGFIKQYGDCLGDISARDLICAQKFNGLTVLPPLLTDEMIAQYTSALLAGTITSGWWFGAGAALQIPFAMQMAYRFNGIGVTQNVLYENQKLIANQFNSAIGKIQDSLSSTASALGKLQDVVNQNAQALNTLVKQLSSNFGAISSVLNDILSRLDPPEAEVQIDRLITGRLQSLQTYVTQQLIRAAEIRWSANLAATKMSECVLGQSKRVDFCGKGYHLMSFPQSAPHGVVFLHVTYVPAQEKNFTTAPAICHDGKAHFPREGVFVSNGTHWFVTQRNFYEPQIITTDNTFVSGNCDVVIGIVNNTVYDPLQPELDSFKEELDKYFKNHTSPDVDLGDISGINASVVNIQKEIDRLNEVAKNLNESLIDLQELGKYEQYIKGGGSGGGQIYEGKLTAEGLRFGIVASRFNHALVDRLVEGAIDAIVRHGGREEDITLVRVPGSWEIPVAAGELARKEDIDAVIAIGVLIRGATPHFDYIASEVSKGLADLSLELRKPITFGVITADTLEQAIERAGTKHGNKGWEAALSAIEMANLFKSLR

SEQ ID NO: 3807 - protein, 1371 aa, Artificial Sequence
  SARS-CoV-2/USA/NY-NYUMC7/2020__EPI_ISL_418192 spike protein (1-1211)(K986P_V987P_T887W_A1020W) LumSynth construct
MFVFLVLLPLVSSQCVNLTTRTQLPPAYTNSFTRGVYYPDKVFRSSVLHSTQDLFLPFFSNVTWFHAIHVSGTNGTKRFDNPVLPFNDGVYFASTEKSNIIRGWIFGTTLDSKTQSLLIVNNATNVVIKVCEFQFCNDPFLGVYHHKNNKSWMESEFRVYSSANNCTFEYVSQPFLMDLEGKQGNFKNLREFVFKNIDGYFKIYSKHTPINLVRDLPQGFSALEPLVDLPIGINITRFQTLLALHRSYLTPGDSSSGWTAGAAAYYVGYLQPRTFLLKYNENGTITDAVDCALDPLSETKCTLKSFTVEKGIYQTSNFRVQPTESIVRFPNITNLCPFGEVFNATRFASVYAWNRKRISNCVADYSVLYNSASFSTFKCYGVSPTKLNDLCFTNVYADSFVIRGDEVRQIAPGQTGKIADYNYKLPDDFTGCVIAWNSNNLDSKVGGNYNYLYRLFRKSNLKPFERDISTEIYQAGSTPCNGVEGFNCYFPLQSYGFQPTNGVGYQPYRVVVLSFELLHAPATVCGPKKSTNLVKNKCVNFNFNGLTGTGVLTESNKKFLPFQQFGRDIADTTDAVRDPQTLEILDITPCSFGGVSVITPGTNTSNQVAVLYQGVNCTEVPVAIHADQLTPTWRVYSTGSNVFQTRAGCLIGAEHVNNSYECDIPIGAGICASYQTQTNSPRRARSVASQSIIAYTMSLGAENSVAYSNNSIAIPTNFTISVTTEILPVSMTKTSVDCTMYICGDSTECSNLLLQYGSFCTQLNRALTGIAVEQDKNTQEVFAQVKQIYKTPPIKDFGGFNFSQILPDPSKPSKRSFIEDLLFNKVTLADAGFIKQYGDCLGDIAARDLICAQKFNGLTVLPPLLTDEMIAQYTSALLAGTITSGWWFGAGAALQIPFAMQMAYRFNGIGVTQNVLYENQKLIANQFNSAIGKIQDSLSSTASALGKLQDVVNQNAQALNTLVKQLSSNFGAISSVLNDILSRLDPPEAEVQIDRLITGRLQSLQTYVTQQLIRAAEIRWSANLAATKMSECVLGQSKRVDFCGKGYHLMSFPQSAPHGVVFLHVTYVPAQEKNFTTAPAICHDGKAHFPREGVFVSNGTHWFVTQRNFYEPQIITTDNTFVSGNCDVVIGIVNNTVYDPLQPELDSFKEELDKYFKNHTSPDVDLGDISGINASVVNIQKEIDRLNEVAKNLNESLIDLQELGKYEQYIKGGGSGGGQIYEGKLTAEGLRFGIVASRFNHALVDRLVEGAIDAIVRHGGREEDITLVRVPGSWEIPVAAGELARKEDIDAVIAIGVLIRGATPHFDYIASEVSKGLADLSLELRKPITFGVITADTLEQAIERAGTKHGNKGWEAALSAIEMANLFKSLR

SEQ ID NO: 3808 - protein, 1371 aa, Artificial Sequence
  SARS-CoV-2/Iceland/189/2020__EPI_ISL_417709 spike protein (1-1211)(K986P_V987P_T887W_A1020W) LumSynth construct
MFVFLVLLPLVSSQCVNLTTRTQLPPAYTNSFTRGVYYPDKVFRSSVLHSTQDLFLPFFSNVTWFHAIHVSGTNGTKRFDNPVLPFNDGVYFASTEKSNIIRGWIFGTTLDSKTQSLLIVNNATNVVIKVCEFQFCNDPFLGVYYHKNNKSWMESEFRVYSSANNCTFEYVSQPFLMDLEGKQGNFKNLREFVFKNIDGYFKIYSKHTPINLVRDLPQGFSALEPLVDLPIGINITRFQTLLALHRSYLTPGDSSSGWTAGAAAYYVGYLQPRTFLLKYNENGTITDAVDCALDPLSETKCTLKSFTVEKGIYQTSNFRVQPTESIVRFPNITNLCPFGEVFNATRFASVYAWNRKRISNCVADYSVLYNSASFSTFKCYGVSPTKLNDLCFTNVYADSFVIRGDEVRQIAPGQTGKIADYNYKLPDDFTGCVIAWNSNNLDSKVGGNYNYLYRLFRKSNLKPFERDISTEIYQAGSTPCNGVEGFNCYFPLQSYGFQPTNGVGYQPYRVVVLSFELLHAPATVCGPKKSTNLVKNKCVNFNFNGLTGTGVLTESNKKFLPFQQFGRDIADTTDAVRDPQTLEILDITPCSFGGVSVITPGTNTSNQVAVLYQGVNCTEVPVAIHADQLTPTWRVYSTGSNVFQTRAGCLIGAEHVNNSYECDIPIGAGICASYQTQTNSPRRARSVASQSIIAYTMSLGAENSVAYSNNSIAIPTNFTISVTTEILPVSMTKTSVDCTMYICGDSTECSNLLLQYGSFCTQLNRALTGIAVEQDKNTQEVFAQVKQIYKTPPIKDFGGFNFSQILPDPSKPSKRSFIEDLLFNKVTLADAGFTKQYGDCLGDIAARDLICAQKFNGLTVLPPLLTDEMIAQYTSALLAGTITSGWWFGAGAALQIPFAMQMAYRFNGIGVTQNVLYENQKLIANQFNSAIGKIQDSLSSTASALGKLQDVVNQNAQALNTLVKQLSSNFGAISSVLNDILSRLDPPEAEVQIDRLITGRLQSLQTYVTQQLIRAAEIRWSANLAATKMSECVLGQSKRVDFCGKGYHLMSFPQSAPHGVVFLHVTYVPAQEKNFTTAPAICHDGKAHFPREGVFVSNGTHWFVTQRNFYEPQIITTDNTFVSGNCDVVIGIVNNTVYDPLQPELDSFKEELDKYFKNHTSPDVDLGDISGINASVVNIQKEIDRLNEVAKNLNESLIDLQELGKYEQYIKGGGSGGGQIYEGKLTAEGLRFGIVASRFNHALVDRLVEGAIDAIVRHGGREEDITLVRVPGSWEIPVAAGELARKEDIDAVIAIGVLIRGATPHFDYIASEVSKGLADLSLELRKPITFGVITADTLEQAIERAGTKHGNKGWEAALSAIEMANLFKSLR

SEQ ID NO: 3809 - protein, 1371 aa, Artificial Sequence
  SARS-CoV-2/Australia/NSW56/2020__EPI_ISL_417408 spike protein (1-1211)(K986P_V987P_T887W_A1020W) LumSynth construct
MFVFLVLLPLVSSQCVNLTTRTQLPPAYTNSFTRGVYYPDKVFRSSVLHSTQDLFLPFFSNVTWFHAIHVSGTNGTKRFDNPVLPFNDGVYFASTEKSNIIRGWIFGTTLDSKTQSLLIVNNATNVVIKVCEFQFCNDPFLGVYYHKNNKSWMESEFRVYSSANNCTFEYVSQPFLMDLEGKQGNFKNLREFVFKNIDGYFKIYSKHTPINLVRDLPQGFSALEPLVDLPIGINITRFQTLLALHRSYLTPGDSSSGWTAGAAAYYVGYLQPRTFLLKYNENGTITDAVDCALDPLSETKCTLKSFTVEKGIYQTSNFRVQPTESIVRFPNITNLCPFGEVFNATRFASVYAWNRKRISNCVADYSVLYNSASFSTFKCYGVSPTKLNDLCFTNVYADSFVIRGDEVRQIAPGQTGKIADYNYKLPDDFTGCVIAWNSNNLDSKVGGNYNYLYRLFRKSNLKPFERDISTEIYQAGSTPCNGVEGFNCYFPLQSYGFQPTNGVGYQPYRVVVLSFELLHAPATVCGPKKSTNLVKNKCVNFNFNGLTGTGVLTESNKKFLPFQQFGRDIADTTDAVRDPQTLEILDITPCSFGGVSVITPGTNTSNQVAVLYQDVNCTEVPVAIHADQLTPTWRVYSTGSNVFQTRAGCLIGAEHVNNSYECDIPIGAGICASYQTQTNSPRRARSVASQSIIAYTMSLGAENSVAYSNNSIAIPTNFTISVTTEILPVSMTKTSVDCTMYICGDSTECSNLLLQYGSFCTQLNRALTGIAVEQDKNTQEVFAQVKQIYKTPPIKDFGGFNFSQILPDSSKPSKRSFIEDLLFNKVTLADAGFIKQYGDCLGDIAARDLICAQKFNGLTVLPPLLTDEMIAQYTSALLAGTITSGWWFGAGAALQIPFAMQMAYRFNGIGVTQNVLYENQKLIANQFNSAIGKIQDSLSSTASALGKLQDVVNQNAQALNTLVKQLSSNFGAISSVLNDILSRLDPPEAEVQIDRLITGRLQSLQTYVTQQLIRAAEIRWSANLAATKMSECVLGQSKRVDFCGKGYHLMSFPQSAPHGVVFLHVTYVPAQEKNFTTAPAICHDGKAHFPREGVFVSNGTHWFVTQRNFYEPQIITTDNTFVSGNCDVVIGIVNNTVYDPLQPELDSFKEELDKYFKNHTSPDVDLGDISGINASVVNIQKEIDRLNEVAKNLNESLIDLQELGKYEQYIKGGGSGGGQIYEGKLTAEGLRFGIVASRFNHALVDRLVEGAIDAIVRHGGREEDITLVRVPGSWEIPVAAGELARKEDIDAVIAIGVLIRGATPHFDYIASEVSKGLADLSLELRKPITFGVITADTLEQAIERAGTKHGNKGWEAALSAIEMANLFKSLR

SEQ ID NO: 3810 - protein, 1371 aa, Artificial Sequence
  SARS-CoV-2/Iceland/280/2020__EPI_ISL_417608 spike protein (1-1211)(K986P_V987P_T887W_A1020W) LumSynth construct
MFVFLVLLPLVSSQCVNLTTRTQLPPAYTNSFTRGVYYPDKVFRSSVLHSTQDLFLPFFSNVTWFHAIHVSGTNGTKRFDNPVLPFNDGVYFASTEKSNIIRGWIFGTTLDSKTQSLLIVNNATNVVIKVCEFQFCNDPFLGVYYHKNNKSWMESEFRVYSSANNCTFEYVSQPFLMDLEGKQGNFKNLREFVFKNIDGYFKIYSKHTPINLVRDLPQGFSALEPLVDLPIGINITRFQTLLALHRSYLTPGDSSSGWTAGAAAYYVGYLQPRTFLLKYNENGTITDAVDCALDPLSETKCTLKSFTVEKGIYQTSNFRVQPTESIVRFPNITNLCPFGEVFNATRFASVYAWNRKRISNCVADYSVLYNSASFSTFKCYGVSPTKLNDLCFTNVYADSFVIRGDEVRQIAPGQTGKIADYNYKLPDDFTGCVIAWNSNNLDSKVGGNYNYLYRLFRKSNLKPFERDISTEIYQAGSTPCNGVEGFNCYFPLQSYGFQPTNGVGYQPYRVVVLSFELLHAPATVCGPKKSTNLVKNKCVNFNFNGLTGTGVLTESNKKFLPFQQFGRDIADTTDAVRDPQTLEILDITPCSFGGVSVITPGTNTSNQVAVLYQGVNCTEVPVAIHADQLTPTWRVYSTGSNVFQTRAGCLIGAEHVNNSYECDIPIGAGICASYHTQTNSPRRARSVASQSIIAYTMSLGAENSVAYSNNSIAIPTNFTISVTTEILPVSMTKTSVDCTMYICGDSTECSNLLLQYGSFCTQLNRALTGIAVEQDKNTQEVFAQVKQIYKTPPIKDFGGFNFSQILPDPSKPSKRSFIEDLLFNKVTLADAGFIKQYGDCLGDIAARDLICAQKFNGLTVLPPLLTDEMIAQYTSALLAGTITSGWWFGAGAALQIPFAMQMAYRFNGIGVTQNVLYENQKLIANQFNSAIGKIQDSLSSTASALGKLQDVVNQNAQALNTLVKQLSSNFGAISSVLNDILSRLDPPEAEVQIDRLITGRLQSLQTYVTQQLIRAAEIRWSANLAATKMSECVLGQSKRVDFCGKGYHLMSFPQSAPHGVVFLHVTYVPAQEKNFTTAPAICHDGKAHFPREGVFVSNGTHWFVTQRNFYEPQIITTDNTFVSGNCDVVIGIVNNTVYDPLQPELDSFKEELDKYFKNHTSPDVDLGDISGINASVVNIQKEIDRLNEVAKNLNESLIDLQELGKYEQYIKGGGSGGGQIYEGKLTAEGLRFGIVASRFNHALVDRLVEGAIDAIVRHGGREEDITLVRVPGSWEIPVAAGELARKEDIDAVIAIGVLIRGATPHFDYIASEVSKGLADLSLELRKPITFGVITADTLEQAIERAGTKHGNKGWEAALSAIEMANLFKSLR

SEQ ID NO: 3811 - protein, 1371 aa, Artificial Sequence; identical to SEQ ID NO: 3766
  SARS-CoV-2/Iceland/247/2020__EPI_ISL_417575 spike protein (1-1211)(K986P_V987P_T887W_A1020W) LumSynth construct

SEQ ID NO: 3812 - protein, 1371 aa, Artificial Sequence
  SARS-CoV-2/Iceland/238/2020__EPI_ISL_417566 spike protein (1-1211)(K986P_V987P_T887W_A1020W) LumSynth construct
MFVFLVLLPLVSSQCVNLTTRTQLPPAYTNSFTRGVYYPDKVFRSSVLHSTQDLFLPFFSNVTWFHAIHVSGTNGTKRFDNPVLPFNDGVYFASTEKSNIIRGWIFGTTLDSKTQSLLIVNNATNVVIKVCEFQFCNDPFLGVYYHKNNKSWMESEFRVYSSANNCTFEYVSQPFLMDLEGKQGNFKNLREFVFKNIDGYFKIYSKHTPINLVRDLPQGFSALEPLVDLPIGINITRFQTLLALHRSYLTPGDSSSGWTAGAAAYYVGYLQPRTFLLKYNENGTITDAVDCALDPLSETKCTLKSFTVEKGIYQTSNFRVQPTESIVRFPNITNLCPFGEVFNATRFASVYAWNRKRISNCVADYSVLYNSASFSTFKCYGVSPTKLNDLCFTNVYADSFVIRGDEVRQIAPGQTGKIADYNYKLPDDFTGCVIAWNSNNLDSKVGGNYNYLYRLFRKSNLKPFERDISTEIYQAGSTPCNGVEGFNCYFPLQSYGFQPTNGVGYQPYRVVVLSFELLHAPATVCGPKKSTNLVKNKCVNFNFNGLTGTGVLTESNKKFLPFQQFGRDIADTTDAVRDPQTLEILDITPCSFGGVSVITPGTNTSNQVAVLYQGVNCTEVPVAIHADQLTPTWRVYSTGSNVFQTRAGCLIGAEHVNNSYECDIPIGAGICASYQTQTNSPRRARSVASQSIIAYTMSLGAENSVAYSNNSIAIPTNFTISVTTEILPVSMTKTSVDCTMYICGDSTECSNLLLQYGSFCTQLNRALTGIAVEQDKNTQEVFAQVKQIYKTPPIKDFGGFNFSQILPDPSKPSKRSFIEDLLFNKVTLADVGFIKQYGDCLGDIAARDLICAQKFNGLTVLPPLLTDEMIAQYTSALLAGTITSGWWFGAGAALQIPFAMQMAYRFNGIGVTQNVLYENQKLIANQFNSAIGKIQDSLSSTASALGKLQDVVNQNAQALNTLVKQLSSNFGAISSVLNDILSRLDPPEAEVQIDRLITGRLQSLQTYVTQQLIRAAEIRWSANLAATKMSECVLGQSKRVDFCGKGYHLMSFPQSAPHGVVFLHVTYVPAQEKNFTTAPAICHDGKAHFPREGVFVSNGTHWFVTQRNFYEPQIITTDNTFVSGNCDVVIGIVNNTVYDPLQPELDSFKEELDKYFKNHTSPDVDLGDISGINASVVNIQKEIDRLNEVAKNLNESLIDLQELGKYEQYIKGGGSGGGQIYEGKLTAEGLRFGIVASRFNHALVDRLVEGAIDAIVRHGGREEDITLVRVPGSWEIPVAAGELARKEDIDAVIAIGVLIRGATPHFDYIASEVSKGLADLSLELRKPITFGVITADTLEQAIERAGTKHGNKGWEAALSAIEMANLFKSLR

SEQ ID NO: 3813 - protein, 1371 aa, Artificial Sequence
  SARS-CoV-2/Greece/16/2020__EPI_ISL_418265 spike protein (1-1211)(K986P_V987P_T887W_A1020W) LumSynth construct
MFVFLVLLPLVSSQCVNLTTRTQLPPAYTNSFTRGVYYPDKVFRSSVLHSTQDLFLPFFSNVTWFHAIHVSGTNGTKRFDNPVLPFNDGVYFASTEKSNIIRGWIFGTTLDSKTQSLLIVNNATNVVIKVCEFQFCNDPFLGVYYHKNNKSWMESEFRVYSSANNCTFEYVSQPFLMDLEGKQGNFKNLREFVFKNVDGYFKIYSKHTPINLVRDLPQGFSALEPLVDLPIGINITRFQTLLALHRSYLTPGDSSSGWTAGAAAYYVGYLQPRTFLLKYNENGTITDAVDCALDPLSETKCTLKSFTVEKGIYQTSNFRVQPTESIVRFPNITNLCPFGEVFNATRFASVYAWNRKRISNCVADYSVLYNSASFSTFKCYGVSPTKLNDLCFTNVYADSFVIRGDEVRQIAPGQTGKIADYNYKLPDDFTGCVIAWNSNNLDSKVGGNYNYLYRLFRKSNLKPFERDISTEIYQAGSTPCNGVEGFNCYFPLQSYGFQPTNGVGYQPYRVVVLSFELLHAPATVCGPKKSTNLVKNKCVNFNFNGLTGTGVLTESNKKFLPFQQFGRDIADTTDAVRDPQTLEILDITPCSFGGVSVITPGTNTSNQVAVLYQDVNCTEVPVAIHADQLTPTWRVYSTGSNVFQTRAGCLIGAEHVNNSYECDIPIGAGICASYQTQTNSPRRARSVASQSIIAYTMSLGAENSVAYSNNSIAIPTNFTISVTTEILPVSMTKTSVDCTMYICGDSTECSNLLLQYGSFCTQLNRALTGIAVEQDKNTQEVFAQVKQIYKTPPIKDFGGFNFSQILPDPSKPSKRSFIEDLLFNKVTLADAGFIKQYGDCLGDIAARDLICAQKFNGLTVLPPLLTDEMIAQYTSALLAGTITSGWWFGAGAALQIPFAMQMAYRFNGIGVTQNVLYENQKLIANQFNSAIGKIQDSLSSTASALGKLQDVVNQNAQALNTLVKQLSSNFGAISSVLNDILSRLDPPEAEVQIDRLITGRLQSLQTYVTQQLIRAAEIRWSANLAATKMSECVLGQSKRVDFCGKGYHLMSFPQSAPHGVVFLHVTYVPAQEKNFTTAPAICHDGKAHFPREGVFVSNGTHWFVTQRNFYEPQIITTDNTFVSGNCDVVIGIVNNTVYDPLQPELDSFKEELDKYFKNHTSPDVDLGDISGINASVVNIQKEIDRLNEVAKNLNESLIDLQELGKYEQYIKGGGSGGGQIYEGKLTAEGLRFGIVASRFNHALVDRLVEGAIDAIVRHGGREEDITLVRVPGSWEIPVAAGELARKEDIDAVIAIGVLIRGATPHFDYIASEVSKGLADLSLELRKPITFGVITADTLEQAIERAGTKHGNKGWEAALSAIEMANLFKSLR

SEQ ID NO: 3814 - protein, 1371 aa, Artificial Sequence
  SARS-CoV-2/Iceland/319/2020__EPI_ISL_417648 spike protein (1-1211)(K986P_V987P_T887W_A1020W) LumSynth construct
MFVFLVLLPLVSSQCVNLTTRTQLPPAYTNSFTRGVYYPDKVFRSSVLHSTQDLFLPFFSNVTWFHAIHVSGTNGTKRFDNPVLPFNDGVYFASTEKSNIIRGWIFGTTLDSKTQSLLIVNNATNVVIKVCEFQFCNDPFLGVYYHKNNKSWMESEFRVYSSANNCTFEYVSQPFLIDLEGKQGNFKNLREFVFKNIDGYFKIYSKHTPINLVRDLPQGFSALEPLVDLPIGINITRFQTLLALHRSYLTPGDSSSGWTAGAAAYYVGYLQPRTFLLKYNENGTITDAVDCALDPLSETKCTLKSFTVEKGIYQTSNFRVQPTESIVRFPNITNLCPFGEVFNATRFASVYAWNRKRISNCVADYSVLYNSASFSTFKCYGVSPTKLNDLCFTNVYADSFVIRGDEVRQIAPGQTGKIADYNYKLPDDFTGCVIAWNSNNLDSKVGGNYNYLYRLFRKSNLKPFERDISTEIYQAGSTPCNGVEGFNCYFPLQSYGFQPTNGVGYQPYRVVVLSFELLHAPATVCGPKKSTNLVKNKCVNFNFNGLTGTGVLTESNKKFLPFQQFGRDIADTTDAVRDPQTLEILDITPCSFGGVSVITPGTNTSNQVAVLYQGVNCTEVPVAIHADQLTPTWRVYSTGSNVFQTRAGCLIGAEHVNNSYECDIPIGAGICASYQTQTNSPRRARSVASQSIIAYTMSLGAENSVAYSNNSIAIPTNFTISVTTEILPVSMTKTSVDCTMYICGDSTECSNLLLQYGSFCTQLNRALTGIAVEQDKNTQEVFAQVKQIYKTPPIKDFGGFNFSQILPDPSKPSKRSFIEDLLFNKVTLADAGFIKQYGDCLGDIAARDLICAQKFNGLTVLPPLLTDEMIAQYTSALLAGTITSGWWFGAGAALQIPFAMQMAYRFNGIGVTQNVLYENQKLIANQFNSAIGKIQDSLSSTASALGKLQDVVNQNAQALNTLVKQLSSNFGAISSVLNDILSRLDPPEAEVQIDRLITGRLQSLQTYVTQQLIRAAEIRWSANLAATKMSECVLGQSKRVDFCGKGYHLMSFPQSAPHGVVFLHVTYVPAQEKNFTTAPAICHDGKAHFPREGVFVSNGTHWFVTQRNFYEPQIITTDNTFVSGNCDVVIGIVNNTVYDPLQPELDSFKEELDKYFKNHTSPDVDLGDISGINASVVNIQKEIDRLNEVAKNLNESLIDLQELGKYEQYIKGGGSGGGQIYEGKLTAEGLRFGIVASRFNHALVDRLVEGAIDAIVRHGGREEDITLVRVPGSWEIPVAAGELARKEDIDAVIAIGVLIRGATPHFDYIASEVSKGLADLSLELRKPITFGVITADTLEQAIERAGTKHGNKGWEAALSAIEMANLFKSLR

SEQ ID NO: 3815 - protein, 1371 aa, Artificial Sequence
  SARS-CoV-2/Congo/94/2020__EPI_ISL_417947 spike protein (1-1211)(K986P_V987P_T887W_A1020W) LumSynth construct
MFVFLVLLPLVSSQCVNLTTRTQLPPAYTNSFTRGVYYPDKVFRSSVLHSTQDLFLPFFSNVTWFHAIHVSGTNGTKRFDNPVLPFNDGVYFASTEKSNIIRGWIFGTTLDSKTQSLLIVNNATNVVIKVCEFQFCNDPFLGVYYHKNNKSWMESEFRVYSSANNCTFEYVSQPFLMDLEGKQGNFKNLREFVFKNIDGYFKIYSKHTPINLVRDLPQGFSALEPLVDLPIGINITRFQTLLALHRSYLTPGDSSSGWTAGAAAYYVGYLQPRTFLLKYNENGTITDAVDCALDPLSETKCTLKSFTVEKGIYQTSNFRVQPTESIVRFPNITNLCPFGEVFNATRFASVYAWNRKRISNCVADYSVLYNSASFSTFKCYGVSPTKLNDLCFTNVYADSFVIRGDEVRQIAPGQTGKIADYNYKLPDDFTGCVIAWNSNNLDSKVGGNYNYLYRLFRKSNLKPFERDISTEIYQAGSTPCNGVEGFNCYFPLQSYGFQPTNGVGYQPYRVVVLSFELLHAPATVCGPKKSTNLVKNKCVNFNFNGLTGTGVLTESNKKFLPFQQFGRDIADTTDAVRDPQTLEILDITPCSFGGVSVITPGTNTSNQVAVLYQGVNCTEVPVAIHADQLTPTWRVYSTGSNVFQTRAGCLIGAEHVNNSYECDIPIGAGICASYQTQTNSPRRARSVASQSIIAYTMSLGAENSVAYSNNSIAIPTNFTISVTTEILPVSMTKTSVDCTMYICGDSTECSNLLLQYGSFCTQLNRALTGIAVEQDKNTQEVFAQVKQIYKTPPIKDFGGFNFSQILPDPSKPSKRSFIEDILFNKVTLADAGFIKQYGDCLGDIAARDLICAQKFNGLTVLPPLLTDEMIAQYTSALLAGTITSGWWFGAGAALQIPFAMQMAYRFNGIGVTQNVLYENQKLIANQFNSAIGKIQDSLSSTASALGKLQDVVNQNAQALNTLVKQLSSNFGAISSVLNDILSRLDPPEAEVQIDRLITGRLQSLQTYVTQQLIRAAEIRWSANLAATKMSECVLGQSKRVDFCGKGYHLMSFPQSAPHGVVFLHVTYVPAQEKNFTTAPAICHDGKAHFPREGVFVSNGTHWFVTQRNFYEPQIITTDNTFVSGNCDVVIGIVNNTVYDPLQPELDSFKEELDKYFKNHTSPDVDLGDISGINASVVNIQKEIDRLNEVAKNLNESLIDLQELGKYEQYIKGGGSGGGQIYEGKLTAEGLRFGIVASRFNHALVDRLVEGAIDAIVRHGGREEDITLVRVPGSWEIPVAAGELARKEDIDAVIAIGVLIRGATPHFDYIASEVSKGLADLSLELRKPITFGVITADTLEQAIERAGTKHGNKGWEAALSAIEMANLFKSLR

SEQ ID NO: 3816 - protein, 1371 aa, Artificial Sequence
  SARS-CoV-2/Congo/158/2020__EPI_ISL_417950 spike protein (1-1211)(K986P_V987P_T887W_A1020W) LumSynth construct
MFVFLVLLPLVSSQCVNLTTRTQLPPAYTNSFTRGVYYPDKVFRSSVLHSTQDLFLPFFSNVTWFHAIHVSGTNGTKRFDNPVLPFNDGVYFASTEKSNIIRGWIFGTTLDSKTQSLLIVNNATNVVIKVCEFQFCNDPFLGVYYHKNNKSWMESEFRVYSSANNCTFEYVSQPFLMDLEGKQGNFKNLREFVFKNIDGYFKIYSKHTPINLVRDLPQGFSALEPLVDLPIGINITRFQTLLALHRSYLTPGDSSSGWTAGAAAYYVGYLQPRTFLLKYNENGTITDAVDCALDPLSETKCTLKSFTVEKGIYQTSNFRVQPTESIVRFPNITNLCPFGEVFNATRFASVYAWNRKRISNCVADYSVLYNSASFSTFKCYGVSPTKLNDLCFTNVYADSFVIRGDEVRQIAPGQTGKIADYNYKLPDDFTGCVIAWNSNNLDSKVGGNYNYLYRLFRKSNLKPFERDISTEIYQAGSTPCNGVEGFNCYFPLQSYGFQPTNGVGYQPYRVVVLSFELLHAPATVCGPKKSTNLVKNKCVNFNFNGLTGTGVLTESNKKFLPFQQFGRDIADTTDAVRDPQTLEILDITPCSFGGVSVITPGTNTSNQVAVLYQDVNCTEVPVAIHADQLTPTWRVYSTGSNVFQTRAGCLIGAEHVNNSYECDIPIGAGICASYQTQTNSPRRARSVASQSIIAYTMSLGAENSVAYSNNSIAIPTNFTISVTTEILPVSMTKTSVDCTMYICGDSTECSNLLLQYGSFCTQLNRALTGIAVEQDKNTQEVFAQVKQIYKTPPIKDFGGFNFSQILPDPSKPSKRSFIEDLLFNKVTLADAGFIKQYGDCLGDIAARDLICAQKFNGLTVLPPLLTDEMIAQYTSALLAGTITSGWWFGAGAALQIPFAMQMAYRFNGIGVTQNVLYENQKLIANQFNSAIGKIQDSLSSTASALGKLQDVVNQNAQALNTLVKQLSSNFGAISSVLNDILSRLDPPEAEVQIDRLITGRLQSLQTYVTQQLIRAAEIRWSANLAATKMSECVLGQSKRVDFCGKGYHLMSFPQSAPHGVVFLHVTYVPAQEKNFTTAPAICHDGKAHFPREGVFVSNGTHWFVTQRNFYEPQIITTDNTFLSGNCDVVIGIVNNTVYDPLQPELDSFKEELDKYFKNHTSPDVDLGDISGINASVVNIQKEIDRLNEVAKNLNESLIDLQELGKYEQYIKGGGSGGGQIYEGKLTAEGLRFGIVASRFNHALVDRLVEGAIDAIVRHGGREEDITLVRVPGSWEIPVAAGELARKEDIDAVIAIGVLIRGATPHFDYIASEVSKGLADLSLELRKPITFGVITADTLEQAIERAGTKHGNKGWEAALSAIEMANLFKSLR

SEQ ID NO: 3817 - protein, 1371 aa, Artificial Sequence
  SARS-CoV-2/USA/UT-00034/2020__EPI_ISL_417977 spike protein (1-1211)(K986P_V987P_T887W_A1020W) LumSynth construct
MFVFLVLLPLVSSQCVNLTTRTQLPPAYTNSFTRGVYYPDKVFRSSVLHSTQDLFLPFFSNVTWFHAIHVSGTNGTKRFDNPVLPFNDGVYFASTEKSNIIRGWIFGTTLDSKTQSLLIVNNATNVVIKVCEFQFCNDPFLGVYYYKNNKSWMESEFRVYSSANNCTFEYVSQPFLMDLEGKQGNFKNLREFVFKNIDGYFKIYSKHTPINLVRDLPQGFSALEPLVDLPIGINITRFQTLLALHRSYLTPGDSSSGWTAGAAAYYVGYLQPRTFLLKYNENGTITDAVDCALDPLSETKCTLKSFTVEKGIYQTSNFRVQPTESIVRFPNITNLCPFGEVFNATRFASVYAWNRKRISNCVADYSVLYNSASFSTFKCYGVSPTKLNDLCFTNVYADSFVIRGDEVRQIAPGQTGKIADYNYKLPDDFTGCVIAWNSNNLDSKVGGNYNYLYRLFRKSNLKPFERDISTEIYQAGSTPCNGVEGFNCYFPLQSYGFQPTNGVGYQPYRVVVLSFELLHAPATVCGPKKSTNLVKNKCVNFNFNGLTGTGVLTESNKKFLPFQQFGRDIADTTDAVRDPQTLEILDITPCSFGGVSVITPGTNTSNQVAVLYQGVNCTEVPVAIHADQLTPTWRVYSTGSNVFQTRAGCLIGAEHVNNSYECDIPIGAGICASYQTQTNSPRRARSVASQSIIAYTMSLGAENSVAYSNNSIAIPTNFTISVTTEILPVSMTKTSVDCTMYICGDSTECSNLLLQYGSFCTQLNRALTGIAVEQDKNTQEVFAQVKQIYKTPPIKDFGGFNFSQILPDPSKPSKRSFIEDLLFNKVTLADAGFIKQYGDCLGDIAARDLICAQKFNGLTVLPPLLTDEMIAQYTSALLAGTITSGWWFGAGAALQIPFAMQMAYRFNGIGVTQNVLYENQKLIANQFNSAIGKIQDSLSSTASALGKLQDVVNQNAQALNTLVKQLSSNFGAISSVLNDILSRLDPPEAEVQIDRLITGRLQSLQTYVTQQLIRAAEIRWSANLAATKMSECVLGQSKRVDFCGKGYHLMSFPQSAPHGVVFLHVTYVPAQEKNFTTAPAICHDGKAHFPREGVFVSNGTHWFVTQRNFYEPQIITTDNTFVSGNCDVVIGIVNNTVYDPLQPELDSFKEELDKYFKNHTSPDVDLGDISGINASVVNIQKEIDRLNEVAKNLNESLIDLQELGKYEQYIKGGGSGGGQIYEGKLTAEGLRFGIVASRFNHALVDRLVEGAIDAIVRHGGREEDITLVRVPGSWEIPVAAGELARKEDIDAVIAIGVLIRGATPHFDYIASEVSKGLADLSLELRKPITFGVITADTLEQAIERAGTKHGNKGWEAALSAIEMANLFKSLR

SEQ ID NO: 3818 - protein, 1371 aa, Artificial Sequence
  SARS-CoV-2/USA/UT-00033/2020__EPI_ISL_417976 spike protein (1-1211)(K986P_V987P_T887W_A1020W) LumSynth construct
MFVFLVLLPLVSSQCVNLTTRTQLPPAYTNSFTRGVYYPDKVFRSSVLHSTQDLFLPFFSNVTWFHAIHVSGTNGTKRFDNPVLPFNDGVYFASTEKSNIIRGWIFGTTLDSKTQSLLIVNNATNVVIKVCEFQFCNDPFLGVYYHKNNKSWMESEFRVYSSANNCTFEYVSQPFLMDLEGKQGNFKNLREFVFKNIDGYFKIYSKHTPINLVRDLPQGFSALEPLVDLPIGINITRFQTLLALHRSYLTPGDSSSGLTAGAAAYYVGYLQPRTFLLKYNENGTITDAVDCALDPLSETKCTLKSFTVEKGIYQTSNFRVQPTESIVRFPNITNLCPFGEVFNATRFASVYAWNRKRISNCVADYSVLYNSASFSTFKCYGVSPTKLNDLCFTNVYADSFVIRGDEVRQIAPGQTGKIADYNYKLPDDFTGCVIAWNSNNLDSKVGGNYNYLYRLFRKSNLKPFERDISTEIYQAGSTPCNGVEGFNCYFPLQSYGFQPTNGVGYQPYRVVVLSFELLHAPATVCGPKKSTNLVKNKCVNFNFNGLTGTGVLTESNKKFLPFQQFGRDIADTTDAVRDPQTLEILDITPCSFGGVSVITPGTNTSNQVAVLYQGVNCTEVPVAIHADQLTPTWRVYSTGSNVFQTRAGCLIGAEHVNNSYECDIPIGAGICASYQTQTNSPRRARSVASQSIIAYTMSLGAENSVAYSNNSIAIPTNFTISVTTEILPVSMTKTSVDCTMYICGDSTECSNLLLQYGSFCTQLNRALTGIAVEQDKNTQEVFAQVKQIYKTPPIKDFGGFNFSQILPDPSKPSKRSFIEDLLFNKVTLADAGFIKQYGDCLGDIAARDLICAQKFNGLTVLPPLLTDEMIAQYTSALLAGTITSGWWFGAGAALQIPFAMQMAYRFNGIGVTQNVLYENQKLIANQFNSAIGKIQDSLSSTASALGKLQDVVNQNAQALNTLVKQLSSNFGAISSVLNDILSRLDPPEAEVQIDRLITGRLQSLQTYVTQQLIRAAEIRWSANLAATKMSECVLGQSKRVDFCGKGYHLMSFPQSAPHGVVFLHVTYVPAQEKNFTTAPAICHDGKAHFPREGVFVSNGTHWFVTQRNFYEPQIITTDNTFVSGNCDVVIGIVNNTVYDPLQPELDSFKEELDKYFKNHTSPDVDLGDISGINASVVNIQKEIDRLNEVAKNLNESLIDLQELGKYEQYIKGGGSGGGQIYEGKLTAEGLRFGIVASRFNHALVDRLVEGAIDAIVRHGGREEDITLVRVPGSWEIPVAAGELARKEDIDAVIAIGVLIRGATPHFDYIASEVSKGLADLSLELRKPITFGVITADTLEQAIERAGTKHGNKGWEAALSAIEMANLFKSLR

SEQ ID NO: 3819 - protein, 1371 aa, Artificial Sequence
  SARS-CoV-2/USA/WI-13/2020__EPI_ISL_417516 spike protein (1-1211)(K986P_V987P_T887W_A1020W) LumSynth construct
MFVFLVLLPLVSSQCVNLTTRTQLPPAYTNSFTRGVYYPDKVFRSSVLHSTQDLFLPFFSNVTWFHAIHVSGTNGTKRFDNPVLPFNDGVYFASTEKSNIIRGWIFGTTLDSKTQSLLIVNNATNVVIKVCEFQFCNDPFLGVYYHKNNKSWMESEFRVYSSANNCTFEYVSQPFLMDLEGKQGNFKNLREFVFKNIDGYFKIYSKHTPINLVRDLPQGFSALEPLVDLPIGINITRFQTLLALHRSYLTPGDSSSGWTAGAAAYYVGYLQPRTFLLKYNENGTITDAVDCALDPLSETKCTLKSFTVEKGIYQTSNFRVLPTESIVRFPNITNLCPFGEVFNATRFASVYAWNRKRISNCVADYSVLYNSASFSTFKCYGVSPTKLNDLCFTNVYADSFVIRGDEVRQIAPGQTGKIADYNYKLPDDFTGCVIAWNSNNLDSKVGGNYNYLYRLFRKSNLKPFERDISTEIYQAGSTPCNGVEGFNCYFPLQSYGFQPTNGVGYQPYRVVVLSFELLHAPATVCGPKKSTNLVKNKCVNFNFNGLTGTGVLTESNKKFLPFQQFGRDIADTTDAVRDPQTLEILDITPCSFGGVSVITPGTNTSNQVAVLYQGVNCTEVPVAIHADQLTPTWRVYSTGSNVFQTRAGCLIGAEHVNNSYECDIPIGAGICASYQTQTNSPRRARSVASQSIIAYTMSLGAENSVAYSNNSIAIPTNFTISVTTEILPVSMTKTSVDCTMYICGDSTECSNLLLQYGSFCTQLNRALTGIAVEQDKNTQEVFAQVKQIYKTPPIKDFGGFNFSQILPDPSKPSKRSFIEDLLFNKVTLADAGFIKQYGDCLGDIAARDLICAQKFNGLTVLPPLLTDEMIAQYTSALLAGTITSGWWFGAGAALQIPFAMQMAYRFNGIGVTQNVLYENQKLIANQFNSAIGKIQDSLSSTASALGKLQDVVNQNAQALNTLVKQLSSNFGAISSVLNDILSRLDPPEAEVQIDRLITGRLQSLQTYVTQQLIRAAEIRWSANLAATKMSECVLGQSKRVDFCGKGYHLMSFPQSAPHGVVFLHVTYVPAQEKNFTTAPAICHDGKAHFPREGVFVSNGTHWFVTQRNFYEPQIITTDNTFVSGNCDVVIGIVNNTVYDPLQPELDSFKEELDKYFKNHTSPDVDLGDISGINASVVNIQKEIDRLNEVAKNLNESLIDLQELGKYEQYIKGGGSGGGQIYEGKLTAEGLRFGIVASRFNHALVDRLVEGAIDAIVRHGGREEDITLVRVPGSWEIPVAAGELARKEDIDAVIAIGVLIRGATPHFDYIASEVSKGLADLSLELRKPITFGVITADTLEQAIERAGTKHGNKGWEAALSAIEMANLFKSLR

SEQ ID NO: 3820 - protein, 1370 aa, Artificial Sequence
  SARS-CoV-2/India/1-27/2020__EPI_ISL_413522 spike protein (1-1210)(K985P_V986P_T886W_A1019W) LumSynth construct
MFVFLVLLPLVSSQCVNLTTRTQLPPAYTNSFTRGVYYPDKVFRSSVLHSTQDLFLPFFSNVTWFHAIHVSGTNGTKRFDNPVLPFNDGVYFASTEKSNIIRGWIFGTTLDSKTQSLLIVNNATNVVIKVCEFQFCNDPFLGVYHKNNKSWMESEFRVYSSANNCTFEYVSQPFLMDLEGKQGNFKNLREFVFKNIDGYFKIYSKHTPINLVRDLPQGFSALEPLVDLPIGINITRFQTLLALHRSYLTPGDSSSGWTAGAAAYYVGYLQPRTFLLKYNENGTITDAVDCALDPLSETKCTLKSFTVEKGIYQTSNFRVQPTESIVRFPNITNLCPFGEVFNATRFASVYAWNRKRISNCVADYSVLYNSASFSTFKCYGVSPTKLNDLCFTNVYADSFVIRGDEVIQIAPGQTGKIADYNYKLPDDFTGCVIAWNSNNLDSKVGGNYNYLYRLFRKSNLKPFERDISTEIYQAGSTPCNGVEGFNCYFPLQSYGFQPTNGVGYQPYRVVVLSFELLHAPATVCGPKKSTNLVKNKCVNFNFNGLTGTGVLTESNKKFLPFQQFGRDIADTTDAVRDPQTLEILDITPCSFGGVSVITPGTNTSNQVAVLYQDVNCTEVPVAIHADQLTPTWRVYSTGSNVFQTRAGCLIGAEHVNNSYECDIPIGAGICASYQTQTNSPRRARSVASQSIIAYTMSLGAENSVAYSNNSIAIPTNFTISVTTEILPVSMTKTSVDCTMYICGDSTECSNLLLQYGSFCTQLNRALTGIAVEQDKNTQEVFAQVKQIYKTPPIKDFGGFNFSQILPDPSKPSKRSFIEDLLFNKVTLADAGFIKQYGDCLGDIAARDLICAQKFNGLTVLPPLLTDEMIAQYTSALLAGTITSGWWFGAGAALQIPFAMQMAYRFNGIGVTQNVLYENQKLIANQFNSAIGKIQDSLSSTASALGKLQDVVNQNAQALNTLVKQLSSNFGAISSVLNDILSRLDPPEAEVQIDRLITGRLQSLQTYVTQQLIRAAEIRWSANLAATKMSECVLGQSKRVDFCGKGYHLMSFPQSAPHGVVFLHVTYVPAQEKNFTTAPAICHDGKAHFPREGVFVSNGTHWFVTQRNFYEPQIITTDNTFVSGNCDVVIGIVNNTVYDPLQPELDSFKEELDKYFKNHTSPDVDLGDISGINASVVNIQKEIDRLNEVAKNLNESLIDLQELGKYEQYIKGGGSGGGQIYEGKLTAEGLRFGIVASRFNHALVDRLVEGAIDAIVRHGGREEDITLVRVPGSWEIPVAAGELARKEDIDAVIAIGVLIRGATPHFDYIASEVSKGLADLSLELRKPITFGVITADTLEQAIERAGTKHGNKGWEAALSAIEMANLFKSLR

SEQ ID NO: 3821 - protein, 1365 aa, Artificial Sequence
  SARS-CoV-2/pangolin/Guangxi/P4L/2017__EPI_ISL_410538 spike protein (1-1205)(K980P_V981P_T881W_A1014W) LumSynth construct
MFVFLFVLPLVSSQCVNLTTRTGIPPGYTNSSTRGVYYPDKVFRSSILHLTQDLFLPFFSNVTWFNTINYQGGFKKFDNPVLPFNDGVYFASTEKSNIIRGWIFGTTLDARTQSLLIVNNATNVVIKVCEFQFCTDPFLGVYYHNNNKTWVENEFRVYSSANNCTFEYISQPFLMDLEGKQGNFKNLREFVFKNVDGYFKIYSKHTPIDLVRDLPRGFAALEPLVDLPIGINITRFQTLLALHRSYLTPGNLESGWTTGAAAYYVGYLQQRTFLLSYNQNGTITDAVDCSLDPLSETKCTLKSLTVEKGIYQTSNFRVQPTISIVRFPNITNLCPFGEVFNASKFASVYAWNRKRISNCVADYSVLYNSTSFSTFKCYGVSPTKLNDLCFTNVYADSFVVKGDEVRQIAPGQTGVIADYNYKLPDDFTGCVIAWNSVKQDALTGGNYGYLYRLFRKSKLKPFERDISTEIYQAGSTPCNGQVGLNCYYPLERYGFHPTTGVNYQPFRVVVLSFELLNGPATVCGPKLSTTLVKDKCVNFNFNGLTGTGVLTTSKKQFLPFQQFGRDISDTTDAVRDPQTLEILDITPCSFGGVSVITPGTNTSNQVAVLYQDVNCTEVPMAIHAEQLTPAWRVYSAGANVFQTRAGCLVGAEHVNNSYECDIPVGAGICASYHSMSSLRSVNQRSIIAYTMSLGAENSVAYSNNSIAIPTNFTISVTTEILPVSMTKTSVDCTMYICGDSIECSNLLLQYGSFCTQLNRALTGIAVEQDKNTQEVFAQVKQIYKTPPIKDFGGFNFSQILPDPSKPSKRSFIEDLLFNKVTLADAGFIKQYGDCLGDIAARDLICAQKFNGLTVLPPLLTDEMIAQYTSALLAGTITSGWWFGAGAALQIPFAMQMAYRFNGIGVTQNVLYENQKLIANQFNSAIGKIQDSLSSTASALGKLQDVVNQNAQALNTLVKQLSSNFGAISSVLNDILSRLDPPEAEVQIDRLITGRLQSLQTYVTQQLIRAAEIRWSANLAATKMSECVLGQSKRVDFCGKGYHLMSFPQSAPHGVVFLHVTYVPAQEKNFTTAPAICHEGKAHFPREGVFVSNGTHWFITQRNFYEPQIITTDNTFVSGSCDVVIGIVNNTVYDPLQPELDSFKEELDKYFKNHTSPDVDLGDISGINASVVNIQKEIDRLNEVAKNLNESPIDLQELGKYEQYIKGGGSGGGQIYEGKLTAEGLRFGIVASRFNHALVDRLVEGAIDAIVRHGGREEDITLVRVPGSWEIPVAAGELARKEDIDAVIAIGVLIRGATPHFDYIASEVSKGLADLSLELRKPITFGVITADTLEQAIERAGTKHGNKGWEAALSAIEMANLFKSLR

SEQ ID NO: 3822 - protein, 1365 aa, Artificial Sequence
  SARS-CoV-2/pangolin/Guangxi/P5L/2017__EPI_ISL_410540 spike protein (1-1205)(K980P_V981P_T881W_A1014W) LumSynth construct
MFVFLFVLPLVSSQCVNLTTRTGIPPGYTNSSTRGVYYPDKVFRSSILHLTQDLFLPFFSNVTWFNTINYQGGFKKFDNPVLPFNDGVYFASTEKSNIIRGWIFGTTLDARTQSLLIVNNATNVVIKVCEFQFCTDPFLGVYYHNNNKTWVENEFRVYSSANNCTFEYISQPFLMDLEGKQGNFKNLREFVFKNVDGYFKIYSKHTPIDLVRDLPRGFAALEPLVDLPIGINITRFQTLLALHRSYLTPGKLESGWTTGAAAYYVGYLQQRTFLLSYNQNGTITDAVDCSLDPLSETKCTLKSLTVEKGIYQTSNFRVQPTISIVRFPNITNLCPFGEVFNASKFASVYAWNRKRISNCVADYSVLYNSTSFSTFKCYGVSPTKLNDLCFTNVYADSFVVKGDEVRQIAPGQTGVIADYNYKLPDDFTGCVIAWNSVKQDALTGGNYGYLYRLFRKSKLKPFERDISTEIYQAGSTPCNGQVGLNCYYPLERYGFHPTTGVNYQPFRVVVLSFELLNGPATVCGPKLSTTLVKDKCVNFNFNGLTGTGVLTTSKKQFLPFQQFGRDISDTTDAVRDPQTLEILDITPCSFGGVSVITPGTNTSNQVAVLYQDVNCTEVPMAIHAEQLTPAWRVYSAGANVFQTRAGCLVGAEHVNNSYECDIPVGAGICASYHSMSSFRSVNQRSIIAYTMSLGAENSVAYSNNSIAIPTNFTISVTTEILPVSMTKTSVDCTMYICGDSIECSNLLLQYGSFCTQLNRALTGIAVEQDKNTQEVFAQVKQIYKTPPIKDFGGFNFSQILPDPSKPSKRSFIEDLLFNKVTLADAGFIKQYGDCLGDIAARDLICAQKFNGLTVLPPLLTDEMIAQYTSALLAGTITSGWWFGAGAALQIPFAMQMAYRFNGIGVTQNVLYENQKLIANQFNSAIGKIQDSLSSTASALGKLQDVVNQNAQALNTLVKQLSSNFGAISSVLNDILSRLDPPEAEVQIDRLITGRLQSLQTYVTQQLIRAAEIRWSANLAATKMSECVLGQSKRVDFCGKGYHLMSFPQSAPHGVVFLHVTYVPAQEKNFTTAPAICHEGKAHFPREGVFVSNGTHWFITQRNFYEPQIITTDNTFVSGSCDVVIGIVNNTVYDPLQPELDSFKEELDKYFKNHTSPDVDLGDISGINASVVNIQKEIDRLNEVAKNLNESLIDLQELGKYEQYIKGGGSGGGQIYEGKLTAEGLRFGIVASRFNHALVDRLVEGAIDAIVRHGGREEDITLVRVPGSWEIPVAAGELARKEDIDAVIAIGVLIRGATPHFDYIASEVSKGLADLSLELRKPITFGVITADTLEQAIERAGTKHGNKGWEAALSAIEMANLFKSLR

SEQ ID NO: 3823 - protein, 1365 aa, Artificial Sequence
  SARS-CoV-2/pangolin/Guangxi/P5E/2017__EPI_ISL_410541 spike protein (1-1205)(K980P_V981P_T881W_A1014W) LumSynth construct
MFVFLFVLPLVSSQCVNLTTRTGIPPGYTNSSTRGVYYPDKVFRSSILHLTQDLFLPFFSNVTWFNTITYQGGSKKFDNPVLPFNDGVYFASTEKSNIIRGWIFGTTLDARTQSLLIVNNATNVVIKVCEFQFCTDPFLGVYYHNNNKTWVENEFRVYSSANNCTFEYISQPFLMDLEGKQGNFKNLREFVFKNVDGYFKIYSKHTPIDLVRDLPRGFAALEPLVDLPIGINITRFQTLLALHRSYLTPGKLESGWTTGAAAYYVGYLQQRTFLLSYNQNGTITDAVDCSLDPLSETKCTLKSLTVEKGIYQTSNFRVQPTISIVRFPNITNLCPFGEVFNASKFASVYAWNRKRISNCVADYSVLYNSTSFSTFKCYGVSPTKLNDLCFTNVYADSFVVKGDEVRQIAPGQTGVIADYNYKLPDDFTGCVIAWNSVKQDALTGDNYGYLYRLFRKSKLKPFERDISTEIYQAGSTPCNGQVGLNCYYPLERYGFHPTTGVNYQPFRVVVLSFELLNGPATVCGPKLSTTLVKDKCVNFNFNGLTGTGVLTTSKKQFLPFQQFGRDISDTTDAVRDPQTLEILDITPCSFGGVSVITPGTNTSNQVAVLYQDVNCTEVPMAIHAEQLTPAWRVYSAGANVFQTRAGCLVGAEHVNNSYECDIPVGAGICASYHSMSSFRSVNQRSIIAYTMSLGAENSVAYSNNSIAIPTNFTISVTTEILPVSMTKTSVDCTMYICGDSIECSNLLLQYGSFCTQLNRALTGIAVEQDKNTQEVFAQVKQIYKTPPIKDFGGFNFSQILPDPSKPSKRSFIEDLLFNKVTLADAGFIKQYGDCLGDIAARDLICAQKFNGLTVLPPLLTDEMIAQYTSALLAGTITSGWWFGAGAALQIPFAMQMAYRFNGIGVTQNVLYENQKLIANQFNSAIGKIQDSLSSTASALGKLQDVVNQNAQALNTLVKQLSSNFGAISSVLNDILSRLDPPEAEVQIDRLITGRLQSLQTYVTQQLIRAAEIRWSANLAATKMSECVLGQSKRVDFCGKGYHLMSFPQSAPHGVVFLHVTYVPAQEKNFTTAPAICHEGKAHFPREGVFVSNGTHWFITQRNFYEPQIITTDNTFVSGSCDVVIGIVNNTVYDPLQPELDSFKEELDKYFKNHTSPDVDLGDISGINASVVNIQKEIDRLNEVAKNLNESLIDLQELGKYEQYIKGGGSGGGQIYEGKLTAEGLRFGIVASRFNHALVDRLVEGAIDAIVRHGGREEDITLVRVPGSWEIPVAAGELARKEDIDAVIAIGVLIRGATPHFDYIASEVSKGLADLSLELRKPITFGVITADTLEQAIERAGTKHGNKGWEAALSAIEMANLFKSLR

SEQ ID NO: 3824 - protein, 1363 aa, Artificial Sequence
  SARS-CoV-2/pangolin/Guangxi/P1E/2017__EPI_ISL_410539 spike protein (1-1203)(K978P_V979P_T879W_A1012W) LumSynth construct
MFVFLFVLPLVSSQCVNLTTRTGIQPGYTNSSTRGVYYPDKVFRSSILHLTQDLFLPFFSNVTWFNTINYQGGFKKFDNPVLPFNDGVYFASTEKSNIIRGWIFGTTLDARTQSLLIVNNATNVVIKVCEFQFCTDPFLGVYYHNNNKTWVENEFRVYSSANNCTFEYISQPFLMDLEGKQGNFKNLREFVFKNVDGYFKIYSKHTPIDLVRDLPRGFAALEPLVDLPIGINITRFQTLLALHRSYLTPGKLESGWTTGAAAYYVGYLQQRTFLLSYNQNGTITDAVDCSLDPLSETKCTLKSLTVEKGIYQTSNFRVQPTISIVRFPNITNLCPFGEVFNASKFASVYAWNRKRISNCVADYSVLYNSTSFSTFKCYGVSPTKLNDLCFTNVYADSFVVKGDEVRQIAPGQTGVIADYNYKLPDDFTGCVIAWNSVKQDALTGGNYLYRLFRKSKLKPFERDISTEIYQAGSTPCNGQVGLNCYYPLERYGFHPTTGVNYQPFRVVVLSFELLNGPATVCGPKLSTTLVKDKCVNFNFNGLTGTGVLTTSKKQFLPFQQFGRDISDTTDAVRDPQTLEILDITPCSFGGVSVITPGTNTSNQVAVLYQDVNCTEVPMAIHAEQLTPAWRVYSAGANVFQTRAGCLVGAEHVNNSYECDIPVGAGICASYHSMSSLRSVNQRSIIAYTMSLGAENSVAYSNNSIAIPTNFTISVTTEILPVSMTKTSVDCTMYICGDSIECSNLLLQYGSFCTQLNRALTGIAVEQDKNTQEVFAQVKQIYKTPPIKDFGGFNFSQILPDPSKPSKRSFIEDLLFNKVTLADAGFIKQYGDCLGDIAARDLICAQKFNGLTVLPPLLTDEMIAQYTSALLAGTITSGWWFGAGAALQIPFAMQMAYRFNGIGVTQNVLYENQKLIANQFNSAIGKIQDSLSSTASALGKLQDVVNQNAQALNTLVKQLSSNFGAISSVLNDILSRLDPPEAEVQIDRLITGRLQSLQTYVTQQLIRAAEIRWSANLAATKMSECVLGQSKRVDFCGKGYHLMSFPQSAPHGVVFLHVTYVPAQEKNFTTAPAICHEGKAHFPREGVFVSNGTHWFITQRNFYEPQIITTDNTFVSGSCDVVIGIVNNTVYDPLQPELDSFKEELDKYFKNHTSPDVDLGDISGINASVVNIQKEIDRLNEVAKNLNESLIDLQELGKYEQYIKGGGSGGGQIYEGKLTAEGLRFGIVASRFNHALVDRLVEGAIDAIVRHGGREEDITLVRVPGSWEIPVAAGELARKEDIDAVIAIGVLIRGATPHFDYIASEVSKGLADLSLELRKPITFGVITADTLEQAIERAGTKHGNKGWEAALSAIEMANLFKSLR

SEQ ID NO: 3825 - protein, 1371 aa, Artificial Sequence
  SARS-CoV-2/Wuhan/WIV05/2019__EPI_ISL_402128 spike protein (1-1211)(K986P_V987P_P1069F) LumSynth construct
MFVFLVLLPLVSSQCVNLTTRTQLPPAYTNSFTRGVYYPDKVFRSSVLHSTQDLFLPFFSNVTWFHAIHVSGTNGTKRFDNPVLPFNDGVYFASTEKSNIIRGWIFGTTLDSKTQSLLIVNNATNVVIKVCEFQFCNDPFLGVYYHKNNKSWMESEFRVYSSANNCTFEYVSQPFLMDLEGKQGNFKNLREFVFKNIDGYFKIYSKHTPINLVRDLPQGFSALEPLVDLPIGINITRFQTLLALHRSYLTPGDSSSGWTAGAAAYYVGYLQPRTFLLKYNENGTITDAVDCALDPLSETKCTLKSFTVEKGIYQTSNFRVQPTESIVRFPNITNLCPFGEVFNATRFASVYAWNRKRISNCVADYSVLYNSASFSTFKCYGVSPTKLNDLCFTNVYADSFVIRGDEVRQIAPGQTGKIADYNYKLPDDFTGCVIAWNSNNLDSKVGGNYNYLYRLFRKSNLKPFERDISTEIYQAGSTPCNGVEGFNCYFPLQSYGFQPTNGVGYQPYRVVVLSFELLHAPATVCGPKKSTNLVKNKCVNFNFNGLTGTGVLTESNKKFLPFQQFGRDIADTTDAVRDPQTLEILDITPCSFGGVSVITPGTNTSNQVAVLYQDVNCTEVPVAIHADQLTPTWRVYSTGSNVFQTRAGCLIGAEHVNNSYECDIPIGAGICASYQTQTNSPRRARSVASQSIIAYTMSLGAENSVAYSNNSIAIPTNFTISVTTEILPVSMTKTSVDCTMYICGDSTECSNLLLQYGSFCTQLNRALTGIAVEQDKNTQEVFAQVKQIYKTPPIKDFGGFNFSQILPDPSKPSKRSFIEDLLFNKVTLADAGFIKQYGDCLGDIAARDLICAQKFNGLTVLPPLLTDEMIAQYTSALLAGTITSGWTFGAGAALQIPFAMQMAYRFNGIGVTQNVLYENQKLIANQFNSAIGKIQDSLSSTASALGKLQDVVNQNAQALNTLVKQLSSNFGAISSVLNDILSRLDPPEAEVQIDRLITGRLQSLQTYVTQQLIRAAEIRASANLAATKMSECVLGQSKRVDFCGKGYHLMSFPQSAPHGVVFLHVTYVFAQEKNFTTAPAICHDGKAHFPREGVFVSNGTHWFVTQRNFYEPQIITTDNTFVSGNCDVVIGIVNNTVYDPLQPELDSFKEELDKYFKNHTSPDVDLGDISGINASVVNIQKEIDRLNEVAKNLNESLIDLQELGKYEQYIKGGGSGGGQIYEGKLTAEGLRFGIVASRFNHALVDRLVEGAIDAIVRHGGREEDITLVRVPGSWEIPVAAGELARKEDIDAVIAIGVLIRGATPHFDYIASEVSKGLADLSLELRKPITFGVITADTLEQAIERAGTKHGNKGWEAALSAIEMANLFKSLR

SEQ ID NO: 3826 - protein, 1367 aa, Artificial Sequence
  SARS-CoV-2/bat/Yunnan/RaTG13/2013__EPI_ISL_402131 spike protein (1-1207)(K982P_V983P_P1065F) LumSynth construct
MFVFLVLLPLVSSQCVNLTTRTQLPPAYTNSSTRGVYYPDKVFRSSVLHLTQDLFLPFFSNVTWFHAIHVSGTNGIKRFDNPVLPFNDGVYFASTEKSNIIRGWIFGTTLDSKTQSLLIVNNATNVVIKVCEFQFCNDPFLGVYYHKNNKSWMESEFRVYSSANNCTFEYVSQPFLMDLEGKQGNFKNLREFVFKNIDGYFKIYSKHTPINLVRDLPPGFSALEPLVDLPIGINITRFQTLLALHRSYLTPGDSSSGWTAGAAAYYVGYLQPRTFLLKYNENGTITDAVDCALDPLSETKCTLKSFTVEKGIYQTSNFRVQPTDSIVRFPNITNLCPFGEVFNATTFASVYAWNRKRISNCVADYSVLYNSTSFSTFKCYGVSPTKLNDLCFTNVYADSFVITGDEVRQIAPGQTGKIADYNYKLPDDFTGCVIAWNSKHIDAKEGGNFNYLYRLFRKANLKPFERDISTEIYQAGSKPCNGQTGLNCYYPLYRYGFYPTDGVGHQPYRVVVLSFELLNAPATVCGPKKSTNLVKNKCVNFNFNGLTGTGVLTESNKKFLPFQQFGRDIADTTDAVRDPQTLEILDITPCSFGGVSVITPGTNASNQVAVLYQDVNCTEVPVAIHADQLTPTWRVYSTGSNVFQTRAGCLIGAEHVNNSYECDIPIGAGICASYQTQTNSRSVASQSIIAYTMSLGAENSVAYSNNSIAIPTNFTISVTTEILPVSMTKTSVDCTMYICGDSTECSNLLLQYGSFCTQLNRALTGIAVEQDKNTQEVFAQVKQIYKTPPIKDFGGFNFSQILPDPSKPSKRSFIEDLLFNKVTLADAGFIKQYGDCLGDIAARDLICAQKFNGLTVLPPLLTDEMIAQYTSALLAGTITSGWTFGAGAALQIPFAMQMAYRFNGIGVTQNVLYENQKLIANQFNSAIGKIQDSLSSTASALGKLQDVVNQNAQALNTLVKQLSSNFGAISSVLNDILSRLDPPEAEVQIDRLITGRLQSLQTYVTQQLIRAAEIRASANLAATKMSECVLGQSKRVDFCGKGYHLMSFPQSAPHGVVFLHVTYVFAQEKNFTTAPAICHDGKAHFPREGVFVSNGTHWFVTQRNFYEPQIITTDNTFVSGSCDVVIGIVNNTVYDPLQPELDSFKEELDKYFKNHTSPDVDLGDISGINASVVNIQKEIDRLNEVAKNLNESLIDLQELGKYEQYIKGGGSGGGQIYEGKLTAEGLRFGIVASRFNHALVDRLVEGAIDAIVRHGGREEDITLVRVPGSWEIPVAAGELARKEDIDAVIAIGVLIRGATPHFDYIASEVSKGLADLSLELRKPITFGVITADTLEQAIERAGTKHGNKGWEAALSAIEMANLFKSLR

SEQ ID NO: 3827 - protein, 1371 aa, Artificial Sequence
  SARS-CoV-2/Wuhan/HBCDC-HB-01/2019__EPI_ISL_402132 spike protein (1-1211)(K986P_V987P_P1069F) LumSynth construct
MFVFLVLLPLVSSQCVNLTTRTQLPPAYTNSITRGVYYPDKVFRSSVLHSTQDLFLPFFSNVTWFHAIHVSGTNGTKRFDNPVLPFNDGVYFASTEKSNIIRGWIFGTTLDSKTQSLLIVNNATNVVIKVCEFQFCNDPFLGVYYHKNNKSWMESEFRVYSSANNCTFEYVSQPFLMDLEGKQGNFKNLREFVFKNIDGYFKIYSKHTPINLVRDLPQGFSALEPLVDLPIGINITRFQTLLALHRSYLTPGDSSSGWTAGAAAYYVGYLQPRTFLLKYNENGTITDAVDCALDPLSETKCTLKSFTVEKGIYQTSNFRVQPTESIVRFPNITNLCPFGEVFNATRFASVYAWNRKRISNCVADYSVLYNSASFSTFKCYGVSPTKLNDLCFTNVYADSFVIRGDEVRQIAPGQTGKIADYNYKLPDDFTGCVIAWNSNNLDSKVGGNYNYLYRLFRKSNLKPFERDISTEIYQAGSTPCNGVEGFNCYFPLQSYGFQPTNGVGYQPYRVVVLSFELLHAPATVCGPKKSTNLVKNKCVNFNFNGLTGTGVLTESNKKFLPFQQFGRDIADTTDAVRDPQTLEILDITPCSFGGVSVITPGTNTSNQVAVLYQDVNCTEVPVAIHADQLTPTWRVYSTGSNVFQTRAGCLIGAEHVNNSYECDIPIGAGICASYQTQTNSPRRARSVASQSIIAYTMSLGAENSVAYSNNSIAIPTNFTISVTTEILPVSMTKTSVDCTMYICGDSTECSNLLLQYGSFCTQLNRALTGIAVEQDKNTQEVFAQVKQIYKTPPIKDFGGFNFSQILPDPSKPSKRSFIEDLLFNKVTLADAGFIKQYGDCLGDIAARDLICAQKFNGLTVLPPLLTDEMIAQYTSALLAGTITSGWTFGAGAALQIPFAMQMAYRFNGIGVTQNVLYENQKLIANQFNSAIGKIQDSLSSTASALGKLQDVVNQNAQALNTLVKQLSSNFGAISSVLNDILSRLDPPEAEVQIDRLITGRLQSLQTYVTQQLIRAAEIRASANLAATKMSECVLGQSKRVDFCGKGYHLMSFPQSAPHGVVFLHVTYVFAQEKNFTTAPAICHDGKAHFPREGVFVSNGTHWFVTQRNFYEPQIITTDNTFVSGNCDVVIGIVNNTVYDPLQPELDSFKEELDKYFKNHTSPDVDLGDISGINASVVNIQKEIDRLNEVAKNLNESLIDLQELGKYEQYIKGGGSGGGQIYEGKLTAEGLRFGIVASRFNHALVDRLVEGAIDAIVRHGGREEDITLVRVPGSWEIPVAAGELARKEDIDAVIAIGVLIRGATPHFDYIASEVSKGLADLSLELRKPITFGVITADTLEQAIERAGTKHGNKGWEAALSAIEMANLFKSLR

SEQ ID NO: 3828 - protein, 1371 aa, Artificial Sequence
  SARS-CoV-2/Guangdong/20SF028/2020__EPI_ISL_403936 spike protein (1-1211)(K986P_V987P_P1069F) LumSynth construct
MFVFLVLLPLVSSQCVNLTTRTQLPPAYTNSFTRGVYYPDKVFRSSVLYSTQDLFLPFFSNVTWFHAIHVSGTNGTKRFDNPVLPFNDGVYFASTEKSNIIRGWIFGTTLDSKTQSLLIVNNATNVVIKVCEFQFCNDPFLGVYYHKNNKSWMESEFRVYSSANNCTFEYVSQPFLMDLEGKQGNFKNLREFVFKNIDGYFKIYSKHTPINLVRDLPQGFSALEPLVDLPIGINITRFQTLLALHRSYLTPGDSSSGWTAGAAAYYVGYLQPRTFLLKYNENGTITDAVDCALDPLSETKCTLKSFTVEKGIYQTSNFRVQPTESIVRFPNITNLCPFGEVFNATRFASVYAWNRKRISNCVADYSVLYNSASFSTFKCYGVSPTKLNDLCFTNVYADSFVIRGDEVRQIAPGQTGKIADYNYKLPDDFTGCVIAWNSNNLDSKVGGNYNYLYRLFRKSNLKPFERDISTEIYQAGSTPCNGVEGFNCYFPLQSYGFQPTNGVGYQPYRVVVLSFELLHAPATVCGPKKSTNLVKNKCVNFNFNGLTGTGVLTESNKKFLPFQQFGRDIADTTDAVRDPQTLEILDITPCSFGGVSVITPGTNTSNQVAVLYQDVNCTEVPVAIHADQLTPTWRVYSTGSNVFQTRAGCLIGAEHVNNSYECDIPIGAGICASYQTQTNSPRRARSVASQSIIAYTMSLGAENSVAYSNNSIAIPTNFTISVTTEILPVSMTKTSVDCTMYICGDSTECSNLLLQYGSFCTQLNRALTGIAVEQDKNTQEVFAQVKQIYKTPPIKDFGGFNFSQILPDPSKPSKRSFIEDLLFNKVTLADAGFIKQYGDCLGDIAARDLICAQKFNGLTVLPPLLTDEMIAQYTSALLAGTITSGWTFGAGAALQIPFAMQMAYRFNGIGVTQNVLYENQKLIANQFNSAIGKIQDSLSSTASALGKLQDVVNQNAQALNTLVKQLSSNFGAISSVLNDILSRLDPPEAEVQIDRLITGRLQSLQTYVTQQLIRAAEIRASANLAATKMSECVLGQSKRVDFCGKGYHLMSFPQSAPHGVVFLHVTYVFAQEKNFTTAPAICHDGKAHFPREGVFVSNGTHWFVTQRNFYEPQIITTDNTFVSGNCDVVIGIVNNTVYDPLQPELDSFKEELDKYFKNHTSPDVDLGDISGINASVVNIQKEIDRLNEVAKNLNESLIDLQELGKYEQYIKGGGSGGGQIYEGKLTAEGLRFGIVASRFNHALVDRLVEGAIDAIVRHGGREEDITLVRVPGSWEIPVAAGELARKEDIDAVIAIGVLIRGATPHFDYIASEVSKGLADLSLELRKPITFGVITADTLEQAIERAGTKHGNKGWEAALSAIEMANLFKSLR

SEQ ID NO: 3829 - protein, 1371 aa, Artificial Sequence
  SARS-CoV-2/Shenzhen/SZTH-001/2020__EPI_ISL_406592 spike protein (1-1211)(K986P_V987P_P1069F) LumSynth construct
MFVFLVLLPLVSSQCVNLTTRTQLPPAYTNSFTRGVYYPDKVFRSSVLHSTQDLFLPFFSNVTWFHAIHVSGTNGTKRFDNPVLPFNDGVYFASTEKSNIIRGWIFGTTLDSKTQSLLIVNNATNVVIKVCEFQFCNDPFLGVYYHKNNKSWMESEFRVYSSANNCTFEYVSQPFLMDLEGKQGNFKNLREFVFKNIDGYFKIYSKHTPINLVRDLPQGFSALEPLVDLPIGINITRFQTLLALHRSYLTPGDSSSGWTAGAAAYYVGYLQPRTFLLKYNENGTITDAVDCALDPLSETKCTLKSFTVEKGIYQTSNFRVQPTESIVRFPNITNLCPFGEVFNATRFASVYAWNRKRISNCVADYSVLYNSASFSTFKCYGVSPTKLNDLCFTNVYADSFVIRGDEVRQIAPGQTGKIADYNYKLPDDFTGCVIAWNSNNLDSKVGGNYNYLYRLFRKSNLKPFERDISTEIYQAGSTPCNGVEGFNCYFPLQSYGFQPTNGVGYQPYRVVVLSFELLHAPATVCGPKKSTNLVKNKCVNFNFNGLTGTGVLTESNKKFLPFQQFGRDIADTTDAVRDPQTLEILDITPCSFGGVSVITPGTNTSNQVAVLYQDVNCTEVPVAIHADQLTPTWRVYSTGSNVFQTRAGCLIGAEHVNNSYECDIPIGAGICASYQTQTNSPRRARSVASQSIIAYTMSLGAENSVAYSNNSIAIPTNFTISVTTEILPVSMTKTSVDCTMYICGDSTECSNLLLQYGSFCTQLNRALTGIAVEQDKNTQEVFAQVKQIYKTPPIKDFGGFNFSQILPDPSKPSKRSFIEDLLFNKVTLADAGFIKQYGDCLGDIAARDLICAQKFNGLTVLPPLLTDEMIAQYTSALLAGTITSGWTFGAGAALQIPFAMQMAYRFNGIGVTQNVLYENQKLIANQFNSAIGKIQDSLSSTASALGKLQDVVNQNAQALNTLVKQLSSNFGAISSVLNDILSRLDPPEAEVQIDRLITGRLQSLQTYVTQQLIRAAEIRASANLAATKMSECVLGQSKRVDFCGKGYHLMSFPQSAPHGVVFLHVTYVFAQEKNFTTAPAICHDGKAHFPREGVFVSNGTHWFVTQRNFYEPQIITTDNTFVSGNCDVLIGIVNNTVYDPLQPELDSFKEELDKYFKNHTSPDVDLGDISGINASVVNIQKEIDRLNEVAKNLNESLIDLQELGKYEQYIKGGGSGGGQIYEGKLTAEGLRFGIVASRFNHALVDRLVEGAIDAIVRHGGREEDITLVRVPGSWEIPVAAGELARKEDIDAVIAIGVLIRGATPHFDYIASEVSKGLADLSLELRKPITFGVITADTLEQAIERAGTKHGNKGWEAALSAIEMANLFKSLR

SEQ ID NO: 3830 - protein, 1371 aa, Artificial Sequence
  SARS-CoV-2/Shenzhen/SZTH-004/2020__EPI_ISL_406595 spike protein (1-1211)(K986P_V987P_P1069F) LumSynth construct
MFVFLVLLPLVSSQCVNLTTRTQLPPAYTNSFTRGVYYPDKVFRSSVLHSTQDLFLPFFSNVTWFHAIHVSGTNGTKRFDNPVLPFNDGVYFASTEKSNIIRGWIFGTTLDSKTQSLLIVNNATNVVIKVCEFQFCNDPFLGVYYHKNNKSWMESEFRVYSSANNCTFEYVSQPFLMDLEGKQGNFKNLREFVFKNIDGYFKIYSKHTPINLVRDLPQGFSALEPLVDLPIGINITRFQTLLALHRSYLTPGDSSSGWTAGAAAYYVGYLQPRTFLLKYNENGTITDAVDCALDPLSETKCTLKSFTVEKGIYQTSNFRVQPTESIVRFPNITNLCPFGEVFNATRFASVYAWDRKRISNCVAYYSVLYNSASFSTFKCYGVSPTKLNDLCFTNVYADSFVIRGDEVRQIAPGQTGKIADYNYKLPDDFTGCVIAWNSNNLDSKVGGNYNYLYRLFRKSNLKPFERDISTEIYQAGSTPCNGVEGFNCYFPLQSYGFQPTNGVGYQPYRVVVLSFELLHAPATVCGPKKSTNLVKNKCVNFNFNGLTGTGVLTESNKKFLPFQQFGRDIADTTDAVRDPQTLEILDITPCSFGGVSVITPGTNTSNQVAVLYQDVNCTEVPVAIHADQLTPTWRVYSTGSNVFQTRAGCLIGAEHVNNSYECDIPIGAGICASYQTQTNSPRRARSVASQSIIAYTMSLGAENSVAYSNNSIAIPTNFTISVTTEILPVSMTKTSVDCTMYICGDSTECSNLLLQYGSFCTQLNRALTGIAVEQDKNTQEVFAQVKQIYKTPPIKDFGGFNFSQILPDPSKPSKRSFIEDLLFNKVTLADAGFIKQYGDCLGDIAARDLICAQKFNGLTVLPPLLTDEMIAQYTSALLAGTITSGWTFGAGAALQIPFAMQMAYRFNGIGVTQNVLYENQKLIANQFNSAIGKIQDSLSSTASALGKLQDVVNQNAQALNTLVKQLSSNFGAISSVLNDILSRLDPPEAEVQIDRLITGRLQSLQTYVTQQLIRAAEIRASANLAATKMSECVLGQSKRVDFCGKGYHLMSFPQSAPHGVVFLHVTYVFAQEKNFTTAPAICHDGKAHFPREGVFVSNGTHWFVTQRNFYEPQIITTDNTFVSGNCDVVIGIVNNTVYDPLQPELDSFKEELDKYFKNHTSPDVDLGDISGINASVVNIQKEIDRLNEVAKNLNESLIDLQELGKYEQYIKGGGSGGGQIYEGKLTAEGLRFGIVASRFNHALVDRLVEGAIDAIVRHGGREEDITLVRVPGSWEIPVAAGELARKEDIDAVIAIGVLIRGATPHFDYIASEVSKGLADLSLELRKPITFGVITADTLEQAIERAGTKHGNKGWEAALSAIEMANLFKSLR

SEQ ID NO: 3831 - protein, 1371 aa, Artificial Sequence
  SARS-CoV-2/France/IDF0372/2020__EPI_ISL_406596 spike protein (1-1211)(K986P_V987P_P1069F) LumSynth construct
MFVFLVLLPLVSSQCVNLTTRTQLPPAYTNSFTRGVYYPDKVFRSSVLHSTQDLFLPFFSNVTWFHAIHVSGTNGTKRFDNPVLPFNDGVYFASTEKSNIIRGWIFGTTLDSKTQSLLIVNNATNVVIKVCEFQFCNDPFLGVYYHKNNKSWMESEFRVYSSANNCTFEYVSQPFLMDLEGKQGNFKNLREFVFKNIDGYFKIYSKHTPINLVRDLPQGFSALEPLVDLPIGINITRFQTLLALHRSYLTPGDSSSGWTAGAAAYYVGYLQPRTFLLKYNENGTITDAVDCALDPLSETKCTLKSFTVEKGIYQTSNFRVQPTESIVRFPNITNLCPFGEVFNATRFASVYAWNRKRISNCVADYSFLYNSASFSTFKCYGVSPTKLNDLCFTNVYADSFVIRGDEVRQIAPGQTGKIADYNYKLPDDFTGCVIAWNSNNLDSKVGGNYNYLYRLFRKSNLKPFERDISTEIYQAGSTPCNGVEGFNCYFPLQSYGFQPTNGVGYQPYRVVVLSFELLHAPATVCGPKKSTNLVKNKCVNFNFNGLTGTGVLTESNKKFLPFQQFGRDIADTTDAVRDPQTLEILDITPCSFGGVSVITPGTNTSNQVAVLYQDVNCTEVPVAIHADQLTPTWRVYSTGSNVFQTRAGCLIGAEHVNNSYECDIPIGAGICASYQTQTNSPRRARSVASQSIIAYTMSLGAENSVAYSNNSIAIPTNFTISVTTEILPVSMTKTSVDCTMYICGDSTECSNLLLQYGSFCTQLNRALTGIAVEQDKNTQEVFAQVKQIYKTPPIKDFGGFNFSQILPDPSKPSKRSFIEDLLFNKVTLADAGFIKQYGDCLGDIAARDLICAQKFNGLTVLPPLLTDEMIAQYTSALLAGTITSGWTFGAGAALQIPFAMQMAYRFNGIGVTQNVLYENQKLIANQFNSAIGKIQDSLSSTASALGKLQDVVNQNAQALNTLVKQLSSNFGAISSVLNDILSRLDPPEAEVQIDRLITGRLQSLQTYVTQQLIRAAEIRASANLAATKMSECVLGQSKRVDFCGKGYHLMSFPQSAPHGVVFLHVTYVFAQEKNFTTAPAICHDGKAHFPREGVFVSNGTHWFVTQRNFYEPQIITTDNTFVSGNCDVVIGIVNNTVYDPLQPELDSFKEELDKYFKNHTSPDVDLGDISGINASVVNIQKEIDRLNEVAKNLNESLIDLQELGKYEQYIKGGGSGGGQIYEGKLTAEGLRFGIVASRFNHALVDRLVEGAIDAIVRHGGREEDITLVRVPGSWEIPVAAGELARKEDIDAVIAIGVLIRGATPHFDYIASEVSKGLADLSLELRKPITFGVITADTLEQAIERAGTKHGNKGWEAALSAIEMANLFKSLR

SEQ ID NO: 3832 - protein, 1371 aa, Artificial Sequence
  SARS-CoV-2/Australia/VIC01/2020__EPI_ISL_406844 spike protein (1-1211)(K986P_V987P_P1069F) LumSynth construct
MFVFLVLLPLVSSQCVNLTTRTQLPPAYTNSFTRGVYYPDKVFRSSVLHSTQDLFLPFFSNVTWFHAIHVSGTNGTKRFDNPVLPFNDGVYFASTEKSNIIRGWIFGTTLDSKTQSLLIVNNATNVVIKVCEFQFCNDPFLGVYYHKNNKSWMESEFRVYSSANNCTFEYVSQPFLMDLEGKQGNFKNLREFVFKNIDGYFKIYSKHTPINLVRDLPQGFSALEPLVDLPIGINITRFQTLLALHRRYLTPGDSSSGWTAGAAAYYVGYLQPRTFLLKYNENGTITDAVDCALDPLSETKCTLKSFTVEKGIYQTSNFRVQPTESIVRFPNITNLCPFGEVFNATRFASVYAWNRKRISNCVADYSVLYNSASFSTFKCYGVSPTKLNDLCFTNVYADSFVIRGDEVRQIAPGQTGKIADYNYKLPDDFTGCVIAWNSNNLDSKVGGNYNYLYRLFRKSNLKPFERDISTEIYQAGSTPCNGVEGFNCYFPLQSYGFQPTNGVGYQPYRVVVLSFELLHAPATVCGPKKSTNLVKNKCVNFNFNGLTGTGVLTESNKKFLPFQQFGRDIADTTDAVRDPQTLEILDITPCSFGGVSVITPGTNTSNQVAVLYQDVNCTEVPVAIHADQLTPTWRVYSTGSNVFQTRAGCLIGAEHVNNSYECDIPIGAGICASYQTQTNSPRRARSVASQSIIAYTMSLGAENSVAYSNNSIAIPTNFTISVTTEILPVSMTKTSVDCTMYICGDSTECSNLLLQYGSFCTQLNRALTGIAVEQDKNTQEVFAQVKQIYKTPPIKDFGGFNFSQILPDPSKPSKRSFIEDLLFNKVTLADAGFIKQYGDCLGDIAARDLICAQKFNGLTVLPPLLTDEMIAQYTSALLAGTITSGWTFGAGAALQIPFAMQMAYRFNGIGVTQNVLYENQKLIANQFNSAIGKIQDSLSSTASALGKLQDVVNQNAQALNTLVKQLSSNFGAISSVLNDILSRLDPPEAEVQIDRLITGRLQSLQTYVTQQLIRAAEIRASANLAATKMSECVLGQSKRVDFCGKGYHLMSFPQSAPHGVVFLHVTYVFAQEKNFTTAPAICHDGKAHFPREGVFVSNGTHWFVTQRNFYEPQIITTDNTFVSGNCDVVIGIVNNTVYDPLQPELDSFKEELDKYFKNHTSPDVDLGDISGINASVVNIQKEIDRLNEVAKNLNESLIDLQELGKYEQYIKGGGSGGGQIYEGKLTAEGLRFGIVASRFNHALVDRLVEGAIDAIVRHGGREEDITLVRVPGSWEIPVAAGELARKEDIDAVIAIGVLIRGATPHFDYIASEVSKGLADLSLELRKPITFGVITADTLEQAIERAGTKHGNKGWEAALSAIEMANLFKSLR

SEQ ID NO: 3833 - protein, 1371 aa, Artificial Sequence
  SARS-CoV-2/Germany/BavPat1/2020__EPI_ISL_406862 spike protein (1-1211)(K986P_V987P_P1069F) LumSynth construct
MFVFLVLLPLVSSQCVNLTTRTQLPPAYTNSFTRGVYYPDKVFRSSVLHSTQDLFLPFFSNVTWFHAIHVSGTNGTKRFDNPVLPFNDGVYFASTEKSNIIRGWIFGTTLDSKTQSLLIVNNATNVVIKVCEFQFCNDPFLGVYYHKNNKSWMESEFRVYSSANNCTFEYVSQPFLMDLEGKQGNFKNLREFVFKNIDGYFKIYSKHTPINLVRDLPQGFSALEPLVDLPIGINITRFQTLLALHRSYLTPGDSSSGWTAGAAAYYVGYLQPRTFLLKYNENGTITDAVDCALDPLSETKCTLKSFTVEKGIYQTSNFRVQPTESIVRFPNITNLCPFGEVFNATRFASVYAWNRKRISNCVADYSVLYNSASFSTFKCYGVSPTKLNDLCFTNVYADSFVIRGDEVRQIAPGQTGKIADYNYKLPDDFTGCVIAWNSNNLDSKVGGNYNYLYRLFRKSNLKPFERDISTEIYQAGSTPCNGVEGFNCYFPLQSYGFQPTNGVGYQPYRVVVLSFELLHAPATVCGPKKSTNLVKNKCVNFNFNGLTGTGVLTESNKKFLPFQQFGRDIADTTDAVRDPQTLEILDITPCSFGGVSVITPGTNTSNQVAVLYQGVNCTEVPVAIHADQLTPTWRVYSTGSNVFQTRAGCLIGAEHVNNSYECDIPIGAGICASYQTQTNSPRRARSVASQSIIAYTMSLGAENSVAYSNNSIAIPTNFTISVTTEILPVSMTKTSVDCTMYICGDSTECSNLLLQYGSFCTQLNRALTGIAVEQDKNTQEVFAQVKQIYKTPPIKDFGGFNFSQILPDPSKPSKRSFIEDLLFNKVTLADAGFIKQYGDCLGDIAARDLICAQKFNGLTVLPPLLTDEMIAQYTSALLAGTITSGWTFGAGAALQIPFAMQMAYRFNGIGVTQNVLYENQKLIANQFNSAIGKIQDSLSSTASALGKLQDVVNQNAQALNTLVKQLSSNFGAISSVLNDILSRLDPPEAEVQIDRLITGRLQSLQTYVTQQLIRAAEIRASANLAATKMSECVLGQSKRVDFCGKGYHLMSFPQSAPHGVVFLHVTYVFAQEKNFTTAPAICHDGKAHFPREGVFVSNGTHWFVTQRNFYEPQIITTDNTFVSGNCDVVIGIVNNTVYDPLQPELDSFKEELDKYFKNHTSPDVDLGDISGINASVVNIQKEIDRLNEVAKNLNESLIDLQELGKYEQYIKGGGSGGGQIYEGKLTAEGLRFGIVASRFNHALVDRLVEGAIDAIVRHGGREEDITLVRVPGSWEIPVAAGELARKEDIDAVIAIGVLIRGATPHFDYIASEVSKGLADLSLELRKPITFGVITADTLEQAIERAGTKHGNKGWEAALSAIEMANLFKSLR

SEQ ID NO: 3834 - protein, 1371 aa, Artificial Sequence
  SARS-CoV-2/Wuhan/HBCDC-HB-02/2020__EPI_ISL_412978 spike protein (1-1211)(K986P_V987P_P1069F) LumSynth construct
MFVFLVLLPLVSSQCVNLTTRTQLPPAYTNSFTRGVYYPDKVFRSSVLHSTQDLFLPFFSNVTWFHAIHVSGTNGTKRFDNPVLPFNDGVYFASTEKSNIIRGWIFGTTLDSKTQSLLIVNNATNVVIKVCEFQFCNDPFLGVYYHKNNKSWMESEFRVYSSANNCTFEYVSQPFLMDLEGKQGNFKNLREFVFKNIDGYFKIYSKHTPINLVRDLPQGFSALEPLVDLPIGINITRFQTLLALHRSYLTPGDSSSGWTAGAAAYYVGYLQPRTFLLKYNENGTITDAVDCALDPLSETKCTLKSFTVEKGIYQTSNFRVQPTESIVRFPNITNLCPFGEVFNATRFASVYAWNRKRISNCVADYSVLYNSASFSTFKCYGVSPTKLNDLCFTNVYADSFVIRGDEVRQIAPGQTGKIADYNYKLPDDFTGCVIAWNSNNLDSKVGGNYNYLYRLFRKSNLKPFERDISTEIYQAGSTPCNGVEGFNCYFPLQSYGFQPTNGVGYQPYRVVVLSFELLHAPATVCGPKKSTNLVKNKCVNFNFNGLTGTGVLTESNKKFLPFQQFGRDIADTTDAVRDPQTLEILDITPCSFGGVSVITPGTNTSNQVAVLYQDVNCTEVPVAIHADQLTPTWRVYSTGSNVFQTRAGCLIGAEHVNNSYECDIPIGAGICASYQTQTNSPRRARSVASQSIIAYTMSLGAENSVAYSNNSIAIPTNFTISVTTEILPVSMTKTSVDCTMYICGDSTECSNFLLQYGSFCTQLNRALTGIAVEQDKNTQEVFAQVKQIYKTPPIKDFGGFNFSQILPDPSKPSKRSFIEDLLFNKVTLADAGFIKQYGDCLGDIAARDLICAQKFNGLTVLPPLLTDEMIAQYTSALLAGTITSGWTFGAGAALQIPFAMQMAYRFNGIGVTQNVLYENQKLIANQFNSAIGKIQDSLSSTASALGKLQDVVNQNAQALNTLVKQLSSNFGAISSVLNDILSRLDPPEAEVQIDRLITGRLQSLQTYVTQQLIRAAEIRASANLAATKMSECVLGQSKRVDFCGKGYHLMSFPQSAPHGVVFLHVTYVFAQEKNFTTAPAICHDGKAHFPREGVFVSNGTHWFVTQRNFYEPQIITTDNTFVSGNCDVVIGIVNNTVYDPLQPELDSFKEELDKYFKNHTSPDVDLGDISGINASVVNIQKEIDRLNEVAKNLNESLIDLQELGKYEQYIKGGGSGGGQIYEGKLTAEGLRFGIVASRFNHALVDRLVEGAIDAIVRHGGREEDITLVRVPGSWEIPVAAGELARKEDIDAVIAIGVLIRGATPHFDYIASEVSKGLADLSLELRKPITFGVITADTLEQAIERAGTKHGNKGWEAALSAIEMANLFKSLR

SEQ ID NO: 3835 - protein, 1371 aa, Artificial Sequence
  SARS-CoV-2/Australia/QLD02/2020__EPI_ISL_407896 spike protein (1-1211)(K986P_V987P_P1069F) LumSynth construct
MFVFLVLLPLVSSQCVNLTTRTQLPPAYTNSFTRGVYYPDKVFRSSVLHSTQDLFLPFFSNVTWFHAIHVSGTNGTKRFDNPVLPFNDGVYFASTEKSNIIRGWIFGTTLDSKTQSLLIVNNATNVVIKVCEFQFCNDPFLGVYYHKNNKSWMESEFRVYSSANNCTFEYVSQPFLMDLEGKQGNFKNLREFVFKNIDGYFKIYSKHTPINLVRDLPQGFSALEPLVDLPIGINITRFQTLLALHRSYLTPGDSSSGWTAGAAAYYVGYLQPRTFLLKYNENGTITDAVDCALDPLSETKCTLKSFTVEKGIYQTSNFRVQPTESIVRFPNITNLCPFGEVFNATRFASVYAWNRKRISNCVADYSVLYNSASFSTFKCYGVSPTKLNDLCFTNVYADSFVIRGDEVRQIAPGQTGKIADYNYKLPDDFTGCVIAWNSNNLDSKVGGNYNYLYRLFRKSNLKPFERDISTEIYQAGSTPCNGVEGFNCYFPLQSYGFQPTNGVGYQPYRVVVLSFELLHAPATVCGPKKSTNLVKNKCVNFNFNGLTGTGVLTESNKKFLPFQQFGRDIADTTDAVRDPQTLEILDITPCSFGGVSVITPGTNTSNQVAVLYQDVNCTEVPVAIHADQLTPTWRVYSTGSNVFQTRAGCLIGAEHVNNSYECDIPIGAGICASYQTQTNSPRRARSVASQSIIAYTMSLGAENSVAYSNNSIAIPTNFTISVTTEILPVSMTKTSVDCTMYICGDSTECSNLLLQYGSFCTQLNRALTGIAVEQDKNTQEVFAQVKQIYKTPPIKDFGGFNFSQILPDPSKPSKRSFIEDLLFNKVTLADAGFIKQYGDCLGDIAARDLICAQKFNGLTVLPPLLTDEMIAQYTSALLAGTITSGWTFGAGAALQIPFAMQMAYRFNGIGVTQNVLYENQKLIANQFNSAIGKIQDSLSSTASALGKLQDVVNQNAQALNTLVKQLSSNFGAISSVLNDILSRLDPPEAEVQIDRLITGRLQSLQTYVTQQLIRAAEIRASANLAATKMSECVLGQSKRVDFCGKGYHLMSFPQSAPHGVVFLHVTYVFAQEKNFTTAPAICHDGKAHFPREGVFVSNGTHWFVTQRNFYEPQIITTDNTFVSGNCDVVIGIVNNTVYDPLQLELDSFKEELDKYFKNHTSPDVDLGDISGINASVVNIQKEIDRLNEVAKNLNESLIDLQELGKYEQYIKGGGSGGGQIYEGKLTAEGLRFGIVASRFNHALVDRLVEGAIDAIVRHGGREEDITLVRVPGSWEIPVAAGELARKEDIDAVIAIGVLIRGATPHFDYIASEVSKGLADLSLELRKPITFGVITADTLEQAIERAGTKHGNKGWEAALSAIEMANLFKSLR

SEQ ID NO: 3836 - protein, 1371 aa, Artificial Sequence
  SARS-CoV-2/India/1-31/2020__EPI_ISL_413523 spike protein (1-1211)(K986P_V987P_P1069F) LumSynth construct
MFVFLVLLPLVSSQCVNLTTRTQLPPAYTNSFTRGVYYPDKVFRSSVLHSTQDLFLPFFSNVTWFHAIHVSGTNGTKRFDNPVLPFNDGVYFASTEKSNIIRGWIFGTTLDSKTQSLLIVNNATNVVIKVCEFQFCNDPFLGVYYHKNNKSWMESEFRVYSSANNCTFEYVSQPFLMDLEGKQGNFKNLREFVFKNIDGYFKIYSKHTPINLVRDLPQGFSALEPLVDLPIGINITRFQTLLALHRSYLTPGDSSSGWTAGAAAYYVGYLQPRTFLLKYNENGTITDAVDCALDPLSETKCTLKSFTVEKGIYQTSNFRVQPTESIVRFPNITNLCPFGEVFNATRFASVYAWNRKRISNCVADYSVLYNSASFSTFKCYGVSPTKLNDLCFTNVYADSFVIRGDEVRQIAPGQTGKIADYNYKLPDDFTGCVIAWNSNNLDSKVGGNYNYLYRLFRKSNLKPFERDISTEIYQAGSTPCNGVEGFNCYFPLQSYGFQPTNGVGYQPYRVVVLSFELLHAPATVCGPKKSTNLVKNKCVNFNFNGLTGTGVLTESNKKFLPFQQFGRDIADTTDAVRDPQTLEILDITPCSFGGVSVITPGTNTSNQVAVLYQDVNCTEVPVAIHADQLTPTWRVYSTGSNVFQTRAGCLIGAEHVNNSYECDIPIGAGICASYQTQTNSPRRARSVASQSIIAYTMSLGAENSVAYSNNSIAIPTNFTISVTTEILPVSMTKTSVDCTMYICGDSTECSNLLLQYGSFCTQLNRALTGIAVEQDKNTQEVFAQVKQIYKTPPIKDFGGFNFSQILPDPSKPSKRSFIEDLLFNKVTLADAGFIKQYGDCLGDIAARDLICAQKFNGLTVLPPLLTDEMIAQYTSALLAGTITSGWTFGAGAALQIPFAMQMAYRFNGIGVTQNVLYENQKLIANQFNSVIGKIQDSLSSTASALGKLQDVVNQNAQALNTLVKQLSSNFGAISSVLNDILSRLDPPEAEVQIDRLITGRLQSLQTYVTQQLIRAAEIRASANLAATKMSECVLGQSKRVDFCGKGYHLMSFPQSAPHGVVFLHVTYVFAQEKNFTTAPAICHDGKAHFPREGVFVSNGTHWFVTQRNFYEPQIITTDNTFVSGNCDVVIGIVNNTVYDPLQPELDSFKEELDKYFKNHTSPDVDLGDISGINASVVNIQKEIDRLNEVAKNLNESLIDLQELGKYEQYIKGGGSGGGQIYEGKLTAEGLRFGIVASRFNHALVDRLVEGAIDAIVRHGGREEDITLVRVPGSWEIPVAAGELARKEDIDAVIAIGVLIRGATPHFDYIASEVSKGLADLSLELRKPITFGVITADTLEQAIERAGTKHGNKGWEAALSAIEMANLFKSLR

SEQ ID NO: 3837 - protein, 1371 aa, Artificial Sequence
  SARS-CoV-2/Guangdong/GD2020087-P0008/2020__EPI_ISL_413863 spike protein (1-1211)(K986P_V987P_P1069F) LumSynth construct
MFVFLVLLPLVSSQCVNLTTRTQLPPAYTNSFTRGVYYPDKVFRSSVLHSTQDLFLPFFSNVTWFHAIHVSGTNGTKRFDNPVLPFNDGVYFASTEKSNIIRGWIFGTTLDSKTQSLLIVNNATNVVIKVCEFQFCNDPFLGVYYHKNNKSWMESEFRVYSSANNCTFEYVSQPFLMDLEGKQGNFKNLREFVFKNIDGYFKIYSKHTPINLVRDLPQGFSALEPLVDLPIGINITRFQTLLALHRSYLTPGDSSSGWTAGAAAYYVGYLQPRTFLLKYNENGTITDAVDCALDPLSETKCTLKSFTVEKGIYQTSNFRVQPTESIVRFPNITNLCPFGEVFNATRFASVYAWNRKRISNCVADYSVLYNSASFSTFKCYGVSPTKLNDLCFTNVYADSFVIRGDEVREIAPGQTGKIADYNYKLPDDFTGCVIAWNSNNLDSKVGGNYNYLYRLFRKSNLKPFERDISTEIYQAGSTPCNGVEGFNCYFPLQSYGFQPTNGVGYQPYRVVVLSFELLHAPATVCGPKKSTNLVKNKCVNFNFNGLTGTGVLTESNKKFLPFQQFGRDIADTTDAVRDPQTLEILDITPCSFGGVSVITPGTNTSNQVAVLYQDVNCTEVPVAIHADQLTPTWRVYSTGSNVFQTRAGCLIGAEHVNNSYECDIPIGAGICASYQTQTNSPRRARSVASQSIIAYTMSLGAENSVAYSNNSIAIPTNFTISVTTEILPVSMTKTSVDCTMYICGDSTECSNLLLQYGSFCTQLNRALTGIAVEQDKNTQEVFAQVKQIYKTPPIKDFGGFNFSQILPDPSKPSKRSFIEDLLFNKVTLADAGFIKQYGDCLGDIAARDLICAQKFNGLTVLPPLLTDEMIAQYTSALLAGTITSGWTFGAGAALQIPFAMQMAYRFNGIGVTQNVLYENQKLIANQFNSAIGKIQDSLSSTASALGKLQDVVNQNAQALNTLVKQLSSNFGAISSVLNDILSRLDPPEAEVQIDRLITGRLQSLQTYVTQQLIRAAEIRASANLAATKMSECVLGQSKRVDFCGKGYHLMSFPQSAPHGVVFLHVTYVFAQEKNFTTAPAICHDGKAHFPREGVFVSNGTHWFVTQRNFYEPQIITTDNTFVSGNCDVVIGIVNNTVYDPLQPELDSFKEELDKYFKNHTSPDVDLGDISGINASVVNIQKEIDRLNEVAKNLNESLIDLQELGKYEQYIKGGGSGGGQIYEGKLTAEGLRFGIVASRFNHALVDRLVEGAIDAIVRHGGREEDITLVRVPGSWEIPVAAGELARKEDIDAVIAIGVLIRGATPHFDYIASEVSKGLADLSLELRKPITFGVITADTLEQAIERAGTKHGNKGWEAALSAIEMANLFKSLR

SEQ ID NO: 3838 - protein, 1371 aa, Artificial Sequence
  SARS-CoV-2/Sweden/01/2020__EPI_ISL_411951 spike protein (1-1211)(K986P_V987P_P1069F) LumSynth construct
MFVFLVLLPLVSSQCVNLTTRTQLPPAYTNSFTRGVYYPDKVFRSSVLHSTQDLFLPFFSNVTWFHAIHVSGTNGTKRFDNPVLPFNDGVYFASTEKSNIIRGWIFGTTLDSKTQSLLIVNNATNVVIKVCEFQFCNDPFLGVYYHKNNKSWMESEFRVYSSANNCTFEYVSQPFLMDLEGKQGNFKNLREFVFKNIDGYFKIYSKHTPINLVRDLPQGFSALEPLVDLPIGINITRFQTLLALHRSYLTPGDSSSGWTAGAAAYYVGYLQPRTFLLKYNENGTITDAVDCALDPLSETKCTLKSFTVEKGIYQTSNFRVQPTESIVRFPNITNLCPFGEVFNATRFASVYAWNRKRISNCVADYSVLYNSASFSTFKCYGVSPTKLNDLCFTNVYADSFVIRGDEVRQIAPGQTGKIADYNYKLPDDFTGCVIAWNSNNLDSKVGGNYNYLYRLFRKSNLKPFERDISTEIYQAGSTPCNGVEGFNCYFPLQSYGFQPTNGVGYQPYRVVVLSFELLHAPATVCGPKKSTNLVKNKCVNFNFNGLTGTGVLTESNKKFLPFQQFGRDIADTTDAVRDPQTLEILDITPCSFGGVSVITPGTNTSNQVAVLYQDVNCTEVPVAIHADQLTPTWRVYSTGSNVFQTRAGCLIGAEHVNNSYECDIPIGAGICASYQTQTNSPRRARSVASQSIIAYTMSLGAENSVAYSNNSIAIPTNFTISVTTEILPVSMTKTSVDCTMYICGDSTECSNLLLQYGSFCTQLNRALTGIAVEQDKNTQEVFAQVKQIYKTPPIKDCGGFNFSQILPDPSKPSKRSFIEDLLFNKVTLADAGFIKQYGDCLGDIAARDLICAQKFNGLTVLPPLLTDEMIAQYTSALLAGTITSGWTFGAGAALQIPFAMQMAYRFNGIGVTQNVLYENQKLIANQFNSAIGKIQDSLSSTASALGKLQDVVNQNAQALNTLVKQLSSNFGAISSVLNDILSRLDPPEAEVQIDRLITGRLQSLQTYVTQQLIRAAEIRASANLAATKMSECVLGQSKRVDFCGKGYHLMSFPQSAPHGVVFLHVTYVFAQEKNFTTAPAICHDGKAHFPREGVFVSNGTHWFVTQRNFYEPQIITTDNTFVSGNCDVVIGIVNNTVYDPLQPELDSFKEELDKYFKNHTSPDVDLGDISGINASVVNIQKEIDRLNEVAKNLNESLIDLQELGKYEQYIKGGGSGGGQIYEGKLTAEGLRFGIVASRFNHALVDRLVEGAIDAIVRHGGREEDITLVRVPGSWEIPVAAGELARKEDIDAVIAIGVLIRGATPHFDYIASEVSKGLADLSLELRKPITFGVITADTLEQAIERAGTKHGNKGWEAALSAIEMANLFKSLR

SEQ ID NO: 3839 - protein, 1371 aa, Artificial Sequence
  SARS-CoV-2/Tianmen/HBCDC-HB-07/2020__EPI_ISL_412983 spike protein (1-1211)(K986P_V987P_P1069F) LumSynth construct
MFVFLVLLPLVSSQCVNLTTRTQLPPAYTNSFTRGVYYPDKVFRSSVLHSTQDLFLPFFSNVTWFHAIHVSGTNGTKRFDNPVLPFNDGVYFASTEKSNIIRGWIFGTTLDSKTQSLLIVNNATNVVIKVCEFQFCNDPFLGVYYHKNNKSWMESEFRVYSSANNCTFEYVSQPFLMDLEGKQGNFKNLREFVFKNIDGYFKIYSKHTPINLVRDLPQGFSALEPLVDLPIGINITRFQTLLALHRSYLTPGDSSSGWTAGAAAYYVGYLQPRTFLLKYNENGTITDAVDCALDPLSETKCTLKSFTVEKGIYQTSNFRVQPTESIVRFPNITNLCPFGEVFNATRFASVYAWNRKRISNCVADYSVLYNSASFSTFKCYGVSPTKLNDLCFTNVYADSFVIRGDEVRQIAPGQTGKIADYNYKLPDDFTGCVIAWNSNNLDSKVGGNYNYLYRLFRKSNLKPFERDISTEIYQAGSTPCNGVEGFNCYFPLQSYGFQPTNGVGYQPYRVVVLSFELLHAPATVCGPKKSTNLVKNKCVNFNFNGLTGTGVLTESNKKFLPFQQFGRDIADTTDAVRDPQTLEILDITPCSFGGVSVITPGTNTSNQVAVLYQDLNCTEVPVAIHADQLTPTWRVYSTGSNVFQTRAGCLIGAEHVNNSYECDIPIGAGICASYQTQTNSPRRARSVASQSIIAYTMSLGAENSVAYSNNSIAIPTNFTISVTTEILPVSMTKTSVDCTMYICGDSTECSNLLLQYGSFCTQLNRALTGIAVEQDKNTQEVFAQVKQIYKTPPIKDFGGFNFSQILPDPSKPSKRSFIEDLLFNKVTLADAGFIKQYGDCLGDIAARDLICAQKFNGLTVLPPLLTDEMIAQYTSALLAGTITSGWTFGAGAALQIPFAMQMAYRFNGIGVTQNVLYENQKLIANQFNSAIGKIQDSLSSTASALGKLQDVVNQNAQALNTLVKQLSSNFGAISSVLNDILSRLDPPEAEVQIDRLITGRLQSLQTYVTQQLIRAAEIRASANLAATKMSECVLGQSKRVDFCGKGYHLMSFPQSAPHGVVFLHVTYVFAQEKNFTTAPAICHDGKAHFPREGVFVSNGTHWFVTQRNFYEPQIITTDNTFVSGNCDVVIGIVNNTVYDPLQPELDSFKEELDKYFKNHTSPDVDLGDISGINASVVNIQKEIDRLNEVAKNLNESLIDLQELGKYEQYIKGGGSGGGQIYEGKLTAEGLRFGIVASRFNHALVDRLVEGAIDAIVRHGGREEDITLVRVPGSWEIPVAAGELARKEDIDAVIAIGVLIRGATPHFDYIASEVSKGLADLSLELRKPITFGVITADTLEQAIERAGTKHGNKGWEAALSAIEMANLFKSLR

SEQ ID NO: 3840 - protein, 1371 aa, Artificial Sequence
  SARS-CoV-2/Hong Kong/case42_VM20002493/2020__EPI_ISL_414527 spike protein (1-1211)(K986P_V987P_P1069F) LumSynth construct
MFVFLVLLPLVSSQCVNLTTRTQLPPAYTNSFTRGVYYPDKVFRSSVLHSTQDLFLPFFSNVTWFHAIHVSGTNGTKRFDNPVLPFNDGVYFASTEKSNIIRGWIFGTTLDSKTQSLLIVNNATNVVIKVCEFQFCNDPFLGVYYHKNNKSWMESEFRVYSSANNCTFEYVSQPFLMDLEGKQGNFKNLREFVFKNIDGYFKIYSKHTPINLVRDLPQGFSALEPLVDLPIGINITRFQTLLALHRSYLTPGDSSSGWTAGAAAYYVGYLQPRTFLLKYNENGTITDAVDCALDPLSETKCTLKSFTVEKGIYQTSNFRVQPTESIVRFPNITNLCPFGEVFNATRFASVYAWNRKRISNCVADYSVLYNSASFSTFKCYGVSPTKLNDLCFTNVYADSFVIRGDEVRQIAPGQTGKIADYNYKLPDDFTGCVIAWNSNNLDSKVGGNYNYLYRLFRKSNLKPFERDISTEIYQAGSTPCNGVEGFNCYFPLQSYGFQPTNGVGYQPYRVVVLSFELLHAPATVCGPKKSTNLVKNKCVNFNFNGLTGTGVLTESNKKFLPFQQFGRDIADTTDAVRDPQTLEILDITPCSFGGVSVITPGTNTSNQVAVLYQDVNCTEVPVAIHADQLTPTWRVYSTGSNVFQTRAGCLIGAEHVNNSYECDIPIGAGICASYQTQTNSPRRARSVASQSIIAYTMSLGAENSVAYSNNSIAIPTNFAISVTTEILPVSMTKTSVDCTMYICGDSTECSNLLLQYGSFCTQLNRALTGIAVEQDKNTQEVFAQVKQIYKTPPIKDFGGFNFSQILPDPSKPSKRSFIEDLLFNKVTLADAGFIKQYGDCLGDIAARDLICAQKFNGLTVLPPLLTDEMIAQYTSALLAGTITSGWTFGAGAALQIPFAMQMAYRFNGIGVTQNVLYENQKLIANQFNSAIGKIQDSLSSTASALGKLQDVVNQNAQALNTLVKQLSSNFGAISSVLNDILSRLDPPEAEVQIDRLITGRLQSLQTYVTQQLIRAAEIRASANLAATKMSECVLGQSKRVDFCGKGYHLMSFPQSAPHGVVFLHVTYVFAQEKNFTTAPAICHDGKAHFPREGVFVSNGTHWFVTQRNFYEPQIITTDNTFVSGNCDVVIGIVNNTVYDPLQPELDSFKEELDKYFKNHTSPDVDLGDISGINASVVNIQKEIDRLNEVAKNLNESLIDLQELGKYEQYIKGGGSGGGQIYEGKLTAEGLRFGIVASRFNHALVDRLVEGAIDAIVRHGGREEDITLVRVPGSWEIPVAAGELARKEDIDAVIAIGVLIRGATPHFDYIASEVSKGLADLSLELRKPITFGVITADTLEQAIERAGTKHGNKGWEAALSAIEMANLFKSLR

SEQ ID NO: 3841 - protein, 1371 aa, Artificial Sequence
  SARS-CoV-2/USA/CruiseA-23/2020__EPI_ISL_414482 spike protein (1-1211)(K986P_V987P_P1069F) LumSynth construct
MFVFLVLLPLVSSQCVNLTTRTQLPPAYTNSFTRGVYYPDKVFRSSVLHSTQDLFLPFFSNVTWFHAIHVSGTNGTKRFDNPVLPFNDGVYFASTEKSNIIRGWIFGTTLDSKTQSLLIVNNATNVVIKVCEFQFCNDPFLGVYYHKNNKSWMESEFRVYSSANNCTFEYVSQPFLMDLEVKQGNFKNLREFVFKNIDGYFKIYSKHTPINLVRDLPQGFSALEPLVDLPIGINITRFQTLLALHRSYLTPGDSSSGWTAGAAAYYVGYLQPRTFLLKYNENGTITDAVDCALDPLSETKCTLKSFTVEKGIYQTSNFRVQPTESIVRFPNITNLCPFGEVFNATRFASVYAWNRKRISNCVADYSVLYNSASFSTFKCYGVSPTKLNDLCFTNVYADSFVIRGDEVRQIAPGQTGKIADYNYKLPDDFTGCVIAWNSNNLDSKVGGNYNYLYRLFRKSNLKPFERDISTEIYQAGSTPCNGVEGFNCYFPLQSYGFQPTNGVGYQPYRVVVLSFELLHAPATVCGPKKSTNLVKNKCVNFNFNGLTGTGVLTESNKKFLPFQQFGRDIADTTDAVRDPQTLEILDITPCSFGGVSVITPGTNTSNQVAVLYQDVNCTEVPVAIHADQLTPTWRVYSTGSNVFQTRAGCLIGAEHVNNSYECDIPIGAGICASYQTQTNSPRRARSVASQSIIAYTMSLGAENSVAYSNNSIAIPTNFTISVTTEILPVSMTKTSVDCTMYICGDSTECSNLLLQYGSFCTQLNRALTGIAVEQDKNTQEVFAQVKQIYKTPPIKDFGGFNFSQILPDPSKPSKRSFIEDLLFNKVTLADAGFIKQYGDCLGDIAARDLICAQKFNGLTVLPPLLTDEMIAQYTSALLAGTITSGWTFGAGAALQIPFAMQMAYRFNGIGVTQNVLYENQKLIANQFNSAIGKIQDSLSSTASALGKLQDVVNQNAQALNTLVKQLSSNFGAISSVLNDILSRLDPPEAEVQIDRLITGRLQSLQTYVTQQLIRAAEIRASANLAATKMSECVLGQSKRVDFCGKGYHLMSFPQSAPHGVVFLHVTYVFAQEKNFTTAPAICHDGKAHFPREGVFVSNGTHWFVTQRNFYEPQIITTDNTFVSGNCDVVIGIVNNTVYDPLQPELDSFKEELDKYFKNHTSPDVDLGDISGINASVVNIQKEIDRLNEVAKNLNESLIDLQELGKYEQYIKGGGSGGGQIYEGKLTAEGLRFGIVASRFNHALVDRLVEGAIDAIVRHGGREEDITLVRVPGSWEIPVAAGELARKEDIDAVIAIGVLIRGATPHFDYIASEVSKGLADLSLELRKPITFGVITADTLEQAIERAGTKHGNKGWEAALSAIEMANLFKSLR

SEQ ID NO: 3842 - protein, 1371 aa, Artificial Sequence
  SARS-CoV-2/Hong Kong/case85_VM20002868/2020__EPI_ISL_414519 spike protein (1-1211)(K986P_V987P_P1069F) LumSynth construct
MFVFLVLVPLVSSQCVNLTTRTQLPPAYTNSFTRGVYYPDKVFRSSVLHSTQDLFLPFFSNVTWFHAIHVSGTNGTKRFDNPVLPFNDGVYFASTEKSNIIRGWIFGTTLDSKTQSLLIVNNATNVVIKVCEFQFCNDPFLGVYYHKNNKSWMESEFRVYSSANNCTFEYVSQPFLMDLEGKQGNFKNLREFVFKNIDGYFKIYSKHTPINLVRDLPQGFSALEPLVDLPIGINITRFQTLLALHRSYLTPGDSSSGWTAGAAAYYVGYLQPRTFLLKYNENGTITDAVDCALDPLSETKCTLKSFTVEKGIYQTSNFRVQPTESIVRFPNITNLCPFGEVFNATRFASVYAWNRKRISNCVADYSVLYNSASFSTFKCYGVSPTKLNDLCFTNVYADSFVIRGDEVRQIAPGQTGKIADYNYKLPDDFTGCVIAWNSNNLDSKVGGNYNYLYRLFRKSNLKPFERDISTEIYQAGSTPCNGVEGFNCYFPLQSYGFQPTNGVGYQPYRVVVLSFELLHAPATVCGPKKSTNLVKNKCVNFNFNGLTGTGVLTESNKKFLPFQQFGRDIADTTDAVRDPQTLEILDITPCSFGGVSVITPGTNTSNQVAVLYQDVNCTEVPVAIHADQLTPTWRVYSTGSNVFQTRAGCLIGAEHVNNSYECDIPIGAGICASYQTQTNSPRRARSVASQSIIAYTMSLGAENSVAYSNNSIAIPTNFTISVTTEILPVSMTKTSVDCTMYICGDSTECSNLLLQYGSFCTQLNRALTGIAVEQDKNTQEVFAQVKQIYKTPPIKDFGGFNFSQILPDPSKPSKRSFIEDLLFNKVTLADAGFIKQYGDCLGDIAARDLICAQKFNGLTVLPPLLTDEMIAQYTSALLAGTITSGWTFGAGAALQIPFAMQMAYRFNGIGVTQNVLYENQKLIANQFNSAIGKIQDSLSSTASALGKLQDVVNQNAQALNTLVKQLSSNFGAISSVLNDILSRLDPPEAEVQIDRLITGRLQSLQTYVTQQLIRAAEIRASANLAATKMSECVLGQSKRVDFCGKGYHLMSFPQSAPHGVVFLHVTYVFAQEKNFTTAPAICHDGKAHFPREGVFVSNGTHWFVTQRNFYEPQIITTDNTFVSGNCDVVIGIVNNTVYDPLQPELDSFKEELDKYFKNHTSPDVDLGDISGINASVVNIQKEIDRLNEVAKNLNESLIDLQELGKYEQYIKGGGSGGGQIYEGKLTAEGLRFGIVASRFNHALVDRLVEGAIDAIVRHGGREEDITLVRVPGSWEIPVAAGELARKEDIDAVIAIGVLIRGATPHFDYIASEVSKGLADLSLELRKPITFGVITADTLEQAIERAGTKHGNKGWEAALSAIEMANLFKSLR

SEQ ID NO: 3843 - protein, 1371 aa, Artificial Sequence; identical to SEQ ID NO: 3833
  SARS-CoV-2/England/200990660/2020__EPI_ISL_414523 spike protein (1-1211)(K986P_V987P_P1069F) LumSynth construct

SEQ ID NO: 3844 - protein, 1371 aa, Artificial Sequence
  SARS-CoV-2/Australia/NSW09/2020__EPI_ISL_413595 spike protein (1-1211)(K986P_V987P_P1069F) LumSynth construct
MFVFLVLLPLVSSQCVNLTTRTQLPPAYTNSFTRGVYYPDKVFRSSVLHSTQDLFLPFFSNVTWFHAIHVSGTNGTKRFDNPVLPFNDGVYFASTEKSNIIRGWIFGTTLDSKTQSLLIVNNATNVVIKVCEFQFCNDPFLGVYYHKNNKSWMESEFRVYSSANNCTFEYVSQPFLMDLEGKQGNFKNLREFVFKNIDGYFKIYSKHTPINLVRDLPQGFSALEPLVDLPIGINITRFQTLLALHRSYLTPGDSSSGWTAGAAAYYVGYLQPRTFLLKYNENGTITDAVDCALDPLSETKCTLKSFTVEKGIYQTSNFRVQPTESIVRFPNITNLCPFGEVFNATRFASVYAWNRKRISNCVADYSVLYNSASFSTFKCYGVSPTKLNDLCFTNVYADSFVIRGDEVRQIAPGQTGKIADYNYKLPDDFTGCVIAWNSNNLDSKVGGNYNYLYRLFRKSNLKPFERDISTEIYQAGSTPCNGVEGFNCYFPLQSYGFQPTNGVGYQPYRVVVLSFELLHAPATVCGPKKSTNLVKNKCVNFNFNGLTGTGVLTESNKKFLPFQQFGRDIADTTDAVRDPQTLEILDITPCSFGGVSVITPGTNTSNQVAVLYQDVNCTEVPVAIHADQLTPTWRVYSTGSNVFQTRAGCLIGAEHVNNSYECDIPIGAGICASYQTQTNSPRRARSVASQSIIAYTMSLGAENSVAYSNNSIAIPTNFTISVTTEILPVSMTKTSVDCTMYICGDSTECSNLLLQYGSFCTQLNRALTGIAVEQDKNTQEVFAQVKQIYKTPPIKDFGGFNFSQILPDPSKPSKRSFIEDLLFNKVTLADAGFIKQYGDCLGDIAARDLICAQKFNGLTVLPPLLTDEMIAQYTSALLAGTITSGWTFGAGAALQIPFAMQMAYRFNGIGVTQNVLYENQKLIANQFNSAIGKIQDSLSFTASALGKLQDVVNQNAQALNTLVKQLSSNFGAISSVLNDILSRLDPPEAEVQIDRLITGRLQSLQTYVTQQLIRAAEIRASANLAATKMSECVLGQSKRVDFCGKGYHLMSFPQSAPHGVVFLHVTYVFAQEKNFTTAPAICHDGKAHFPREGVFVSNGTHWFVTQRNFYEPQIITTDNTFVSGNCDVVIGIVNNTVYDPLQPELDSFKEELDKYFKNHTSPDVDLGDISGINASVVNIQKEIDRLNEVAKNLNESLIDLQELGKYEQYIKGGGSGGGQIYEGKLTAEGLRFGIVASRFNHALVDRLVEGAIDAIVRHGGREEDITLVRVPGSWEIPVAAGELARKEDIDAVIAIGVLIRGATPHFDYIASEVSKGLADLSLELRKPITFGVITADTLEQAIERAGTKHGNKGWEAALSAIEMANLFKSLR

SEQ ID NO: 3845 - protein, 1371 aa, Artificial Sequence; identical to SEQ ID NO: 3825
  SARS-CoV-2/Australia/NSW10/2020__EPI_ISL_413596 spike protein (1-1211)(K986P_V987P_P1069F) LumSynth construct

SEQ ID NO: 3846 - protein, 1371 aa, Artificial Sequence
  SARS-CoV-2/Switzerland/1000477797/2020__EPI_ISL_413023 spike protein (1-1211)(K986P_V987P_P1069F) LumSynth construct
MFVFLVLLPLVSSQCVNLTTRTQLPPAYTNSFTRGVYYPDKVFRSSVLHSTQDLFLPFFSNVTWFHAIHVSGTNGTKRFDNPVLPFNDGVYFASTEKSNIIRGWIFGTTLDSKTQSLLIVNNATNVVIKVCEFQFCNDPFLGVYYHKNNKSWMESEFRVYSSANNCTFEYVSQPFLMDLEGKQGNFKNLREFVFKNIDGYFNIYSKHTPINLVRDLPQGFSALEPLVDLPIGINITRFQTLLALHRSYLTPGDSSSGWTAGAAAYYVGYLQPRTFLLKYNENGTITDAVDCALDPLSETKCTLKSFTVEKGIYQTSNFRVQPTESIVRFPNITNLCPFGEVFNATRFASVYAWNRKRISNCVADYSVLYNSASFSTFKCYGVSPTKLNDLCFTNVYADSFVIRGDEVRQIAPGQTGKIADYNYKLPDDFTGCVIAWNSNNLDSKVGGNYNYLYRLFRKSNLKPFERDISTEIYQAGSTPCNGVEGFNCYFPLQSYGFQPTNGVGYQPYRVVVLSFELLHAPATVCGPKKSTNLVKNKCVNFNFNGLTGTGVLTESNKKFLPFQQFGRDIADTTDAVRDPQTLEILDITPCSFGGVSVITPGTNTSNQVAVLYQGVNCTEVPVAIHADQLTPTWRVYSTGSNVFQTRAGCLIGAEHVNNSYECDIPIGAGICASYQTQTNSPRRARSVASQSIIAYTMSLGAENSVAYSNNSIAIPTNFTISVTTEILPVSMTKTSVDCTMYICGDSTECSNLLLQYGSFCTQLNRALTGIAVEQDKNTQEVFAQVKQIYKTPPIKDFGGFNFSQILPDPSKPSKRSFIEDLLFNKVTLADAGFIKQYGDCLGDIAARDLICAQKFNGLTVLPPLLTDEMIAQYTSALLAGTITSGWTFGAGAALQIPFAMQMAYRFNGIGVTQNVLYENQKLIANQFNSAIGKIQDSLSSTASALGKLQDVVNQNAQALNTLVKQLSSNFGAISSVLNDILSRLDPPEAEVQIDRLITGRLQSLQTYVTQQLIRAAEIRASANLAATKMSECVLGQSKRVDFCGKGYHLMSFPQSAPHGVVFLHVTYVFAQEKNFTTAPAICHDGKAHFPREGVFVSNGTHWFVTQRNFYEPQIITTDNTFVSGNCDVVIGIVNNTVYDPLQPELDSFKEELDKYFKNHTSPDVDLGDISGINASVVNIQKEIDRLNEVAKNLNESLIDLQELGKYEQYIKGGGSGGGQIYEGKLTAEGLRFGIVASRFNHALVDRLVEGAIDAIVRHGGREEDITLVRVPGSWEIPVAAGELARKEDIDAVIAIGVLIRGATPHFDYIASEVSKGLADLSLELRKPITFGVITADTLEQAIERAGTKHGNKGWEAALSAIEMANLFKSLR

SEQ ID NO: 3847 - protein, 1371 aa, Artificial Sequence
  SARS-CoV-2/Belgium/BA-02291/2020__EPI_ISL_415159 spike protein (1-1211)(K986P_V987P_P1069F) LumSynth construct
MFVFLVLLPLVSSQCVNLTTRTQLPPAYTNSFTRGVYYPDKVFRSSVLHSTQDLFLPFFSNVTWFHAIHVSGTNGTKRFDNPVLPFNDGVYFASTEKSNIIRGWIFGTTLDSKTQSLLIVNNATNVVIKVCEFQFCNDPFLGVYYHKNNKSWMESEFRVYSSANNCTFEYVSQPFLMDLEGKQGNFKNLREFVFKNIDGYFKIYSKHTPINLVRDLPQGFSALEPLVDLPIGINITRFQTLLALHRSYLTPGDSSSGWTAGAAAYYVGYLQPRTFLLKYNENGTITDAVDCALDPLSETKCTLKSFTVEKGIYQTSNFRVQPTESIVRFPNITNLCPFGEVFNATRFASVYAWNRKRISNCVADYSVLYNSASFSTFKCYGVSPTKLNDLCFTNVYADSFVIRGDEVRQIAPGQTGKIADYNYKLPDDFTGCVIAWNSNNLDSKVGGNYNYLYRLFRRSNLKPFERDISTEIYQAGSTPCNGVEGFNCYFPLQSYGFQPTNGVGYQPYRVVVLSFELLPAPATVCGPKKSTNLVKNKCVNFNFNGLTGTGVLTESNKKFLPFQQFGRDIADTTDAVRDPQTLEILDITPCSFGGVSVITPGTNTSNQVAVLYQGVNCTEVPVAIHADQLTPTWRVYSTGSNVFQTRAGCLIGAEHVNNSYECDIPIGAGICASYQTQTNSPRRARSVASQSIIAYTMSLGAENSVAYSNNSIAIPTNFTISVTTEILPVSMTKTSVDCTMYICGDSTECSNLLLQYGSFCTQLNRALTGIAVEQDKNTQEVFAQVKQIYKTPPIKDFGGFNFSQILPDPSKPSKRSFIEDLLFNKVTLADAGFIKQYGDCLGDIAARDLICAQKFNGLTVLPPLLTDEMIAQYTSALLAGTITSGWTFGAGAALQIPFAMQMAYRFNGIGVTQNVLYENQKLIANQFNSAIGKIQDSLSSAAPALGKLQDVVNQNAQALNTLVKQLSSNFGAISSVLNDILSRLDPPEAEVQIDRLITGRLQSLQTYVTQQLIRAAEIRASANLAATKMSECVLGQSKRVDFCGKGYHLMSFPQSAPHGVVFLHVTYVFAQEKNFTTAPAICHDGKAHFPREGVFVSNGTHWFVTQRNFYEPQIITTDNTFVSGNCDVVIGIVNNTVYDPLQPELDSFKEELDKYFKNHTSPDVDLGDISGINASVVNIQKEIDRLNEVAKNLNESLIDLQELGKYEQYIKGGGSGGGQIYEGKLTAEGLRFGIVASRFNHALVDRLVEGAIDAIVRHGGREEDITLVRVPGSWEIPVAAGELARKEDIDAVIAIGVLIRGATPHFDYIASEVSKGLADLSLELRKPITFGVITADTLEQAIERAGTKHGNKGWEAALSAIEMANLFKSLR

SEQ ID NO: 3848 - protein, 1371 aa, Artificial Sequence
  SARS-CoV-2/USA/WA8-UW5/2020__EPI_ISL_413486 spike protein (1-1211)(K986P_V987P_P1069F) LumSynth construct
MFVFLVLLPLVSSQCVNLTTRTQLPPAYTNSFTRGVYYPDKVFRSSVLHSTQDLFLPFFSNVTWFHAIHVSGTNGTKRFDNPVLPFNDGVYFASTEKSNIIRGWIFGTTLDSKTQSLLIVNNATNVVIKVCEFQFCNDPFLGVYYHKNNKSWMESEFRVYSSANNCTFEYVSQPFLMDLEGKQGNFKNLREFVFKNIDGYFKIYSKHTPINLVRDLPQGFSALEPLVDLPIGINITRFQTLLALHRSYLTPGDSSSGWTAGAAAYYVGYLQPRTFLLKYNENGTITDAVDCALDPLSETKCTLKSFTVEKGIYQTSNFRVQPTESIVRFPNITNLCPFGEVFNATRFASVYAWNRKRISNCVADYSVLYNSASFSTFKCYGVSPTKLNDLCFTNVYADSFVIRGDEVRQIAPGQTGKIADYNYKLPDDFTGCVIAWNSNNLDSKVGGNYNYLYRLFRKSNLKPFERDISTEIYQAGSTPCNGVEGFNCYFPLQSYGFQPTNGVGYQPYRVVVLSFELLHAPATVCGPKKSTNLVKNKCVNFNFNGLTGTGVLTESNKKFLPFQQFGRDIADTTDAVRDPQTLEILDITPCSFGGVSVITPGTNTSNQVAVLYQDVNCTEVPVAIHADQLTPTWRVYSTGSNVFQTRAGCLIGAEYVNNSYECDIPIGAGICASYQTQTNSPRRARSVASQSIIAYTMSLGAENSVAYSNNSIAIPTNFTISVTTEILPVSMTKTSVDCTMYICGDSTECSNLLLQYGSFCTQLNRALTGIAVEQDKNTQEVFAQVKQIYKTPPIKDFGGFNFSQILPDPSKPSKRSFIEDLLFNKVTLADAGFIKQYGDCLGDIAARDLICAQKFNGLTVLPPLLTDEMIAQYTSALLAGTITSGWTFGAGAALQIPFAMQMAYRFNGIGVTQNVLYENQKLIANQFNSAIGKIQDSLSSTASALGKLQDVVNQNAQALNTLVKQLSSNFGAISSVLNDILSRLDPPEAEVQIDRLITGRLQSLQTYVTQQLIRAAEIRASANLAATKMSECVLGQSKRVDFCGKGYHLMSFPQSAPHGVVFLHVTYVFAQEKNFTTAPAICHDGKAHFPREGVFVSNGTHWFVTQRNFYEPQIITTDNTFVSGNCDVVIGIVNNTVYDPLQPELDSFKEELDKYFKNHTSPDVDLGDISGINASVVNIQKEIDRLNEVAKNLNESLIDLQELGKYEQYIKGGGSGGGQIYEGKLTAEGLRFGIVASRFNHALVDRLVEGAIDAIVRHGGREEDITLVRVPGSWEIPVAAGELARKEDIDAVIAIGVLIRGATPHFDYIASEVSKGLADLSLELRKPITFGVITADTLEQAIERAGTKHGNKGWEAALSAIEMANLFKSLR

SEQ ID NO: 3849 - protein, 1371 aa, Artificial Sequence
  SARS-CoV-2/England/20102000506/2020__EPI_ISL_415147 spike protein (1-1211)(K986P_V987P_P1069F) LumSynth construct
MFVFLVLLPLVSSQCVNLTTRTQLPPAYTNSFTRGVYYPDKVFRSSVLHSTQDLFLPFFSNVTWFHAIHVSGTNGTKRFDNPVLPFNDGVYFASTEKSNIIRGWIFGTTLDSKTQSLLIVNNATNVVIKVCEFQFCNDPFLGVYYHKNNKSWMESEFRVYSSANNCTFEYVSQPFLMDLEGKQGNFKNLREFVFKNIDGYFKIYSKHTPINLVRDLPQGFSALEPLVDLPIGINITRFQTLLALHRSYLTPGDSSSGWTAGAAAYYVGYLQPRTFLLKYNENGTITDAVDCALDPLSETKCTLKSFTVEKGIYQTSNFRVQPTESIVRFPNITNLCPFGEVFNATRFASVYAWNRKRISNCVADYSVLYNSASFSTFKCYGVSPTKLNDLCFTNVYADSFVIRGDEVRQIAPGQTGKIADYNYKLPDDFTGCVIAWNSNNLDSKVGGNYNYLYRLFRKSNLKPFERDISTEIYQAGSTPCNGVEGFNCYFPLQSYGFQPTNGVGYQPYRVVVLSFELLHAPATVCGPKKSTNLVKNKCVNFNFNGLTGTGVLTESNKKFLPFQQFGRDIADTTDAVRDPQTLEILDITPCSFGGVSVITPGTNTSNQVAVLYQGVNCTEVPVAIHADQLTPTWRVYSTGSNVFQTRAGCLIGAEHVNNSYECDIPIGAGICASYQTQTNSPRRARSVASQSIIAYTMSLGAENSVAYSNNSIAIPTNFTISVTTEILPVSMTKTSVDCTMYICGDSTECSNLLLQYGSFCTQLNRALTGIAVEQDKNTQEVFAQVKQIYKTPPIKDFGGFNFSQILPDPSKPSKRSFIEDLLFNKVTLADAGFIKQYGYCLGDIAARDLICAQKFNGLTVLPPLLTDEMIAQYTSALLAGTITSGWTFGAGAALQIPFAMQMAYRFNGIGVTQNVLYENQKLIANQFNSAIGKIQDSLSSTASALGKLQDVVNQNAQALNTLVKQLSSNFGAISSVLNDILSRLDPPEAEVQIDRLITGRLQSLQTYVTQQLIRAAEIRASANLAATKMSECVLGQSKRVDFCGKGYHLMSFPQSAPHGVVFLHVTYVFAQEKNFTTAPAICHDGKAHFPREGVFVSNGTHWFVTQRNFYEPQIITTDNTFVSGNCDVVIGIVNNTVYDPLQPELDSFKEELDKYFKNHTSPDVDLGDISGINASVVNIQKEIDRLNEVAKNLNESLIDLQELGKYEQYIKGGGSGGGQIYEGKLTAEGLRFGIVASRFNHALVDRLVEGAIDAIVRHGGREEDITLVRVPGSWEIPVAAGELARKEDIDAVIAIGVLIRGATPHFDYIASEVSKGLADLSLELRKPITFGVITADTLEQAIERAGTKHGNKGWEAALSAIEMANLFKSLR

SEQ ID NO: 3850 - protein, 1371 aa, Artificial Sequence
  SARS-CoV-2/Belgium/VAG-03013/2020__EPI_ISL_415155 spike protein (1-1211)(K986P_V987P_P1069F) LumSynth construct
MFVFLVLLPLVSSQCVNLTTRTQLPPAYTNSFTRGVYYPDKVFRSSVLHSTQDLFLPFFSNVTWFHAIHVSGTNGTKRFDNPVLPFNDGVYFASTEKSNIIRGWIFGTTLDSKTQSLLIVNNATNVVIKVCEFQFCNDPFLGVYYHKNNKSWMESEFRVYSSANNCTFEYVSQPFLMDLEGKQGNFKNLREFVFKNIDGYFKIYSKHTPINLVRDLPQGFSALEPLVDLPIGINITRFQTLLALHRSYLTPGDSSSGWTAGAAAYYVGYLQPRTFLLKYNENGTITDAVDCALDPLSETKCTLKSFTVEKGIYQTSNFRVQPTESIVRFPNITNLCPFGEVFNATRFASVYAWNRKRISNCVADYSVLYNSASFSTFKCYGVSPTKLNDLCFTNVYADSFVIRGDEVRQIAPGQTGKIADYNYKLPDDFTGCVIAWNSNNLDSKVGGNYNYLYRLFRKSNLKPFERDISTEIYQAGSTPCNGVEGFNCYFPLQSYGFQPTNGVGYQPYRVVVLSFELLHAPATVCGPKKSTNLVKNKCVNFNFNGLTGTGVLTESNKKFLPFQQFGRDIADTTDAVRDPQTLEILDITPCSFGGVSVITPGTNTSNQVAVLYQGVNCTEVPVAIHADQLTPTWRVYSTGSNVFQTRAGCLIGAEHVNNSYECDIPIGAGICASYQTQTNSPRRARSVASQSIIAYTMSLGAENSVAYSNNSIAIPTNFTISVTTEILPVSMTKTSVDCTMYICGDSTECSNLLLQYGSFCTQLNRALTGIAVEQDKNTQEVFAQVKQIYKTPPIKDFGGFNFSQILPDPSKPSKRSFIEDLLFNKVTLADAGFIKQYGDCLGDIAARDLICAQKFNGLTVLPPLLTDEMIAQYTSALLAGTITSGWTFGAGAALQIPFAMQMAYRFNGIGVTQNVLYENQKLIANQFNSAIGKIQDSLSSTATALGKLQDVVNQNAQALNTLVKQLSSNFGAISSVLNDILSRLDPPEAEVQIDRLITGRLQSLQTYVTQQLIRAAEIRASANLAATKMSECVLGQSKRVDFCGKGYHLMSFPQSAPHGVVFLHVTYVFAQEKNFTTAPAICHDGKAHFPREGVFVSNGTHWFVTQRNFYEPQIITTDNTFVSGNCDVVIGIVNNTVYDPLQPELDSFKEELDKYFKNHTSPDVDLGDISGINASVVNIQKEIDRLNEVAKNLNESLIDLQELGKYEQYIKGGGSGGGQIYEGKLTAEGLRFGIVASRFNHALVDRLVEGAIDAIVRHGGREEDITLVRVPGSWEIPVAAGELARKEDIDAVIAIGVLIRGATPHFDYIASEVSKGLADLSLELRKPITFGVITADTLEQAIERAGTKHGNKGWEAALSAIEMANLFKSLR

SEQ ID NO: 3851 - protein, 1371 aa, Artificial Sequence
  SARS-CoV-2/Belgium/BC-03016/2020__EPI_ISL_415157 spike protein (1-1211)(K986P_V987P_P1069F) LumSynth construct
MFVFLVLLPLVSSQCVNLTTRTQLPPAYTNSFTRGVYYPDKVFRSSVLHSTQDLFLPFFSNVTWFHAIHVSGTNGTKRFDNPVLPFNDGVYFASTEKSNIIRGWIFGTTLDSKTQSLLIVNNATNVVIKVCEFQFCNDPFLGVYYHKNNKSWMESEFRVYSSANNCTFEYVSQPFLMDLEGKQGNFKNLREFVFKNIDGYFKIYSKHTPINLVRDLPQGFSALEPLVDLPIGINITRFQTLLALHRSYLTPGDSSSGWTAGAAAYYVGYLQPRTFLLKYNENGTITDAVDCALDPLSETKCTLKSFTVEKGIYQTSNFRVQPTESIVRFPNITNLCPFGEVFNATRFASVYAWNRKRISNCVADYSVLYNSASFSTFKCYGVSPTKLNDLCFTNVYADSFVIRGDEVRQIAPGQTGKIADYNYKLPDDFTGCVIAWNSNNLDSKVGGNYNYLYRLFRKSNLKPFERDISTEIYQAGSTPCNGVEGFNCYFPLQSYGFQPTNGVGYQPYRVVVLSFELLHAPATVCGPKKSTNLVKNKCVNFNFNGLTGTGVLTESNKKFLPFQQFGRDIADTTDAVRDPQTLEILDITPCSFGGVSVITPGTNTSNQVAVLYQGVNCTEVPVAIHADQLTPTWRVYSTGSNVFQTRAGCLIGAEHVNNSYECDIPIGAGICASYQTQTNSPRRARSVASQSIIAYTMSLGAENSVAYSNNSIAIPTNFTISVTTEILPVSMTKTSVDCTMYICGDSTECSNLLLQYGSFCTQLNRALTGIAVEQDKNTQEVFAQVKQIYKTPPIKDFGGFNFSQILPDPSKPSKRSFIEDLLFNKVTLADAGFIKQYGDCLGDIAARDLICAQKFNGLTVLPPLLTDEMIAQYTSALLAGTITSGWTFGAGAALQIPFAMQMAYRFNGIGVTQNVLYENQKLIANQFNSAIGKIQDSLSSTAPALGKLQDVVNQNAQALNTLVKQLSSNFGAISSVLNDILSRLDPPEAEVQIDRLITGRLQSLQTYVTQQLIRAAEIRASANLAATKMSECVLGQSKRVDFCGKGYHLMSFPQSAPHGVVFLHVTYVFAQEKNFTTAPAICHDGKAHFPREGVFVSNGTHWFVTQRNFYEPQIITTDNTFVSGNCDVVIGIVNNTVYDPLQPELDSFKEELDKYFKNHTSPDVDLGDISGINASVVNIQKEIDRLNEVAKNLNESLIDLQELGKYEQYIKGGGSGGGQIYEGKLTAEGLRFGIVASRFNHALVDRLVEGAIDAIVRHGGREEDITLVRVPGSWEIPVAAGELARKEDIDAVIAIGVLIRGATPHFDYIASEVSKGLADLSLELRKPITFGVITADTLEQAIERAGTKHGNKGWEAALSAIEMANLFKSLR

SEQ ID NO: 3852 - protein, 1371 aa, Artificial Sequence
  SARS-CoV-2/Germany/BavPat3/2020__EPI_ISL_414521 spike protein (1-1211)(K986P_V987P_P1069F) LumSynth construct
MFVFLVLLPLVSSQCVNLTTRTQLPPAYTNSFTRGVYYPDKVFRSSVLHSTQDLFLPFFSNVTWFHAIHVSGTNGTKRFDNPVLPFNDGVYFASTEKSNIIRGWIFGTTLDSKTQSLLIVNNATNVVIKVCEFQFCNDPFLGVYYHKNNKSWMESEFRVYSSANNCTFEYVSQPFLMDLEGKQGNFKNLREFVFKNIDGYFKIYSKHTPINLVRDLPQGFSALEPLVDLPIGINITRFQTLLALHRSYLTPGDSSSGWTAGAAAYYVGYLQPRTFLLKYNENGTITDAVDCALDPLSETKCTLKSFTVEKGIYQTSNFRVQPTESIVRFPNITNLCPFGEVFNATRFASVYAWNRKRISNCVADYSVLYNSASFSTFKCYGVSPTKLNDLCFTNVYADSFVIRGDEVRQIAPGQTGKIADYNYKLPDDFTGCVIAWNSNNLDSKVGGNYNYLYRLFRKSNLKPFERDISTEIYQAGSTPCNGVEGFNCYFPLQSYGFQPTNGVGYQPYRVVVLSFELLHAPATVCGPKKSTNLVKNKCVNFNFNGLTGTGVLTESNKKFLPFQQFGRDIADTTDAVRDPQTLEILDITPCSFGGVSVITPGTNTSNQVAVLYQDVNCTEVPVAIHADQLTPTWRVYSTGSNVFQTRAGCLIGAEHVNNSYECDIPIGAGICASYQTQTNSPRRARSVASQSIIAYTMSLGAENSVAYSNNSIAIPTNFTISVTTEILPVSMTKTSVDCTMYICGDSTECSNLLLQYGSFCTQLNRALTGIAVEQDKNTQQVFAQVKQIYKTPPIKDFGGFNFSQILPDPSKPSKRSFIEDLLFNKVTLADAGFIKQYGDCLGDIAARDLICAQKFNGLTVLPPLLTDEMIAQYTSALLAGTITSGWTFGAGAALQIPFAMQMAYRFNGIGVTQNVLYENQKLIANQFNSAIGKIQDSLSSTASALGKLQDVVNQNAQALNTLVKQLSSNFGAISSVLNDILSRLDPPEAEVQIDRLITGRLQSLQTYVTQQLIRAAEIRASANLAATKMSECVLGQSKRVDFCGKGYHLMSFPQSAPHGVVFLHVTYVFAQEKNFTTAPAICHDGKAHFPREGVFVSNGTHWFVTQRNFYEPQIITTDNTFVSGNCDVVIGIVNNTVYDPLQPELDSFKEELDKYFKNHTSPDVDLGDISGINASVVNIQKEIDRLNEVAKNLNESLIDLQELGKYEQYIKGGGSGGGQIYEGKLTAEGLRFGIVASRFNHALVDRLVEGAIDAIVRHGGREEDITLVRVPGSWEIPVAAGELARKEDIDAVIAIGVLIRGATPHFDYIASEVSKGLADLSLELRKPITFGVITADTLEQAIERAGTKHGNKGWEAALSAIEMANLFKSLR

SEQ ID NO: 3853 - protein, 1371 aa, Artificial Sequence
  SARS-CoV-2/France/HF1805/2020__EPI_ISL_414628 spike protein (1-1211)(K986P_V987P_P1069F) LumSynth construct
MFVFLVLLPLVSSQCVNLTTRTQLPPAYTNSFTRGVYYPDKVFRSSVLHSTQDLFLPFFSNVTWFHAIHVSGTNGTKRFDNPVLPFNDGVYFASTEKSNIIRGWIFGTTLDSKTQSLLIVNNATNVVIKVCEFQFCNDPFLGVYYHKNNKSWMESEFRVYSSANNCTFEYVSQPFLMDLEGKQGNFKNLREFVFKNIDGYFKIYSKHTPINLVRDLPQGFSALEPLVDLPIGINITRFQTLLALHRSYLTPGDSSSGWTAGAAAYYVGYLQPRTFLLKYNENGTITDAVDCALDPLSETKCTLKSFTVEKGIYQTSNFRVQPTESIVRFPNITNLCPFGEVFNATRFASVYAWNRKRISNCVADYSVLYNSASFSTFKCYGVSPTKLNDLCFTNVYADSFVIRGDEVRQIAPGQTGKIADYNYKLPDDFTGCVIAWNSNNLDSKVGGNYNYLYRLFRKSNLKPFERDISTEIYQAGSTPCNGVEGFNCYFPLQSYGFQPTNGVGYQPYRVVVLSFELLHAPATVCGPKKSTNLVKNKCVNFNFNGLTGTGVLTESNKKFLPFQQFGRDIADTTDAVRDPQTLEILDITPCSFGGVSVITPGTNTSNQVAVLYQGVNCTEVPVAIHADQLTPTWRVYSTGSNVFQTRAGCLIGAEHVNNSYECDIPIGAGICASYQTQTNSPRRARSVASQSIIAYTMSLGAENSVAYSNNSIAIPTNFTISVTTEILPVSMTKTSVDCTMYICGDSTECSNLLLQYGSFCTQLNRALTGIAVEQDKNTQEVFAQVKQIYKTPPIKDFGGFNFSQILPDPSKPSKRSFIEDLLFNKVTLADAGFIKQYGDCLGDIAARDLICAQKFNGLTVLPPLLTDEMIAQYTSALLAGTITSGWTFGAGAALQIPFAMQMAYRFNGIGVTQNVLYENQKLIANQFNSAIGKIQDSLSSTASALGKLQDVVNQNAQALNTLVKQLSSNFGAISSVLNDILSRLDPPEAEVQIDRLITGRLQSLQTYVTQQLIRAAEIRASANLAATKMSECVLGQSKRVDFCGKGYHLMSFPQSAPHGVVFLHVTYVFAQEKNFTTAPAICHDGKAHFPREGVFVSNGTHWFVTQRNFYEPQIITTDNTFVSGNCDVVIGVVNNTVYDPLQPELDSFKEELDKYFKNHTSPDVDLGDISGINASVVNIQKEIDRLNEVAKNLNESLIDLQELGKYEQYIKGGGSGGGQIYEGKLTAEGLRFGIVASRFNHALVDRLVEGAIDAIVRHGGREEDITLVRVPGSWEIPVAAGELARKEDIDAVIAIGVLIRGATPHFDYIASEVSKGLADLSLELRKPITFGVITADTLEQAIERAGTKHGNKGWEAALSAIEMANLFKSLR

SEQ ID NO: 3854 - protein, 1371 aa, Artificial Sequence
  SARS-CoV-2/Netherlands/ZuidHolland_9/2020__EPI_ISL_414445 spike protein (1-1211)(K986P_V987P_P1069F) LumSynth construct
MFVFLVLLPLVSSQCVNLTTRTQLPPAYTNSFTRGVYYPDKVFRSSVLHSTQDLFLPFFSNVTWFHAIHVSGTNGTKRFDNPVLPFNDGVYFASTEKSNIIRGWIFGTTLDSKTQSLLIVNNATNVVIKVCEFQFCNDPFLGVYYHKNNKSWMESEFRVYSSANNCTFEYVSQPFLMDLEGKQGNFKNLREFVFKNIDGYFKIYSKHTPINLVRDLPQGFSALEPLVDLPIGINITRFQTLLALHRSYLTPGDSSSGWTAGAAAYYVGYLQPRTFLLKYNENGTITDAVDCALDPLSETKCTLKSFTVEKGIYQTSNFRVQPTESIVRFPNITNLCPFGEVFNATRFASVYAWNRKRISNCVADYSVLYNSASFSTFKCYGVSPTKLNDLCFTNVYADSFVIRGDEVRQIAPGQTGKIADYNYKLPDDFTGCVIAWNSNNLDSKVGGNYNYLYRLFRKSNLKPFERDISTEIYQAGSTPCNGVEGFNCYFPLQSYGFQPTNGVGYQPYRVVVLSFELLHAPATVCGPKKSTNLVKNKCVNFNFNGLTGTGVLTESNKKFLPFQQFGRDIADTTDAVRDPQTLEILDITPCSFGGVSVITPGTNTSNQVAVLYQGVNCTEVPVAIHADQLTPTWRVYSTGSNVFQTRAGCLIGAEHVNNSYECDIPIGAGICASYQTQTNSPRRARSVASQSIIAYTMSLGAENSVAYSNNSIAIPTNFTISVTTEILPVSMTKTSVDCTMYICGDSTECSNLLLQYGSFCTQLNRALTGIAVEQDKNTQEVFAQVKQIYKTPPIKDFGGFNFSQILPDPSKPSKRSFIEDLLFNKVTLADAGFIKQYGDCLGDIAARDLICVQKFNGLTVLPPLLTDEMIAQYTSALLAGTITSGWTFGAGAALQIPFAMQMAYRFNGIGVTQNVLYENQKLIANQFNSAIGKIQDSLSSTASALGKLQDVVNQNAQALNTLVKQLSSNFGAISSVLNDILSRLDPPEAEVQIDRLITGRLQSLQTYVTQQLIRAAEIRASANLAATKMSECVLGQSKRVDFCGKGYHLMSFPQSAPHGVVFLHVTYVFAQEKNFTTAPAICHDGKAHFPREGVFVSNGTHWFVTQRNFYEPQIITTDNTFVSGNCDVVIGIVNNTVYDPLQPELDSFKEELDKYFKNHTSPDVDLGDISGINASVVNIQKEIDRLNEVAKNLNESLIDLQELGKYEQYIKGGGSGGGQIYEGKLTAEGLRFGIVASRFNHALVDRLVEGAIDAIVRHGGREEDITLVRVPGSWEIPVAAGELARKEDIDAVIAIGVLIRGATPHFDYIASEVSKGLADLSLELRKPITFGVITADTLEQAIERAGTKHGNKGWEAALSAIEMANLFKSLR

SEQ ID NO: 3855 - protein, 1371 aa, Artificial Sequence
  SARS-CoV-2/Finland/FIN03032020A/2020__EPI_ISL_413602 spike protein (1-1211)(K986P_V987P_P1069F) LumSynth construct
MFVFLVLLPLVSSQCVNLTTRTQLPPAYTNSFTRGVYYPDKVFRSSVLHSTQDLFLPFFSNVTWFHAIHVSGTNGTKRFDNPVLPFNDGVYFASTEKSNIIRGWIFGTTLDSKTQSLLIVNNATNVVIKVCEFQFCNDPFLGVYYHKNNKSWMESEFRVYSSANNCTFEYVSQPFLMDLEGKQGNFKNLREFVFKNIDGYFKIYSKHTPINLVRDLPQGFSALEPLVDLPIGINITRFQTLLALHRSYLTPGDSSSGWTAGAAAYYVGYLQPRTFLLKYNENGTITDAVDCALDPLSETKCTLKSFTVEKGIYQTSNFRVQPTESIVRFPNITNLCPFGEVFNATRFASVYAWNRKRISNCVADYSVLYNSASFSTFKCYGVSPTKLNDLCFTNVYADSFVIRGDEVRQIAPGQTGKIADYNYKLPDDFTGCVISWNSNNLDSKVGGNYNYLYRLFRKSNLKPFERDISTEIYQAGSTPCNGVEGFNCYFPLQSYGFQPTNGVGYQPYRVVVLSFELLHAPATVCGPKKSTNLVKNKCVNFNFNGLTGTGVLTESNKKFLPFQQFGRDIADTTDAVRDPQTLEILDITPCSFGGVSVITPGTNTSNQVAVLYQGVNCTEVPVAIHADQLTPTWRVYSTGSNVFQTRAGCLIGAEHVNNSYECDIPIGAGICASYQTQTNSPRRARSVASQSIIAYTMSLGAENSVAYSNNSIAIPTNFTISVTTEILPVSMTKTSVDCTMYICGDSTECSNLLLQYGSFCTQLNRALTGIAVEQDKNTQEVFAQVKQIYKTPPIKDFGGFNFSQILPDPSKPSKRSFIEDLLFNKVTLADAGFIKQYGDCLGDIAARDLICAQKFNGLTVLPPLLTDEMIAQYTSALLAGTITSGWTFGAGAALQIPFAMQMAYRFNGIGVTQNVLYENQKLIANQFNSAIGKIQDSLSSTASALGKLQDVVNQNAQALNTLVKQLSSNFGAISSVLNDILSRLDPPEAEVQIDRLITGRLQSLQTYVTQQLIRAAEIRASANLAATKMSECVLGQSKRVDFCGKGYHLMSFPQSAPHGVVFLHVTYVFAQEKNFTTAPAICHDGKAHFPREGVFVSNGTHWFVTQRNFYEPQIITTDNTFVSGNCDVVIGIVNNTVYDPLQPELDSFKEELDKYFKNHTSPDVDLGDISGINASVVNIQKEIDRLNEVAKNLNESLIDLQELGKYEQYIKGGGSGGGQIYEGKLTAEGLRFGIVASRFNHALVDRLVEGAIDAIVRHGGREEDITLVRVPGSWEIPVAAGELARKEDIDAVIAIGVLIRGATPHFDYIASEVSKGLADLSLELRKPITFGVITADTLEQAIERAGTKHGNKGWEAALSAIEMANLFKSLR

SEQ ID NO: 3856 - protein, 1371 aa, Artificial Sequence
  SARS-CoV-2/France/GE1977/2020__EPI_ISL_414632 spike protein (1-1211)(K986P_V987P_P1069F) LumSynth construct
MFVFLVLLPLVSSQCVNLTTRTQLPPAYTNSFTRGVYYPDKVFRSSVLHSTQDLFLPFFSNVTWFHAIHVSGTNGTKRFDNPVLPFNDGVYFASTEKSNIIRGWIFGTTLDSKTQSLLIVNNATNVVIKVCEFQFCNDPFLGVYYHKNNKSWMESEFRVYSSANNCTFEYVSQPFLMDLEGKQGNFKNLREFVFKNIDGYFKIYSKHTPINLVRDLPQGFSALEPLVDLPIGINITRFQTLLALHRSYLTPGDSSSGWTAGAAAYYVGYLQPRTFLLKYNENGTITDAVDCALDPLSETKCTLKSFTVEKGIYQTSNFRVQPTESIVRFPNITNLCPFGEVFNATRFASVYAWNRKRISNCVADYSVLYNSASFSTFKCYGVSPTKLNDLCFTNVYADSFVIRGDEVRQIAPGQTGKIADYNYKLPDDFTGCVIAWNSNNLDSKVGGNYNYLYRLFRKSNLKPFERDISTEIYQAGSTPCNGVEGFNCYFPLQSYGFQPTNGVGYQPYRVVVLSFELLHAPATVCGPKKSTNLVKNKCVNFNFNGLTGTGVLTESNKKFLPFQQFGRDIADTTDAVRDPQTLEILDITPCSFGGVSVITPGTNTSNQVAVLYQGVNCTEVPVAIHADQLTPTWRVYSTGSNVFQTRAGCLIGAEHVNNSYECDIPIGAGICASYQTQTNSPRRARSVASQSIIAYTMSLGAENSVAYSNNSIAIPTNFTISVTTEILPVSMTKTSVDCTMYICGDSTECSNLLLQYGSFCTQLNRALTGIAVEQDKNTQEVFAQVKQIYKTPPIKDFGGFNFSQILPDPSKPSKRSFIEDLLFNKVTLADAGFIKQYGDCLGDIAARDLICAQKFNGLTVLPPLLTDEMIAQYTSALLAGTITSGWTFGAGAALQIPFAMQMAYRFNGIGVTQNVLYENQKLIANQFNSAIGKIQDSLFSTASALGKLQDVVNQNAQALNTLVKQLSSNFGAISSVLNDILSRLDPPEAEVQIDRLITGRLQSLQTYVTQQLIRAAEIRASANLAATKMSECVLGQSKRVDFCGKGYHLMSFPQSAPHGVVFLHVTYVFAQEKNFTTAPAICHDGKAHFPREGVFVSNGTHWFVTQRNFYEPQIITTDNTFVSGNCDVVIGIVNNTVYDPLQPELDSFKEELDKYFKNHTSPDVDLGDISGINASVVNIQKEIDRLNEVAKNLNESLIDLQELGKYEQYIKGGGSGGGQIYEGKLTAEGLRFGIVASRFNHALVDRLVEGAIDAIVRHGGREEDITLVRVPGSWEIPVAAGELARKEDIDAVIAIGVLIRGATPHFDYIASEVSKGLADLSLELRKPITFGVITADTLEQAIERAGTKHGNKGWEAALSAIEMANLFKSLR

SEQ ID NO: 3857 - protein, 1371 aa, Artificial Sequence
  SARS-CoV-2/Finland/FIN-313/2020__EPI_ISL_414641 spike protein (1-1211)(K986P_V987P_P1069F) LumSynth construct
MFVFLVLLPLVSSQCVNLTTRTQLPPAYTNSFTRGVYYPDKVFRSSVLHSTQDLFLPFFSNVTWFHAIHVSGTNGTKRFDNPVLPFNDGVYFASTEKSNIIRGWIFGTTLDSKTQSLLIVNNATNVVIKVCEFQFCNDPFLGVYYHKNNKSWMESEFRVYSSANNCTFEYVSQPFLMDLEGKQGNFKNLREFVFKNIDGYFKIYSKHTPINLVRDLPQGFSALEPLVDLPIGINITRFKTLLALHRSYLTPGDSSSGWTAGAAAYYVGYLQPRTFLLKYNENGTITDAVDCALDPLSETKCTLKSFTVEKGIYQTSNFRVQPTESIVRFPNITNLCPFGEVFNATRFASVYAWNRKRISNCVADYSVLYNSASFSTFKCYGVSPTKLNDLCFTNVYADSFVIRGDEVRQIAPGQTGKIADYNYKLPDDFTGCVIAWNSNNLDSKVGGNYNYLYRLFRKSNLKPFERDISTEIYQAGSTPCNGVEGFNCYFPLQSYGFQPTNGVGYQPYRVVVLSFELLHAPATVCGPKKSTNLVKNKCVNFNFNGLTGTGVLTESNKKFLPFQQFGRDIADTTDAVRDPQTLEILDITPCSFGGVSVITPGTNTSNQVAVLYQGVNCTEVPVAIHADQLTPTWRVYSTGSNVFQTRAGCLIGAEHVNNSYECDIPIGAGICASYQTQTNSPRRARSVASQSIIAYTMSLGAENSVAYSNNSIAIPTNFTISVTTEILPVSMTKTSVDCTMYICGDSTECSNLLLQYGSFCTQLNRALTGIAVEQDKNTQEVFAQVKQIYKTPPIKDFGGFNFSQILPDPSKPSKRSFIEDLLFNKVTLADAGFIKQYGDCLGDIAARDLICAQKFNGLTVLPPLLTDEMIAQYTSALLAGTITSGWTFGAGAALQIPFAMQMAYRFNGIGVTQNVLYENQKLIANQFNSAIGKIQDSLSSTASALGKLQDVVNQNAQALNTLVKQLSSNFGAISSVLNDILSRLDPPEAEVQIDRLITGRLQSLQTYVTQQLIRAAEIRASANLAATKMSECVLGQSKRVDFCGKGYHLMSFPQSAPHGVVFLHVTYVFAQEKNFTTAPAICHDGKAHFPREGVFVSNGTHWFVTQRNFYEPQIITTDNTFVSGNCDVVIGIVNNTVYDPLQPELDSFKEELDKYFKNHTSPDVDLGDISGINASVVNIQKEIDRLNEVAKNLNESLIDLQELGKYEQYIKGGGSGGGQIYEGKLTAEGLRFGIVASRFNHALVDRLVEGAIDAIVRHGGREEDITLVRVPGSWEIPVAAGELARKEDIDAVIAIGVLIRGATPHFDYIASEVSKGLADLSLELRKPITFGVITADTLEQAIERAGTKHGNKGWEAALSAIEMANLFKSLR

SEQ ID NO: 3858 - protein, 1371 aa, Artificial Sequence
  SARS-CoV-2/Netherlands/ZuidHolland_2/2020__EPI_ISL_414556 spike protein (1-1211)(K986P_V987P_P1069F) LumSynth construct
MFVFLVLLPLVSSQCVNLTTRTQLPPAYTNSFTRGVYYPDKVFRSSVLHSTQDLFLPFFSNVTWFHAIHVSGTNGTKRFDNPVLPFNDGVYFASTEKSNIIRGWIFGTTLDSKTQSLLIVNNATNVVIKVCEFQFCNDPFLGVYYHKNNKSWMESEFRVYSSANNCTFEYVSQPFLMDLEGKQGNFKNLREFVFKNIDGYFKIYSKHTPINLVRDLPQGFSALEPLVDLPIGINITRFQTLLALHRSYLTPGDSSSGWTAGAAAYYVGYLQPRTFLLKYNENGTITDAVDCALDPLSETKCTLKSFTVEKGIYQTSNFRVQPTESIVRFPNITNLCPFGEVFNATRFASVYAWNRKRISNCVADYSVLYNSASFSTFKCYGVSPTKLNDLCFTNVYADSFVIRGDEVRQIAPGQTGKIADYNYKLPDDFTGCVIAWNSNNLDSKVGGNYNYLYRLFRKSNLKPFERDISTEIYQAGSTPCNGVEGFNCYFPLQSYGFQPTNGVGYQPYRVVVLSFELLHAPATVCGPKKSTNLVKNKCVNFNFNGLTGTGVLTESNKKFLPFQQFGRDIADTTDAVRDPQTLEILDITPCSFGGVSVITPGTNTSNQVAVLYQGVNCTEVPVAIHADQLTPTWRVYSTGSNVFQTRAGCLIGAEHVNNSYECDIPIGAGICASYQTQTNSPRRARSVASQSIIAYTMSLGAENSVAYSNNSIAIPTNFTISVTTEILPVSMTKTSVDCTMYICGDSTECSNLLLQYGSFCTQLNRALTGIALEQDKNTQEVFAQVKQIYKTPPIKDFGGFNFSQILPDPSKPSKRSFIEDLLFNKVTLADAGFIKQYGDCLGDIAARDLICAQKFNGLTVLPPLLTDEMIAQYTSALLAGTITSGWTFGAGAALQIPFAMQMAYRFNGIGVTQNVLYENQKLIANQFNSAIGKIQDSLSSTASALGKLQDVVNQNAQALNTLVKQLSSNFGAISSVLNDILSRLDPPEAEVQIDRLITGRLQSLQTYVTQQLIRAAEIRASANLAATKMSECVLGQSKRVDFCGKGYHLMSFPQSAPHGVVFLHVTYVFAQEKNFTTAPAICHDGKAHFPREGVFVSNGTHWFVTQRNFYEPQIITTDNTFVSGNCDVVIGIVNNTVYDPLQPELDSFKEELDKYFKNHTSPDVDLGDISGINASVVNIQKEIDRLNEVAKNLNESLIDLQELGKYEQYIKGGGSGGGQIYEGKLTAEGLRFGIVASRFNHALVDRLVEGAIDAIVRHGGREEDITLVRVPGSWEIPVAAGELARKEDIDAVIAIGVLIRGATPHFDYIASEVSKGLADLSLELRKPITFGVITADTLEQAIERAGTKHGNKGWEAALSAIEMANLFKSLR

SEQ ID NO: 3859 - protein, 1371 aa, Artificial Sequence
  SARS-CoV-2/USA/WA-UW31/2020__EPI_ISL_414618 spike protein (1-1211)(K986P_V987P_P1069F) LumSynth construct
MFVFLVLLPLVSSQCVNLTTRTQLPPAYTNSFTRGVYYPDKVFRSSVLHSTQDLFLPFFSNVTWFHAIHVSGTNGTKRFDNPVLPFNDGVYFASTEKSNIIRGWIFGTTLDSKTQSLLIVNNATNVVIKVCEFQFCNDPFLGVYYHKNNKSWMESEFRVYSSANNCTFEYVSQPFLMDLEGKQGNFKNLREFVFKNIDGYFKIYSKHTPINLVRDLPQGFSALEPLVDLPIGINITRFQTLLALHRSYLTPGDSSSGWTAGAAAYYVGYLQPRTFLLKYNENGTITDAVDCALDPLSETKCTLKSFTVEKGIYQTSNFRVQPTESIVRFPNITNLCPFGEVFNATRFASVYAWNRKRISNCVADYSVLYNSASFSTFKCYGVSPTKLNDLCFTNVYADSFVIRGDEVRQIAPGQTGKIADYNYKLPDDFTGCVIAWNSNNLDSKVGGNYNYLYRLFRKSNLKPFERDISTEIYQAGSTPCNGAEGFNCYFPLQSYGFQPTNGVGYQPYRVVVLSFELLHAPATVCGPKKSTNLVKNKCVNFNFNGLTGTGVLTESNKKFLPFQQFGRDIADTTDAVRDPQTLEILDITPCSFGGVSVITPGTNTSNQVAVLYQDVNCTEVPVAIHADQLTPTWRVYSTGSNVFQTRAGCLIGAEHVNNSYECDIPIGAGICASYQTQTNSPRRARSVASQSIIAYTMSLGAENSVAYSNNSIAIPTNFTISVTTEILPVSMTKTSVDCTMYICGDSTECSNLLLQYGSFCTQLNRALTGIAVEQDKNTQEVFAQVKQIYKTPPIKDFGGFNFSQILPDPSKPSKRSFIEDLLFNKVTLADAGFIKQYGDCLGDIAARDLICAQKFNGLTVLPPLLTDEMIAQYTSALLAGTITSGWTFGAGAALQIPFAMQMAYRFNGIGVTQNVLYENQKLIANQFNSAIGKIQDSLSSTASALGKLQDVVNQNAQALNTLVKQLSSNFGAISSVLNDILSRLDPPEAEVQIDRLITGRLQSLQTYVTQQLIRAAEIRASANLAATKMSECVLGQSKRVDFCGKGYHLMSFPQSAPHGVVFLHVTYVFAQEKNFTTAPAICHDGKAHFPREGVFVSNGTHWFVTQRNFYEPQIITTDNTFVSGNCDVVIGIVNNTVYDPLQPELDSFKEELDKYFKNHTSPDVDLGDISGINASVVNIQKEIDRLNEVAKNLNESLIDLQELGKYEQYIKGGGSGGGQIYEGKLTAEGLRFGIVASRFNHALVDRLVEGAIDAIVRHGGREEDITLVRVPGSWEIPVAAGELARKEDIDAVIAIGVLIRGATPHFDYIASEVSKGLADLSLELRKPITFGVITADTLEQAIERAGTKHGNKGWEAALSAIEMANLFKSLR

SEQ ID NO: 3860 - protein, 1371 aa, Artificial Sequence
  SARS-CoV-2/South Korea/SNU01/2020__EPI_ISL_411929 spike protein (1-1211)(K986P_V987P_P1069F) LumSynth construct
MFVFLVLLPLVSSQCVNLTTRTQLPPAYTNSFTRGVYYPDKVFRSSVLHSTQDLFLPFFSNVTWFHAIHVSGTNGTKRFDNPVLPFNDGVYFASTEKSNIIRGWIFGTTLDSKTQSLLIVNNATNVVIKVCEFQFCNDPFLGVYYHKNNKSWMESEFRVYSSANNCTFEYVSQPFLMDLEGKQGNFKNLREFVFKNIDGYFKIYSKHTPINLVRDLPQGFWALEPLVDLPIGINITRFQTLLALHRSYLTPGDSSSGWTAGAAAYYVGYLQPRTFLLKYNENGTITDAVDCALDPLSETKCTLKSFTVEKGIYQTSNFRVQPTESIVRFPNITNLCPFGEVFNATRFASVYAWNRKRISNCVADYSVLYNSASFSTFKCYGVSPTKLNDLCFTNVYADSFVIRGDEVRQIAPGQTGKIADYNYKLPDDFTGCVIAWNSNNLDSKVGGNYNYLYRLFRKSNLKPFERDISTEIYQAGSTPCNGVEGFNCYFPLQSYGFQPTNGVGYQPYRVVVLSFELLHAPATVCGPKKSTNLVKNKCVNFNFNGLTGTGVLTESNKKFLPFQQFGRDIADTTDAVRDPQTLEILDITPCSFGGVSVITPGTNTSNQVAVLYQDVNCTEVPVAIHADQLTPTWRVYSTGSNVFQTRAGCLIGAEHVNNSYECDIPIGAGICASYQTQTNSPRRARSVASQSIIAYTMSLGAENSVAYSNNSIAIPTNFTISVTTEILPVSMTKTSVDCTMYICGDSTECSNLLLQYGSFCTQLNRALTGIAVEQDKNTQEVFAQVKQIYKTPPIKDFGGFNFSQILPDPSKPSKRSFIEDLLFNKVTLADAGFIKQYGDCLGDIAARDLICAQKFNGLTVLPPLLTDEMIAQYTSALLAGTITSGWTFGAGAALQIPFAMQMAYRFNGIGVTQNVLYENQKLIANQFNSAIGKIQDSLSSTASALGKLQDVVNQNAQALNTLVKQLSSNFGAISSVLNDILSRLDPPEAEVQIDRLITGRLQSLQTYVTQQLIRAAEIRASANLAATKMSECVLGQSKRVDFCGKGYHLMSFPQSAPHGVVFLHVTYVFAQEKNFTTAPAICHDGKAHFPREGVFVSNGTHWFVTQRNFYEPQIITTDNTFVSGNCDVVIGIVNNTVYDPLQPELDSFKEELDKYFKNHTSPDVDLGDISGINASVVNIQKEIDRLNEVAKNLNESLIDLQELGKYEQYIKGGGSGGGQIYEGKLTAEGLRFGIVASRFNHALVDRLVEGAIDAIVRHGGREEDITLVRVPGSWEIPVAAGELARKEDIDAVIAIGVLIRGATPHFDYIASEVSKGLADLSLELRKPITFGVITADTLEQAIERAGTKHGNKGWEAALSAIEMANLFKSLR

SEQ ID NO: 3861 - protein, 1371 aa, Artificial Sequence
  SARS-CoV-2/China/WF0004/2020__EPI_ISL_413694 spike protein (1-1211)(K986P_V987P_P1069F) LumSynth construct
MFVFLVLLPLVSSQCVNLTTRTQLPPAYTNSFTRGVYYPDKVFRSSVLHSTQDLFLPFFSNVTWFHAIHVSGTNGTKRFDNPVLPFNDGVYFASTEKSNIIRGWIFGTTLDSKTQSLLIVNNATNVVIKVCEFQFCNDPFLGVYYHKNNKSWTESEFRVYSSANNCTFEYVSQPFLMDLEGKQGNFKNLREFVFKNIDGYFKIYSKHTPINLVRDLPQGFSALEPLVDLPIGINITRFQTLLALHRSYLTPGDSSSGWTAGAAAYYVGYLQPRTFLLKYNENGTITDAVDCALDPLSETKCTLKSFTVEKGIYQTSNFRVQPTESIVRFPNITNLCPFGEVFNATRFASVYAWNRKRISNCVADYSVLYNSASFSTFKCYGVSPTKLNDLCFTNVYADSFVIRGDEVRQIAPGQTGKIADYNYKLPDDFTGCVIAWNSNNLDSKVGGNYNYLYRLFRKSNLKPFERDISTEIYQAGSTPCNGVEGFNCYFPLQSYGFQPTNGVGYQPYRVVVLSFELLHAPATVCGPKKSTNLVKNKCVNFNFNGLTGTGVLTESNKKFLPFQQFGRDIADTTDAVRDPQTLEILDITPCSFGGVSVITPGTNTSNQVAVLYQDVNCTEVPVAIHADQLTPTWRVYSTGSNVFQTRAGCLIGAEHVNNSYECDIPIGAGICASYQTQTNSPRRARSVASQSIIAYTMSLGAENSVAYSNNSIAIPTNFTISVTTEILPVSMTKTSVDCTMYICGDSTECSNLLLQYGSFCTQLNRALTGIAVEQDKNTQEVFAQVKQIYKTPPIKDFGGFNFSQILPDPSKPSKRSFIEDLLFNKVTLADAGFIKQYGDCLGDIAARDLICAQKFNGLTVLPPLLTDEMIAQYTSALLAGTITSGWTFGAGAALQIPFAMQMAYRFNGIGVTQNVLYENQKLIANQFNSAIGKIQDSLSSTASALGKLQDVVNQNAQALNTLVKQLSSNFGAISSVLNDILSRLDPPEAEVQIDRLITGRLQSLQTYVTQQLIRAAEIRASANLAATKMSECVLGQSKRFDFCGKGYHLMSFPQSAPHGVVFLHVTYVFAQEKNFTTAPAICHDGKAHFPREGVFVSNGTHWFVTQRNFYEPQIITTDNTFVSGNCDVVIGIVNNTVYDPLQPELDSFKEELDKYFKNHTSPDVDLGDISGINASVVNIQKEIDRLNEVAKNLNESLIDLQELGKYEQYIKGGGSGGGQIYEGKLTAEGLRFGIVASRFNHALVDRLVEGAIDAIVRHGGREEDITLVRVPGSWEIPVAAGELARKEDIDAVIAIGVLIRGATPHFDYIASEVSKGLADLSLELRKPITFGVITADTLEQAIERAGTKHGNKGWEAALSAIEMANLFKSLR

SEQ ID NO: 3862 - protein, 1371 aa, Artificial Sequence
  SARS-CoV-2/China/WF0028/2020__EPI_ISL_413791 spike protein (1-1211)(K986P_V987P_P1069F) LumSynth construct
MFVFLVLLPLVSSQCVNLTTRTQLPPAYTNSFTRGVYYPDKVFRSSVLHSTQDLFLPFFSNVTWFHAIHVSGTNGTKRFDNPVLPFNDGVYFASTEKSNIIRGWIFGTTLDSKTQSLLIVNNATNVVIKVCEFQFCNDPFLGVYYHKNNKSWMESEFRVYSSANNCTFEYVSQPFLMDLEGKQGNFKNLREFVFKNIDGYFKIYSKHTPINLVRDLPQGFSALEPLVDLPIGINITRFQTLLALHRSYLTPGDSSSGWTAGAAAYYVGYLQPRTFLLKYNENGTITDAVDCALDPLSETKCTLKSFTVEKGIYQTSNFRVQPTESIVRFPNITNLCPFGEVFNATRFASVYAWNRKRISNCVADYSVLYNSASFSTFKCYGVSPTKLNDLCFTNVYADSFVIRGDEVRQIAPGQTGKIADYNYKLPDDFTGCVIAWNSNNLDSKVGGNYNYLYRLFRKSNLKPFERDISTEIYQAGSTPCNGVEGFNCYFPLQSYGFQPTNGVGYQPYRVVVLSFELLHAPATVCGPKKSTNLVKNKCVNFNFNGLTGTGVLTESNKKFLPFQQFGRDIADTTDAVRDPQTLEILDITPCSFGGVSVITPGTNTSNQVAVLYQDVNCTEVPVAIHADQLTPTWRVYSTGSNVFQTRAGCLIGAEHVNNSYECDIPIGAGICASYQTQTNSPRRARSVASQSIIAYTMSLGAENSVAYSNNSIAIPTNFTISVTTEILPVSMTKTSVDCTMYICGDSTECSNLLLQYGSFCTQLNRALTGIAVEQDKNTQEVFAQVKQIYKTPPIKDFGGFNFSQILPDPSKPSKRSFIEDLLFNKVTLADAGFIKQYGDCLGDIAARDLICAQKFNGLTVLPPLLTDEMIAQYTSALLAGTITSGWTFGAGAALQIPFAMQMAYRFNGIGVTQNVLYENQKLIANQFNSAIGKIQDSLSSTASALGKLQDVVNQNAQALNTLVKQLSSNFGAISSVLNDILSRLDPPEAEVQIDRLITGRLQSLQTYVTQQLIRAAEIRASANLAATKMSECVLGQSKRVDFCGKGYHLMSFPQSAPHGVVFLHVTYVFAQEKNFTTAPAICHDGKAHFPREGVFVSNGTHWFVTQRNFYEPQIITTDNTFVSGNCDVVIGIVNNTVYDPLQPELESFKEELDKYFKNHTSPDVDLGDISGINASVVNIQKEIDRLNEVAKNLNESLIDLQELGKYEQYIKGGGSGGGQIYEGKLTAEGLRFGIVASRFNHALVDRLVEGAIDAIVRHGGREEDITLVRVPGSWEIPVAAGELARKEDIDAVIAIGVLIRGATPHFDYIASEVSKGLADLSLELRKPITFGVITADTLEQAIERAGTKHGNKGWEAALSAIEMANLFKSLR

SEQ ID NO: 3863 - protein, 1371 aa, Artificial Sequence
  SARS-CoV-2/2019-nCoV/USA-CruiseA-18/2020__MT159716.1 spike protein (1-1211)(K986P_V987P_P1069F) LumSynth construct
MFVFLVLLPLVSSQCVNLTTRTQLPPAYTNSFTRGVYYPDKVFRSSVLHSTQDLFLPFFSNVTWFHAIHVSGTNGTKRFDNPVLPFNDGVYFASTEKSNIIRGWIFGTTLDSKTQSLLIVNNATNVVIKVCEFQFCNDPFLGVYYHKNNKSWMESELRVYSSANNCTFEYVSQPFLMDLEGKQGNFKNLREFVFKNIDGYFKIYSKHTPINLVRDLPQGFSALEPLVDLPIGINITRFQTLLALHRSYLTPGDSSSGWTAGAAAYYVGYLQPRTFLLKYNENGTITDAVDCALDPLSETKCTLKSFTVEKGIYQTSNFRVQPTESIVRFPNITNLCPFGEVFNATRFASVYAWNRKRISNCVADYSVLYNSASFSTFKCYGVSPTKLNDLCFTNVYADSFVIRGDEVRQIAPGQTGKIADYNYKLPDDFTGCVIAWNSNNLDSKVGGNYNYLYRLFRKSNLKPFERDISTEIYQAGSTPCNGVEGFNCYFPLQSYGFQPTNGVGYQPYRVVVLSFELLHAPATVCGPKKSTNLVKNKCVNFNFNGLTGTGVLTESNKKFLPFQQFGRDIADTTDAVRDPQTLEILDITPCSFGGVSVITPGTNTSNQVAVLYQDVNCTEVPVAIHADQLTPTWRVYSTGSNVFQTRAGCLIGAEHVNNSYECDIPIGAGICASYQTQTNSPRRARSVASQSIIAYTMSLGAENSVAYSNNSIAIPTNFTISVTTEILPVSMTKTSVDCTMYICGDSTECSNLLLQYGSFCTQLNRALTGIAVEQDKNTQEVFAQVKQIYKTPPIKDFGGFNFSQILPDPSKPSKRSFIEDLLFNKVTLADAGFIKQYGDCLGDIAARDLICAQKFNGLTVLPPLLTDEMIAQYTSALLAGTITSGWTFGAGAALQIPFAMQMAYRFNGIGVTQNVLYENQKLIANQFNSAIGKIQDSLSSTASALGKLQDVVNQNAQALNTLVKQLSSNFGAISSVLNDILSRLDPPEAEVQIDRLITGRLQSLQTYVTQQLIRAAEIRASANLAATKMSECVLGQSKRVDFCGKGYHLMSFPQSAPHGVVFLHVTYVFAQEKNFTTAPAICHDGKAHFPREGVFVSNGTHWFVTQRNFYEPQIITTDNTFVSGNCDVVIGIVNNTVYDPLQPELDSFKEELDKYFKNHTSPDVDLGDISGINASVVNIQKEIDRLNEVAKNLNESLIDLQELGKYEQYIKGGGSGGGQIYEGKLTAEGLRFGIVASRFNHALVDRLVEGAIDAIVRHGGREEDITLVRVPGSWEIPVAAGELARKEDIDAVIAIGVLIRGATPHFDYIASEVSKGLADLSLELRKPITFGVITADTLEQAIERAGTKHGNKGWEAALSAIEMANLFKSLR

SEQ ID NO: 3864 - protein, 1371 aa, Artificial Sequence
  SARS-CoV-2/SARS-CoV-2/Yunnan-01/human/2020/CHN__MT049951.1 spike protein (1-1211)(K986P_V987P_P1069F) LumSynth construct
MFVFLVLLPLVSSQCVNLTTRTQLPPANTNSFTRGVYYPDKVFRSSVLHSTQDLFLPFFSNVTWFHAIHVSGTNGTKRFDNPVLPFNDGVYFASTEKSNIIRGWIFGTTLDSKTQSLLIVNNATNVVIKVCEFQFCNDPFLGVYYHKNNKSWMESEFRVYSSANNCTFEYVSQPFLMDLEGKQGNFKNLREFVFKNIDGYFKIYSKHTPINLVRDLPQGFSALEPLVDLPIGINITRFQTLLALHRSYLTPGDSSSGWTAGAAAYYVGYLQPRTFLLKYNENGTITDAVDCALDPLSETKCTLKSFTVEKGIYQTSNFRVQPTESIVRFPNITNLCPFGEVFNATRFASVYAWNRKRISNCVADYSVLYNSASFSTFKCYGVSPTKLNDLCFTNVYADSFVIRGDEVRQIAPGQTGKIADYNYKLPDDFTGCVIAWNSNNLDSKVGGNYNYLYRLFRKSNLKPFERDISTEIYQAGSTPCNGVEGFNCYFPLQSYGFQPTNGVGYQPYRVVVLSFELLHAPATVCGPKKSTNLVKNKCVNFNFNGLTGTGVLTESNKKFLPFQQFGRDIADTTDAVRDPQTLEILDITPCSFGGVSVITPGTNTSNQVAVLYQDVNCTEVPVAIHADQLTPTWRVYSTGSNVFQTRAGCLIGAEHVNNSYECDIPIGAGICASYQTQTNSPRRARSVASQSIIAYTMSLGAENSVAYSNNSIAIPTNFTISVTTEILPVSMTKTSVDCTMYICGDSTECSNLLLQYGSFCTQLNRALTGIAVEQDKNTQEVFAQVKQIYKTPPIKDFGGFNFSQILPDPSKPSKRSFIEDLLFNKVTLADAGFIKQYGDCLGDIAARDLICAQKFNGLTVLPPLLTDEMIAQYTSALLAGTITSGWTFGAGAALQIPFAMQMAYRFNGIGVTQNVLYENQKLIANQFNSAIGKIQDSLSSTASALGKLQDVVNQNAQALNTLVKQLSSNFGAISSVLNDILSRLDPPEAEVQIDRLITGRLQSLQTYVTQQLIRAAEIRASANLAATKMSECVLGQSKRVDFCGKGYHLMSFPQSAPHGVVFLHVTYVFAQEKNFTTAPAICHDGKAHFPREGVFVSNGTHWFVTQRNFYEPQIITTDNTFVSGNCDVVIGIVNNTVYDPLQPELDSFKEELDKYFKNHTSPDVDLGDISGINASVVNIQKEIDRLNEVAKNLNESLIDLQELGKYEQYIKGGGSGGGQIYEGKLTAEGLRFGIVASRFNHALVDRLVEGAIDAIVRHGGREEDITLVRVPGSWEIPVAAGELARKEDIDAVIAIGVLIRGATPHFDYIASEVSKGLADLSLELRKPITFGVITADTLEQAIERAGTKHGNKGWEAALSAIEMANLFKSLR

SEQ ID NO: 3865 - protein, 1371 aa, Artificial Sequence
  SARS-CoV-2/USA/WA-UW292/2020__EPI_ISL_418077 spike protein (1-1211)(K986P_V987P_P1069F) LumSynth construct
MFVFLVLLPLVSSQCVNLTTRTQLPPAYTNSFTRGVYYPDKVFRSSVLHSTQDLFLPFFSNVTWFHAIHVSGTNGTKRFDNPVLPFNDGVYFASTEKSNIIRGWIFGTTLDSKTQSLLIVNNATNVVIKVCEFQFCNDPFLGVYYHKNNKSWMESEFRVYSSANNCTFEYVSQPFLMDLEGKQGNFKNLREFVFKNIDGYFKIYSKHTPINLVRDLPQGFSALEPLVDLPIGINITRFQTLLALHRSYLTPGDSSSGWTAGAAAYYVGYLQPRTFLLKYNENGTITDAVDCALDPLSETKCTLKSFTVEKGIYQTSNFRVQPTESIVRFPNITNLCPFGEVFNATRFASVYAWNRKRISNCVADYSVLYNSASFSTFKCYGVSPTKLNDLCFTNVYADSFVIRGDEVRQIAPGQTGKIADYNYKLPDDFTGCVIAWNSNNLDSKVGGNYNYLYRLFRKSNLKPFERDISTEIYQASSTPCNGVEGFNCYFPLQSYGFQPTNGVGYQPYRVVVLSFELLHAPATVCGPKKSTNLVKNKCVNFNFNGLTGTGVLTESNKKFLPFQQFGRDIADTTDAVRDPQTLEILDITPCSFGGVSVITPGTNTSNQVAVLYQDVNCTEVPVAIHADQLTPTWRVYSTGSNVFQTRAGCLIGAEHVNNSYECDIPIGAGICASYQTQTNSPRRARSVASQSIIAYTMSLGAENSVAYSNNSIAIPTNFTISVTTEILPVSMTKTSVDCTMYICGDSTECSNLLLQYGSFCTQLNRALTGIAVEQDKNTQEVFAQVKQIYKTPPIKDFGGFNFSQILPDPSKPSKRSFIEDLLFNKVTLADAGFIKQYGDCLGDIAARDLICAQKFNGLTVLPPLLTDEMIAQYTSALLAGTITSGWTFGAGAALQIPFAMQMAYRFNGIGVTQNVLYENQKLIANQFNSAIGKIQDSLSSTASALGKLQDVVNQNAQALNTLVKQLSSNFGAISSVLNDILSRLDPPEAEVQIDRLITGRLQSLQTYVTQQLIRAAEIRASANLAATKMSECVLGQSKRVDFCGKGYHLMSFPQSAPHGVVFLHVTYVFAQEKNFTTAPAICHDGKAHFPREGVFVSNGTHWFVTQRNFYEPQIITTDNTFVSGNCDVVIGIVNNTVYDPLQPELDSFKEELDKYFKNHTSPDVDLGDISGINASVVNIQKEIDRLNEVAKNLNESLIDLQELGKYEQYIKGGGSGGGQIYEGKLTAEGLRFGIVASRFNHALVDRLVEGAIDAIVRHGGREEDITLVRVPGSWEIPVAAGELARKEDIDAVIAIGVLIRGATPHFDYIASEVSKGLADLSLELRKPITFGVITADTLEQAIERAGTKHGNKGWEAALSAIEMANLFKSLR

SEQ ID NO: 3866 - protein, 1371 aa, Artificial Sequence
  SARS-CoV-2/Iceland/192/2020__EPI_ISL_417819 spike protein (1-1211)(K986P_V987P_P1069F) LumSynth construct
MFVFFVLLPLVSSQCVNLTTRTQLPPAYTNSFTRGVYYPDKVFRSSVLHSTQDLFLPFFSNVTWFHAIHVSGTNGTKRFDNPVLPFNDGVYFASTEKSNIIRGWIFGTTLDSKTQSLLIVNNATNVVIKVCEFQFCNDPFLGVYYHKNNKSWMESEFRVYSSANNCTFEYVSQPFLMDLEGKQGNFKNLREFVFKNIDGYFKIYSKHTPINLVRDLPQGFSALEPLVDLPIGINITRFQTLLALHRSYLTPGDSSSGWTAGAAAYYVGYLQPRTFLLKYNENGTITDAVDCALDPLSETKCTLKSFTVEKGIYQTSNFRVQPTESIVRFPNITNLCPFGEVFNATRFASVYAWNRKRISNCVADYSVLYNSASFSTFKCYGVSPTKLNDLCFTNVYADSFVIRGDEVRQIAPGQTGKIADYNYKLPDDFTGCVIAWNSNNLDSKVGGNYNYLYRLFRKSNLKPFERDISTEIYQAGSTPCNGVEGFNCYFPLQSYGFQPTNGVGYQPYRVVVLSFELLHAPATVCGPKKSTNLVKNKCVNFNFNGLTGTGVLTESNKKFLPFQQFGRDIADTTDAVRDPQTLEILDITPCSFGGVSVITPGTNTSNQVAVLYQGVNCTEVPVAIHADQLTPTWRVYSTGSNVFQTRAGCLIGAEHVNNSYECDIPIGAGICASYQTQTNSPRRARSVASQSIIAYTMSLGAENSVAYSNNSIAIPTNFTISVTTEILPVSMTKTSVDCTMYICGDSTECSNLLLQYGSFCTQLNRALTGIAVEQDKNTQEVFAQVKQIYKTPPIKDFGGFNFSQILPDPSKPSKRSFIEDLLFNKVTLADAGFIKQYGDCLGDIAARDLICAQKFNGLTVLPPLLTDEMIAQYTSALLAGTITSGWTFGAGAALQIPFAMQMAYRFNGIGVTQNVLYENQKLIANQFNSAIGKIQDSLSSTASALGKLQDVVNQNAQALNTLVKQLSSNFGAISSVLNDILSRLDPPEAEVQIDRLITGRLQSLQTYVTQQLIRAAEIRASANLAATKMSECVLGQSKRVDFCGKGYHLMSFPQSAPHGVVFLHVTYVFAQEKNFTTAPAICHDGKAHFPREGVFVSNGTHWFVTQRNFYEPQIITTDNTFVSGNCDVVIGIVNNTVYDPLQPELDSFKEELDKYFKNHTSPDVDLGDISGINASVVNIQKEIDRLNEVAKNLNESLIDLQELGKYEQYIKGGGSGGGQIYEGKLTAEGLRFGIVASRFNHALVDRLVEGAIDAIVRHGGREEDITLVRVPGSWEIPVAAGELARKEDIDAVIAIGVLIRGATPHFDYIASEVSKGLADLSLELRKPITFGVITADTLEQAIERAGTKHGNKGWEAALSAIEMANLFKSLR

SEQ ID NO: 3867 - protein, 1371 aa, Artificial Sequence
  SARS-CoV-2/Belgium/ULG-6939/2020__EPI_ISL_417020 spike protein (1-1211)(K986P_V987P_P1069F) LumSynth construct
MFVFLVLLPLVSSQCVNLTTRTQLPPAYTNSFTRGVYYPDKVFRSSVLHSTQDLFLPFFSNVTWFHAIHVSGTNGTKRFDNPVLPFNDGVYFASTEKSNIIRGWIFGTTLDSKTQSLLIVNNATNVVIKVCEFQFCNDPFLGVYYHKNNKSWMESEFRVYSSANNCTFEYVSQPFLMDLEGKQGNFKNLREFVFKNIDGYFKIYSKHTPINLVRDLPQGFSALEPLVDLPIGINITRFQTLLALHRSYLTPGDSSSGWTAGAAAYYVGYLQPRTFLLKYNENGTITDAVDCALDPLSETKCTLKSFTVEKGIYQTSNFRVQPTESIVRFPNITNLCPFGEVFNATRFASVYAWNRKRISNCVADYSVLYNSASFSTFKCYGVSPTKLNDLCFTNVYADSFVIRGDEVRQIAPGQTGKIADYNYKLPDDFTGCVIAWNSNNLDSKVGGNYNYLYRLFRKSNLKPFERDISTEIYQAGSTPCNGVEGFNCYFPLQSYGFQPTNGVGYQPYRVVVLSFELLHAPATVCGPKKSTNLVKNKCVNFNFNGLTGTGVLTESNKKFLPFQQFGRDIADTTDAVRDPQTLEILDITPCSFGGVSVITPGTNTSNQVAVLYQGVNCTEVPVAIHADQLTPTWRVYSTGSNVFQTRAGCLIGAEHVNNSYECDIPIGAGICASYQTQTNSPRRARSVASQSIIAYTMSLGAENSVVYSNNSIAIPTNFTISVTTEILPVSMTKTSVDCTMYICGDSTECSNLLLQYGSFCTQLNRALTGIAVEQDKNTQEVFAQVKQIYKTPPIKDFGGFNFSQILPDPSKPSKRSFIEDLLFNKVTLADAGFIKQYGDCLGDIAARDLICAQKFNGLTVLPPLLTDEMIAQYTSALLAGTITSGWTFGAGAALQIPFAMQMAYRFNGIGVTQNVLYENQKLIANQFNSAIGKIQDSLSSTASALGKLQDVVNQNAQALNTLVKQLSSNFGAISSVLNDILSRLDPPEAEVQIDRLITGRLQSLQTYVTQQLIRAAEIRASANLAATKMSECVLGQSKRVDFCGKGYHLMSFPQSAPHGVVFLHVTYVFAQEKNFTTAPAICHDGKAHFPREGVFVSNGTHWFVTQRNFYEPQIITTDNTFVSGNCDVVIGIVNNTVYDPLQPELDSFKEELDKYFKNHTSPDVDLGDISGINASVVNIQKEIDRLNEVAKNLNESLIDLQELGKYEQYIKGGGSGGGQIYEGKLTAEGLRFGIVASRFNHALVDRLVEGAIDAIVRHGGREEDITLVRVPGSWEIPVAAGELARKEDIDAVIAIGVLIRGATPHFDYIASEVSKGLADLSLELRKPITFGVITADTLEQAIERAGTKHGNKGWEAALSAIEMANLFKSLR

SEQ ID NO: 3868 - protein, 1371 aa, Artificial Sequence
  SARS-CoV-2/France/HF2496/2020__EPI_ISL_418231 spike protein (1-1211)(K986P_V987P_P1069F) LumSynth construct
MFVFLVLLPLVSSQCVNLTTRTQLPPAYTNSFTRGVYYPDKVFRSSVLHSTQDLFLPFFSNVTWFHAIHVSGTNGTKRFDNPVLPFNDGVYFASTEKSNIIRGWIFGTTLDSKTQSLLIVNNATNVVIKVCEFQFCNDPFLGVYYHKNNKSWMESEFRVYSSANNCTFEYVSQPFLMDLEGKQGNFKNLREFVFKNIDGYFKIYSKHTPINLVRDLPQGFSALEPLVDLPIGINITRFQTLLALHRSYLTPGDSSSGWTAGAAAYYVGYLQPRTFLLKYNENGTITDAVDCALDPLSETKCTLKSFTVEKGIYQTSNFRVQPTESIVRFPNITNLCPFGEVFNATRFASVYAWNRKRISNCVADYSVLYNSASFSTFKCYGVSPTKLNDLCFTNVYADSFVIRGDEVRQIAPGQTGKIADYNYKLPDDFTGCVIAWNSNNLDSKVGGNYNYLYRLFRKSNLKPFERDISTEIYQAGSTPCNGVEGFNCYFPLQSYGFQPTNGVGYQPYRVVVLSFELLHAPATVCGPKKSTNLVKNKCVNFNFNGLTGTGVLTESNKKFLPFQQFGRDIADTTDAVRDPQTLEILDITPCSFGGVSVITPGTNTSNQVAVLYQGVNCTEVPVAIHADQLTPTWRVYSTGSNVFQTRAGCLIGAEHVNNSYECDIPIGAGICASYQTQTNSPRRARSVASQSIIAYTMSLGAENSVAYSNNSIAIPTNFTISVTTEILPVSMTKTSVDCTMYICGDSTECSNLLLQYGSFCTQLNRALTGIAVEQDKNTQEVFAQVKQIYKTPPIKDFGGFNFSQILPDPSKPSKRSFIEDLLFNKVTLADAGFIKQYGDCLGDIVARDLICAQKFNGLTVLPPLLTDEMIAQYTSALLAGTITSGWTFGAGAALQIPFAMQMAYRFNGIGVTQNVLYENQKLIANQFNSAIGKIQDSLSSTASALGKLQDVVNQNAQALNTLVKQLSSNFGAISSVLNDILSRLDPPEAEVQIDRLITGRLQSLQTYVTQQLIRAAEIRASANLAATKMSECVLGQSKRVDFCGKGYHLMSFPQSAPHGVVFLHVTYVFAQEKNFTTAPAICHDGKAHFPREGVFVSNGTHWFVTQRNFYEPQIITTDNTFVSGNCDVVIGIVNNTVYDPLQPELDSFKEELDKYFKNHTSPDVDLGDISGINASVVNIQKEIDRLNEVAKNLNESLIDLQELGKYEQYIKGGGSGGGQIYEGKLTAEGLRFGIVASRFNHALVDRLVEGAIDAIVRHGGREEDITLVRVPGSWEIPVAAGELARKEDIDAVIAIGVLIRGATPHFDYIASEVSKGLADLSLELRKPITFGVITADTLEQAIERAGTKHGNKGWEAALSAIEMANLFKSLR

SEQ ID NO: 3869 - protein, 1371 aa, Artificial Sequence
  SARS-CoV-2/USA/WA-UW291/2020__EPI_ISL_418076 spike protein (1-1211)(K986P_V987P_P1069F) LumSynth construct
MFVFLVLLPLVSSQCVNLTTRTQLPPAYTNSFTRGVYYPDKVFRSSVLHSTQDLFLPFFSNVTWFHAIHVSGTNGTKRFDNPVLPFNDGVYFASTEKSNIIRGWIFGTTLDSKTQSLLIVNNATNVVIKVCEFQFCNDPFLGVYYHKNNKSWMESEFRVYSSANNCTFEYVSQPFLMDLEGKQGNFKNLREFVFKNIDGYFKIYSKHTPINLVRDLPQGFSALEPLVDLPIGINITRFQTLLALHRSYLTPGDSSSGWTAGAAAYYVGYLQPRTFLLKYNENGTITDAVDCALDPLSETKCTLKSFTVEKGIYQTSNFRVQPTESIVRFPNITNLCPFGEVFNATRFASVYAWNRKRISNCVADYSVLYNSASFSTFKCYGVSPTKLNDLCFTNVYADSFVIRGDEVRQIAPGQTGKIADYNYKLPDDFTGCVIAWNSNNLDSKVGGNYNYLYRLFRKSNLKPFERDISTEIYQAGSTPCNGVEGFNCYFPLQSYGFQPTNGVGYQPYRVVVLSFELLHAPATVCGPKKSTNLVKNKCVNFNFNGLTGTGVLTESNKKFLPFQQFGRDIADTTDAVRDPQTLEILDITPCSFGGVSVITPGTNTSNQVAVLYQGVNCTEVPVAIHADQLTPTWRVYSTGSNVFQTRAGCLIGAEHVNNSYECDIPIGAGICASYQTQTNSPRRARSVASQSIIAYTMSLGAENSVAYSNNSIAIPTNFTISVTTEILPVSMTKTSVDCTMYICGDSTECSNLLLQYGSFCTQLNRALTGIAVEQDKNTQEVFAQVKQIYKTPPIKDFGGFNFSQILPDPSKPSKRSFIEDLLFNKVTLADAGFIKQYGDCLGDIAARDLICAQKFNGLTVLPPLLTDEMIAQYTSALLAGTITSGWTFGAGAALQIPFAMQMAYRFNGIGVTQNVLYENQKLIANQFNSAIGKIQYSLSSTASALGKLQDVVNQNAQALNTLVKQLSSNFGAISSVLNDILSRLDPPEAEVQIDRLITGRLQSLQTYVTQQLIRAAEIRASANLAATKMSECVLGQSKRVDFCGKGYHLMSFPQSAPHGVVFLHVTYVFAQEKNFTTAPAICHDGKAHFPREGVFVSNGTHWFVTQRNFYEPQIITTDNTFVSGNCDVVIGIVNNTVYDPLQPELDSFKEELDKYFKNHTSPDVDLGDISGINASVVNIQKEIDRLNEVAKNLNESLIDLQELGKYEQYIKGGGSGGGQIYEGKLTAEGLRFGIVASRFNHALVDRLVEGAIDAIVRHGGREEDITLVRVPGSWEIPVAAGELARKEDIDAVIAIGVLIRGATPHFDYIASEVSKGLADLSLELRKPITFGVITADTLEQAIERAGTKHGNKGWEAALSAIEMANLFKSLR

SEQ ID NO: 3870 - protein, 1371 aa, Artificial Sequence; identical to SEQ ID NO: 3833
  SARS-CoV-2/Portugal/PT0034/2020__EPI_ISL_418019 spike protein (1-1211)(K986P_V987P_P1069F) LumSynth construct

SEQ ID NO: 3871 - protein, 1371 aa, Artificial Sequence
  SARS-CoV-2/Iceland/202/2020__EPI_ISL_417750 spike protein (1-1211)(K986P_V987P_P1069F) LumSynth construct
MFVFLVLLPLVSSQCVNLTTRTQLPPAYTNSFTRGVYYPDKVFRSSVLHSTQDLFLPFFSNVTWFHAIHVSGTNGTKRFDNPVLPFNDGVYFASTEKSNIIRGWIFGTTLDSKTQSLLIVNNATNVVIKVCEFQFCNDPFLGVYYHKNNKSWMESEFRVYSSANNCTFEYVSQPFLMDLEGKQGNFKNLREFVFKNIDGYFKIYSKHTPINLVRDLPQGFSALEPLVDLPIGINITRFQTLLALHRSYLTPGDSSSGWTAGAAAYYVGYLQPRTFLLKYNENGTITDAVDCALDPLSETKCTLKSFTVEKGIYQTSNFRVQPTESIVRFPNITNLCPFGEVFNATRFASVYAWNRKRISNCVADYSVLYNSASFSTFKCYGVSPTKLNDLCFTNVYADSFVIRGDEVRQIAPGQTGKIADYNYKLPDDFTGCVIAWNSNNLDSKVGGNYNYLYRLFRKSNLKPFERDISTEIYQAGSTPCNGVEGFNCYFPLQSYGFQPTNGVGYQPYRVVVLSFELLHAPATVCGPKKSTNLVKNKCVNFNFNGLTGTGVLTESNKKFLPFQQFGRDIADTTDAVRDPQTLEILDITPCSFGGVSVITPGTNTSNQVAVLYQDVNCTEVPVAIHADQLTPTWRVYSTGSNVFQTRAGCLIGAEHVNNSYECDIPIGAGICASYQTQTNSPRRARSVASQSIIAYTMSLGAENSVAYSNNSIAIPTNFTISVTTEILPVSMTKTSVDCTMYICGDSTECSNLLLQYGSFCTQLNRALTGIAVEQDKNTQEVFAQVKQIYKTPPIKDFGGFNFSQILPDPSKPSKRSFIEDLLFNKVTLADAGFIKQYGDCLGDIAARDLICAQKFNGLTVLPPLLTDEMIAQYTSALLAGTITSGWTFGAGAALQIPFAMQMAYRFNGIGVTQNVLYENQKLIANQFNSAIGKIQDSLSSTASALGKLQDVVNQNAQALNTLVKQLSSNFGAISSVLNDILSRLDPPEAEVQIDRLITGRLQSLQTYVTQQLIRAAEIRASANLAATKMSECVLGQSKRVDFCGKGYHLMSFPQSAPHGVVFLHVTYVFAQEKNFTTAPAICHDGKAHFPREGVFVSNGTHWFVTQRNFYEPQIITTDNTFVSGNCDVVIGIVNNTVYDPLQPELDSFKEELDKYFKNHTSPDVDLGDIPGINASVVNIQKEIDRLNEVAKNLNESLIDLQELGKYEQYIKGGGSGGGQIYEGKLTAEGLRFGIVASRFNHALVDRLVEGAIDAIVRHGGREEDITLVRVPGSWEIPVAAGELARKEDIDAVIAIGVLIRGATPHFDYIASEVSKGLADLSLELRKPITFGVITADTLEQAIERAGTKHGNKGWEAALSAIEMANLFKSLR

SEQ ID NO: 3872 - protein, 1371 aa, Artificial Sequence
  SARS-CoV-2/USA/WA-UW261/2020__EPI_ISL_418046 spike protein (1-1211)(K986P_V987P_P1069F) LumSynth construct
MFVFLVLLPLVSSQCVNLTTRTQLPPAYTNSFTRGVYYPDKVFRSSVLHSTQDLFLPFFSNVTWFHAIHVSGTNGTKRFDNPVLPFNDGVYFASTEKSNIIRGWIFGTTLDSKTQSLLIVNNATNVVIKVCEFQFCNDPFLGVYYHKNNKSWMESEFRVYSSANNCTFEYVSQPFLMDLEGKQGNFKNLREFVFKNIDGYFKIYSKHTPINLVRDLPQGFSALEPLVDLPIGINITRFQTLLALHRSYLTPGDSSSGWTAGAAAYYVGYLQPRTFLLKYNENGTITDAVDCALDPLSETKCTLKSFTVEKGIYQTSNFRVQPTESIVRFPNITNLCPFGEVFNATRFTSVYAWNRKRISNCVADYSVLYNSASFSTFKCYGVSPTKLNDLCFTNVYADSFVIRGDEVRQIAPGQTGKIADYNYKLPDDFTGCVIAWNSNNLDSKVGGNYNYLYRLFRKSNLKPFERDISTEIYQAGSTPCNGVEGFNCYFPLQSYGFQPTNGVGYQPYRVVVLSFELLHAPATVCGPKKSTNLVKNKCVNFNFNGLTGTGVLTESNKKFLPFQQFGRDIADTTDAVRDPQTLEILDITPCSFGGVSVITPGTNTSNQVAVLYQDVNCTEVPVAIHADQLTPTWRVYSTGSNVFQTRAGCLIGAEHVNNSYECDIPIGAGICASYQTQTNSPRRARSVASQSIIAYTMSLGAENSVAYSNNSIAIPTNFTISVTTEILPVSMTKTSVDCTMYICGDSTECSNLLLQYGSFCTQLNRALTGIAVEQDKNTQEVFAQVKQIYKTPPIKDFGGFNFSQILPDPSKPSKRSFIEDLLFNKVTLADAGFIKQYGDCLGDIAARDLICAQKFNGLTVLPPLLTDEMIAQYTSALLAGTITSGWTFGAGAALQIPFAMQMAYRFNGIGVTQNVLYENQKLIANQFNSAIGKIQDSLSSTASALGKLQDVVNQNAQALNTLVKQLSSNFGAISSVLNDILSRLDPPEAEVQIDRLITGRLQSLQTYVTQQLIRAAEIRASANLAATKMSECVLGQSKRVDFCGKGYHLMSFPQSAPHGVVFLHVTYVFAQEKNFTTAPAICHDGKAHFPREGVFVSNGTHWFVTQRNFYEPQIITTDNTFVSGNCDVVIGIVNNTVYDPLQPELDSFKEELDKYFKNHTSPDVDLGDISGINASVVNIQKEIDRLNEVAKNLNESLIDLQELGKYEQYIKGGGSGGGQIYEGKLTAEGLRFGIVASRFNHALVDRLVEGAIDAIVRHGGREEDITLVRVPGSWEIPVAAGELARKEDIDAVIAIGVLIRGATPHFDYIASEVSKGLADLSLELRKPITFGVITADTLEQAIERAGTKHGNKGWEAALSAIEMANLFKSLR

SEQ ID NO: 3873 - protein, 1371 aa, Artificial Sequence
  SARS-CoV-2/Portugal/PT0035/2020__EPI_ISL_418020 spike protein (1-1211)(K986P_V987P_P1069F) LumSynth construct
MFVFLVLLPLVSSQCVNLTTRTQLPPAYTNSFTRGVYYPDKVFRSSVLHSTQDLFLPFFSNVTWFHAIHVSGTNGTKRFDNPVLPFNDGVYFASTEKSNIIRGWIFGTTLDSKTQSLLIVNNATNVVIKVCEFQFCNDPFLGVYYHKNNKSWMESEFRVYSSANNCTFEYVSQPFLMDLEGKQGNFKNLREFVFKNIDGYFKIYSKHTPINLVRDLPQGFSALEPLVDLPIGINITRFQTLLALHRSYLTPGDSSSGWTAGAAAYYVGYLQPRTFLLKYNENGTITDAVDCALDPLSETKCTLKSFTVEKGIYQTSNFRVQPTESIVRFPNITNLCPFGEVFNATRFASVYAWNRKRISNCVADYSVLYNSASFSTFKCYGVSPTKLNDLCFTNVYADSFVIRGDEVRQIAPGQTGKIADYNYKLPDDFTGCVIAWNSNNLDSKVGGNYNYLYRLFRKSNLKPFERDISTEIYQAGSTPCNGVEGFNCYFPLQSYGFQPTNGVGYQPYRVVVLSFELLHAPATVCGPKKSTNLVKNKCVNFNFNGLTGTGVLTESNKKFLPFQQFGRDIADTTDAVRDPQTLEILDITPCSFGGVSVITPGTNTSNQVAVLYQDVNCTEVPVAIHADQLTPTWRVYSTGSNVFQTRAGCLIGAEHVNNSYECDIPIGAGICASYQTQTNSPRRARSVASQSIIAYTMSLGAENSVAYSNNSIAIPTNFTISVTTEILPVSMTKTSVDCTMYICGDSTECSNLLLQYGSFCTQLNRALTGIAVEQDKNTQEVFAQVKQIYKTPPIKDFGGFNFSQILPDPSKPSKRSFIEDLLFNKVTLADAGFIKQYGDCLGDISARDLICAQKFNGLTVLPPLLTDEMIAQYTSALLAGTITSGWTFGAGAALQIPFAMQMAYRFNGIGVTQNVLYENQKLIANQFNSAIGKIQDSLSSTASALGKLQDVVNQNAQALNTLVKQLSSNFGAISSVLNDILSRLDPPEAEVQIDRLITGRLQSLQTYVTQQLIRAAEIRASANLAATKMSECVLGQSKRVDFCGKGYHLMSFPQSAPHGVVFLHVTYVFAQEKNFTTAPAICHDGKAHFPREGVFVSNGTHWFVTQRNFYEPQIITTDNTFVSGNCDVVIGIVNNTVYDPLQPELDSFKEELDKYFKNHTSPDVDLGDISGINASVVNIQKEIDRLNEVAKNLNESLIDLQELGKYEQYIKGGGSGGGQIYEGKLTAEGLRFGIVASRFNHALVDRLVEGAIDAIVRHGGREEDITLVRVPGSWEIPVAAGELARKEDIDAVIAIGVLIRGATPHFDYIASEVSKGLADLSLELRKPITFGVITADTLEQAIERAGTKHGNKGWEAALSAIEMANLFKSLR

SEQ ID NO: 3874 - protein, 1371 aa, Artificial Sequence
  SARS-CoV-2/USA/NY-NYUMC7/2020__EPI_ISL_418192 spike protein (1-1211)(K986P_V987P_P1069F) LumSynth construct
MFVFLVLLPLVSSQCVNLTTRTQLPPAYTNSFTRGVYYPDKVFRSSVLHSTQDLFLPFFSNVTWFHAIHVSGTNGTKRFDNPVLPFNDGVYFASTEKSNIIRGWIFGTTLDSKTQSLLIVNNATNVVIKVCEFQFCNDPFLGVYHHKNNKSWMESEFRVYSSANNCTFEYVSQPFLMDLEGKQGNFKNLREFVFKNIDGYFKIYSKHTPINLVRDLPQGFSALEPLVDLPIGINITRFQTLLALHRSYLTPGDSSSGWTAGAAAYYVGYLQPRTFLLKYNENGTITDAVDCALDPLSETKCTLKSFTVEKGIYQTSNFRVQPTESIVRFPNITNLCPFGEVFNATRFASVYAWNRKRISNCVADYSVLYNSASFSTFKCYGVSPTKLNDLCFTNVYADSFVIRGDEVRQIAPGQTGKIADYNYKLPDDFTGCVIAWNSNNLDSKVGGNYNYLYRLFRKSNLKPFERDISTEIYQAGSTPCNGVEGFNCYFPLQSYGFQPTNGVGYQPYRVVVLSFELLHAPATVCGPKKSTNLVKNKCVNFNFNGLTGTGVLTESNKKFLPFQQFGRDIADTTDAVRDPQTLEILDITPCSFGGVSVITPGTNTSNQVAVLYQGVNCTEVPVAIHADQLTPTWRVYSTGSNVFQTRAGCLIGAEHVNNSYECDIPIGAGICASYQTQTNSPRRARSVASQSIIAYTMSLGAENSVAYSNNSIAIPTNFTISVTTEILPVSMTKTSVDCTMYICGDSTECSNLLLQYGSFCTQLNRALTGIAVEQDKNTQEVFAQVKQIYKTPPIKDFGGFNFSQILPDPSKPSKRSFIEDLLFNKVTLADAGFIKQYGDCLGDIAARDLICAQKFNGLTVLPPLLTDEMIAQYTSALLAGTITSGWTFGAGAALQIPFAMQMAYRFNGIGVTQNVLYENQKLIANQFNSAIGKIQDSLSSTASALGKLQDVVNQNAQALNTLVKQLSSNFGAISSVLNDILSRLDPPEAEVQIDRLITGRLQSLQTYVTQQLIRAAEIRASANLAATKMSECVLGQSKRVDFCGKGYHLMSFPQSAPHGVVFLHVTYVFAQEKNFTTAPAICHDGKAHFPREGVFVSNGTHWFVTQRNFYEPQIITTDNTFVSGNCDVVIGIVNNTVYDPLQPELDSFKEELDKYFKNHTSPDVDLGDISGINASVVNIQKEIDRLNEVAKNLNESLIDLQELGKYEQYIKGGGSGGGQIYEGKLTAEGLRFGIVASRFNHALVDRLVEGAIDAIVRHGGREEDITLVRVPGSWEIPVAAGELARKEDIDAVIAIGVLIRGATPHFDYIASEVSKGLADLSLELRKPITFGVITADTLEQAIERAGTKHGNKGWEAALSAIEMANLFKSLR

SEQ ID NO: 3875 - protein, 1371 aa, Artificial Sequence
  SARS-CoV-2/Iceland/189/2020__EPI_ISL_417709 spike protein (1-1211)(K986P_V987P_P1069F) LumSynth construct
MFVFLVLLPLVSSQCVNLTTRTQLPPAYTNSFTRGVYYPDKVFRSSVLHSTQDLFLPFFSNVTWFHAIHVSGTNGTKRFDNPVLPFNDGVYFASTEKSNIIRGWIFGTTLDSKTQSLLIVNNATNVVIKVCEFQFCNDPFLGVYYHKNNKSWMESEFRVYSSANNCTFEYVSQPFLMDLEGKQGNFKNLREFVFKNIDGYFKIYSKHTPINLVRDLPQGFSALEPLVDLPIGINITRFQTLLALHRSYLTPGDSSSGWTAGAAAYYVGYLQPRTFLLKYNENGTITDAVDCALDPLSETKCTLKSFTVEKGIYQTSNFRVQPTESIVRFPNITNLCPFGEVFNATRFASVYAWNRKRISNCVADYSVLYNSASFSTFKCYGVSPTKLNDLCFTNVYADSFVIRGDEVRQIAPGQTGKIADYNYKLPDDFTGCVIAWNSNNLDSKVGGNYNYLYRLFRKSNLKPFERDISTEIYQAGSTPCNGVEGFNCYFPLQSYGFQPTNGVGYQPYRVVVLSFELLHAPATVCGPKKSTNLVKNKCVNFNFNGLTGTGVLTESNKKFLPFQQFGRDIADTTDAVRDPQTLEILDITPCSFGGVSVITPGTNTSNQVAVLYQGVNCTEVPVAIHADQLTPTWRVYSTGSNVFQTRAGCLIGAEHVNNSYECDIPIGAGICASYQTQTNSPRRARSVASQSIIAYTMSLGAENSVAYSNNSIAIPTNFTISVTTEILPVSMTKTSVDCTMYICGDSTECSNLLLQYGSFCTQLNRALTGIAVEQDKNTQEVFAQVKQIYKTPPIKDFGGFNFSQILPDPSKPSKRSFIEDLLFNKVTLADAGFTKQYGDCLGDIAARDLICAQKFNGLTVLPPLLTDEMIAQYTSALLAGTITSGWTFGAGAALQIPFAMQMAYRFNGIGVTQNVLYENQKLIANQFNSAIGKIQDSLSSTASALGKLQDVVNQNAQALNTLVKQLSSNFGAISSVLNDILSRLDPPEAEVQIDRLITGRLQSLQTYVTQQLIRAAEIRASANLAATKMSECVLGQSKRVDFCGKGYHLMSFPQSAPHGVVFLHVTYVFAQEKNFTTAPAICHDGKAHFPREGVFVSNGTHWFVTQRNFYEPQIITTDNTFVSGNCDVVIGIVNNTVYDPLQPELDSFKEELDKYFKNHTSPDVDLGDISGINASVVNIQKEIDRLNEVAKNLNESLIDLQELGKYEQYIKGGGSGGGQIYEGKLTAEGLRFGIVASRFNHALVDRLVEGAIDAIVRHGGREEDITLVRVPGSWEIPVAAGELARKEDIDAVIAIGVLIRGATPHFDYIASEVSKGLADLSLELRKPITFGVITADTLEQAIERAGTKHGNKGWEAALSAIEMANLFKSLR

SEQ ID NO: 3876 - protein, 1371 aa, Artificial Sequence
  SARS-CoV-2/Australia/NSW56/2020__EPI_ISL_417408 spike protein (1-1211)(K986P_V987P_P1069F) LumSynth construct
MFVFLVLLPLVSSQCVNLTTRTQLPPAYTNSFTRGVYYPDKVFRSSVLHSTQDLFLPFFSNVTWFHAIHVSGTNGTKRFDNPVLPFNDGVYFASTEKSNIIRGWIFGTTLDSKTQSLLIVNNATNVVIKVCEFQFCNDPFLGVYYHKNNKSWMESEFRVYSSANNCTFEYVSQPFLMDLEGKQGNFKNLREFVFKNIDGYFKIYSKHTPINLVRDLPQGFSALEPLVDLPIGINITRFQTLLALHRSYLTPGDSSSGWTAGAAAYYVGYLQPRTFLLKYNENGTITDAVDCALDPLSETKCTLKSFTVEKGIYQTSNFRVQPTESIVRFPNITNLCPFGEVFNATRFASVYAWNRKRISNCVADYSVLYNSASFSTFKCYGVSPTKLNDLCFTNVYADSFVIRGDEVRQIAPGQTGKIADYNYKLPDDFTGCVIAWNSNNLDSKVGGNYNYLYRLFRKSNLKPFERDISTEIYQAGSTPCNGVEGFNCYFPLQSYGFQPTNGVGYQPYRVVVLSFELLHAPATVCGPKKSTNLVKNKCVNFNFNGLTGTGVLTESNKKFLPFQQFGRDIADTTDAVRDPQTLEILDITPCSFGGVSVITPGTNTSNQVAVLYQDVNCTEVPVAIHADQLTPTWRVYSTGSNVFQTRAGCLIGAEHVNNSYECDIPIGAGICASYQTQTNSPRRARSVASQSIIAYTMSLGAENSVAYSNNSIAIPTNFTISVTTEILPVSMTKTSVDCTMYICGDSTECSNLLLQYGSFCTQLNRALTGIAVEQDKNTQEVFAQVKQIYKTPPIKDFGGFNFSQILPDSSKPSKRSFIEDLLFNKVTLADAGFIKQYGDCLGDIAARDLICAQKFNGLTVLPPLLTDEMIAQYTSALLAGTITSGWTFGAGAALQIPFAMQMAYRFNGIGVTQNVLYENQKLIANQFNSAIGKIQDSLSSTASALGKLQDVVNQNAQALNTLVKQLSSNFGAISSVLNDILSRLDPPEAEVQIDRLITGRLQSLQTYVTQQLIRAAEIRASANLAATKMSECVLGQSKRVDFCGKGYHLMSFPQSAPHGVVFLHVTYVFAQEKNFTTAPAICHDGKAHFPREGVFVSNGTHWFVTQRNFYEPQIITTDNTFVSGNCDVVIGIVNNTVYDPLQPELDSFKEELDKYFKNHTSPDVDLGDISGINASVVNIQKEIDRLNEVAKNLNESLIDLQELGKYEQYIKGGGSGGGQIYEGKLTAEGLRFGIVASRFNHALVDRLVEGAIDAIVRHGGREEDITLVRVPGSWEIPVAAGELARKEDIDAVIAIGVLIRGATPHFDYIASEVSKGLADLSLELRKPITFGVITADTLEQAIERAGTKHGNKGWEAALSAIEMANLFKSLR

SEQ ID NO: 3877 - protein, 1371 aa, Artificial Sequence
  SARS-CoV-2/Iceland/280/2020__EPI_ISL_417608 spike protein (1-1211)(K986P_V987P_P1069F) LumSynth construct
MFVFLVLLPLVSSQCVNLTTRTQLPPAYTNSFTRGVYYPDKVFRSSVLHSTQDLFLPFFSNVTWFHAIHVSGTNGTKRFDNPVLPFNDGVYFASTEKSNIIRGWIFGTTLDSKTQSLLIVNNATNVVIKVCEFQFCNDPFLGVYYHKNNKSWMESEFRVYSSANNCTFEYVSQPFLMDLEGKQGNFKNLREFVFKNIDGYFKIYSKHTPINLVRDLPQGFSALEPLVDLPIGINITRFQTLLALHRSYLTPGDSSSGWTAGAAAYYVGYLQPRTFLLKYNENGTITDAVDCALDPLSETKCTLKSFTVEKGIYQTSNFRVQPTESIVRFPNITNLCPFGEVFNATRFASVYAWNRKRISNCVADYSVLYNSASFSTFKCYGVSPTKLNDLCFTNVYADSFVIRGDEVRQIAPGQTGKIADYNYKLPDDFTGCVIAWNSNNLDSKVGGNYNYLYRLFRKSNLKPFERDISTEIYQAGSTPCNGVEGFNCYFPLQSYGFQPTNGVGYQPYRVVVLSFELLHAPATVCGPKKSTNLVKNKCVNFNFNGLTGTGVLTESNKKFLPFQQFGRDIADTTDAVRDPQTLEILDITPCSFGGVSVITPGTNTSNQVAVLYQGVNCTEVPVAIHADQLTPTWRVYSTGSNVFQTRAGCLIGAEHVNNSYECDIPIGAGICASYHTQTNSPRRARSVASQSIIAYTMSLGAENSVAYSNNSIAIPTNFTISVTTEILPVSMTKTSVDCTMYICGDSTECSNLLLQYGSFCTQLNRALTGIAVEQDKNTQEVFAQVKQIYKTPPIKDFGGFNFSQILPDPSKPSKRSFIEDLLFNKVTLADAGFIKQYGDCLGDIAARDLICAQKFNGLTVLPPLLTDEMIAQYTSALLAGTITSGWTFGAGAALQIPFAMQMAYRFNGIGVTQNVLYENQKLIANQFNSAIGKIQDSLSSTASALGKLQDVVNQNAQALNTLVKQLSSNFGAISSVLNDILSRLDPPEAEVQIDRLITGRLQSLQTYVTQQLIRAAEIRASANLAATKMSECVLGQSKRVDFCGKGYHLMSFPQSAPHGVVFLHVTYVFAQEKNFTTAPAICHDGKAHFPREGVFVSNGTHWFVTQRNFYEPQIITTDNTFVSGNCDVVIGIVNNTVYDPLQPELDSFKEELDKYFKNHTSPDVDLGDISGINASVVNIQKEIDRLNEVAKNLNESLIDLQELGKYEQYIKGGGSGGGQIYEGKLTAEGLRFGIVASRFNHALVDRLVEGAIDAIVRHGGREEDITLVRVPGSWEIPVAAGELARKEDIDAVIAIGVLIRGATPHFDYIASEVSKGLADLSLELRKPITFGVITADTLEQAIERAGTKHGNKGWEAALSAIEMANLFKSLR

SEQ ID NO: 3878 - protein, 1371 aa, Artificial Sequence; identical to SEQ ID NO: 3833
  SARS-CoV-2/Iceland/247/2020__EPI_ISL_417575 spike protein (1-1211)(K986P_V987P_P1069F) LumSynth construct

SEQ ID NO: 3879 - protein, 1371 aa, Artificial Sequence
  SARS-CoV-2/Iceland/238/2020__EPI_ISL_417566 spike protein (1-1211)(K986P_V987P_P1069F) LumSynth construct
MFVFLVLLPLVSSQCVNLTTRTQLPPAYTNSFTRGVYYPDKVFRSSVLHSTQDLFLPFFSNVTWFHAIHVSGTNGTKRFDNPVLPFNDGVYFASTEKSNIIRGWIFGTTLDSKTQSLLIVNNATNVVIKVCEFQFCNDPFLGVYYHKNNKSWMESEFRVYSSANNCTFEYVSQPFLMDLEGKQGNFKNLREFVFKNIDGYFKIYSKHTPINLVRDLPQGFSALEPLVDLPIGINITRFQTLLALHRSYLTPGDSSSGWTAGAAAYYVGYLQPRTFLLKYNENGTITDAVDCALDPLSETKCTLKSFTVEKGIYQTSNFRVQPTESIVRFPNITNLCPFGEVFNATRFASVYAWNRKRISNCVADYSVLYNSASFSTFKCYGVSPTKLNDLCFTNVYADSFVIRGDEVRQIAPGQTGKIADYNYKLPDDFTGCVIAWNSNNLDSKVGGNYNYLYRLFRKSNLKPFERDISTEIYQAGSTPCNGVEGFNCYFPLQSYGFQPTNGVGYQPYRVVVLSFELLHAPATVCGPKKSTNLVKNKCVNFNFNGLTGTGVLTESNKKFLPFQQFGRDIADTTDAVRDPQTLEILDITPCSFGGVSVITPGTNTSNQVAVLYQGVNCTEVPVAIHADQLTPTWRVYSTGSNVFQTRAGCLIGAEHVNNSYECDIPIGAGICASYQTQTNSPRRARSVASQSIIAYTMSLGAENSVAYSNNSIAIPTNFTISVTTEILPVSMTKTSVDCTMYICGDSTECSNLLLQYGSFCTQLNRALTGIAVEQDKNTQEVFAQVKQIYKTPPIKDFGGFNFSQILPDPSKPSKRSFIEDLLFNKVTLADVGFIKQYGDCLGDIAARDLICAQKFNGLTVLPPLLTDEMIAQYTSALLAGTITSGWTFGAGAALQIPFAMQMAYRFNGIGVTQNVLYENQKLIANQFNSAIGKIQDSLSSTASALGKLQDVVNQNAQALNTLVKQLSSNFGAISSVLNDILSRLDPPEAEVQIDRLITGRLQSLQTYVTQQLIRAAEIRASANLAATKMSECVLGQSKRVDFCGKGYHLMSFPQSAPHGVVFLHVTYVFAQEKNFTTAPAICHDGKAHFPREGVFVSNGTHWFVTQRNFYEPQIITTDNTFVSGNCDVVIGIVNNTVYDPLQPELDSFKEELDKYFKNHTSPDVDLGDISGINASVVNIQKEIDRLNEVAKNLNESLIDLQELGKYEQYIKGGGSGGGQIYEGKLTAEGLRFGIVASRFNHALVDRLVEGAIDAIVRHGGREEDITLVRVPGSWEIPVAAGELARKEDIDAVIAIGVLIRGATPHFDYIASEVSKGLADLSLELRKPITFGVITADTLEQAIERAGTKHGNKGWEAALSAIEMANLFKSLR

SEQ ID NO: 3880 - protein, 1371 aa, Artificial Sequence
  SARS-CoV-2/Greece/16/2020__EPI_ISL_418265 spike protein (1-1211)(K986P_V987P_P1069F) LumSynth construct
MFVFLVLLPLVSSQCVNLTTRTQLPPAYTNSFTRGVYYPDKVFRSSVLHSTQDLFLPFFSNVTWFHAIHVSGTNGTKRFDNPVLPFNDGVYFASTEKSNIIRGWIFGTTLDSKTQSLLIVNNATNVVIKVCEFQFCNDPFLGVYYHKNNKSWMESEFRVYSSANNCTFEYVSQPFLMDLEGKQGNFKNLREFVFKNVDGYFKIYSKHTPINLVRDLPQGFSALEPLVDLPIGINITRFQTLLALHRSYLTPGDSSSGWTAGAAAYYVGYLQPRTFLLKYNENGTITDAVDCALDPLSETKCTLKSFTVEKGIYQTSNFRVQPTESIVRFPNITNLCPFGEVFNATRFASVYAWNRKRISNCVADYSVLYNSASFSTFKCYGVSPTKLNDLCFTNVYADSFVIRGDEVRQIAPGQTGKIADYNYKLPDDFTGCVIAWNSNNLDSKVGGNYNYLYRLFRKSNLKPFERDISTEIYQAGSTPCNGVEGFNCYFPLQSYGFQPTNGVGYQPYRVVVLSFELLHAPATVCGPKKSTNLVKNKCVNFNFNGLTGTGVLTESNKKFLPFQQFGRDIADTTDAVRDPQTLEILDITPCSFGGVSVITPGTNTSNQVAVLYQDVNCTEVPVAIHADQLTPTWRVYSTGSNVFQTRAGCLIGAEHVNNSYECDIPIGAGICASYQTQTNSPRRARSVASQSIIAYTMSLGAENSVAYSNNSIAIPTNFTISVTTEILPVSMTKTSVDCTMYICGDSTECSNLLLQYGSFCTQLNRALTGIAVEQDKNTQEVFAQVKQIYKTPPIKDFGGFNFSQILPDPSKPSKRSFIEDLLFNKVTLADAGFIKQYGDCLGDIAARDLICAQKFNGLTVLPPLLTDEMIAQYTSALLAGTITSGWTFGAGAALQIPFAMQMAYRFNGIGVTQNVLYENQKLIANQFNSAIGKIQDSLSSTASALGKLQDVVNQNAQALNTLVKQLSSNFGAISSVLNDILSRLDPPEAEVQIDRLITGRLQSLQTYVTQQLIRAAEIRASANLAATKMSECVLGQSKRVDFCGKGYHLMSFPQSAPHGVVFLHVTYVFAQEKNFTTAPAICHDGKAHFPREGVFVSNGTHWFVTQRNFYEPQIITTDNTFVSGNCDVVIGIVNNTVYDPLQPELDSFKEELDKYFKNHTSPDVDLGDISGINASVVNIQKEIDRLNEVAKNLNESLIDLQELGKYEQYIKGGGSGGGQIYEGKLTAEGLRFGIVASRFNHALVDRLVEGAIDAIVRHGGREEDITLVRVPGSWEIPVAAGELARKEDIDAVIAIGVLIRGATPHFDYIASEVSKGLADLSLELRKPITFGVITADTLEQAIERAGTKHGNKGWEAALSAIEMANLFKSLR

SEQ ID NO: 3881 - protein, 1371 aa, Artificial Sequence
  SARS-CoV-2/Iceland/319/2020__EPI_ISL_417648 spike protein (1-1211)(K986P_V987P_P1069F) LumSynth construct
MFVFLVLLPLVSSQCVNLTTRTQLPPAYTNSFTRGVYYPDKVFRSSVLHSTQDLFLPFFSNVTWFHAIHVSGTNGTKRFDNPVLPFNDGVYFASTEKSNIIRGWIFGTTLDSKTQSLLIVNNATNVVIKVCEFQFCNDPFLGVYYHKNNKSWMESEFRVYSSANNCTFEYVSQPFLIDLEGKQGNFKNLREFVFKNIDGYFKIYSKHTPINLVRDLPQGFSALEPLVDLPIGINITRFQTLLALHRSYLTPGDSSSGWTAGAAAYYVGYLQPRTFLLKYNENGTITDAVDCALDPLSETKCTLKSFTVEKGIYQTSNFRVQPTESIVRFPNITNLCPFGEVFNATRFASVYAWNRKRISNCVADYSVLYNSASFSTFKCYGVSPTKLNDLCFTNVYADSFVIRGDEVRQIAPGQTGKIADYNYKLPDDFTGCVIAWNSNNLDSKVGGNYNYLYRLFRKSNLKPFERDISTEIYQAGSTPCNGVEGFNCYFPLQSYGFQPTNGVGYQPYRVVVLSFELLHAPATVCGPKKSTNLVKNKCVNFNFNGLTGTGVLTESNKKFLPFQQFGRDIADTTDAVRDPQTLEILDITPCSFGGVSVITPGTNTSNQVAVLYQGVNCTEVPVAIHADQLTPTWRVYSTGSNVFQTRAGCLIGAEHVNNSYECDIPIGAGICASYQTQTNSPRRARSVASQSIIAYTMSLGAENSVAYSNNSIAIPTNFTISVTTEILPVSMTKTSVDCTMYICGDSTECSNLLLQYGSFCTQLNRALTGIAVEQDKNTQEVFAQVKQIYKTPPIKDFGGFNFSQILPDPSKPSKRSFIEDLLFNKVTLADAGFIKQYGDCLGDIAARDLICAQKFNGLTVLPPLLTDEMIAQYTSALLAGTITSGWTFGAGAALQIPFAMQMAYRFNGIGVTQNVLYENQKLIANQFNSAIGKIQDSLSSTASALGKLQDVVNQNAQALNTLVKQLSSNFGAISSVLNDILSRLDPPEAEVQIDRLITGRLQSLQTYVTQQLIRAAEIRASANLAATKMSECVLGQSKRVDFCGKGYHLMSFPQSAPHGVVFLHVTYVFAQEKNFTTAPAICHDGKAHFPREGVFVSNGTHWFVTQRNFYEPQIITTDNTFVSGNCDVVIGIVNNTVYDPLQPELDSFKEELDKYFKNHTSPDVDLGDISGINASVVNIQKEIDRLNEVAKNLNESLIDLQELGKYEQYIKGGGSGGGQIYEGKLTAEGLRFGIVASRFNHALVDRLVEGAIDAIVRHGGREEDITLVRVPGSWEIPVAAGELARKEDIDAVIAIGVLIRGATPHFDYIASEVSKGLADLSLELRKPITFGVITADTLEQAIERAGTKHGNKGWEAALSAIEMANLFKSLR

SEQ ID NO: 3882 - protein, 1371 aa, Artificial Sequence
  SARS-CoV-2/Congo/94/2020__EPI_ISL_417947 spike protein (1-1211)(K986P_V987P_P1069F) LumSynth construct
MFVFLVLLPLVSSQCVNLTTRTQLPPAYTNSFTRGVYYPDKVFRSSVLHSTQDLFLPFFSNVTWFHAIHVSGTNGTKRFDNPVLPFNDGVYFASTEKSNIIRGWIFGTTLDSKTQSLLIVNNATNVVIKVCEFQFCNDPFLGVYYHKNNKSWMESEFRVYSSANNCTFEYVSQPFLMDLEGKQGNFKNLREFVFKNIDGYFKIYSKHTPINLVRDLPQGFSALEPLVDLPIGINITRFQTLLALHRSYLTPGDSSSGWTAGAAAYYVGYLQPRTFLLKYNENGTITDAVDCALDPLSETKCTLKSFTVEKGIYQTSNFRVQPTESIVRFPNITNLCPFGEVFNATRFASVYAWNRKRISNCVADYSVLYNSASFSTFKCYGVSPTKLNDLCFTNVYADSFVIRGDEVRQIAPGQTGKIADYNYKLPDDFTGCVIAWNSNNLDSKVGGNYNYLYRLFRKSNLKPFERDISTEIYQAGSTPCNGVEGFNCYFPLQSYGFQPTNGVGYQPYRVVVLSFELLHAPATVCGPKKSTNLVKNKCVNFNFNGLTGTGVLTESNKKFLPFQQFGRDIADTTDAVRDPQTLEILDITPCSFGGVSVITPGTNTSNQVAVLYQGVNCTEVPVAIHADQLTPTWRVYSTGSNVFQTRAGCLIGAEHVNNSYECDIPIGAGICASYQTQTNSPRRARSVASQSIIAYTMSLGAENSVAYSNNSIAIPTNFTISVTTEILPVSMTKTSVDCTMYICGDSTECSNLLLQYGSFCTQLNRALTGIAVEQDKNTQEVFAQVKQIYKTPPIKDFGGFNFSQILPDPSKPSKRSFIEDILFNKVTLADAGFIKQYGDCLGDIAARDLICAQKFNGLTVLPPLLTDEMIAQYTSALLAGTITSGWTFGAGAALQIPFAMQMAYRFNGIGVTQNVLYENQKLIANQFNSAIGKIQDSLSSTASALGKLQDVVNQNAQALNTLVKQLSSNFGAISSVLNDILSRLDPPEAEVQIDRLITGRLQSLQTYVTQQLIRAAEIRASANLAATKMSECVLGQSKRVDFCGKGYHLMSFPQSAPHGVVFLHVTYVFAQEKNFTTAPAICHDGKAHFPREGVFVSNGTHWFVTQRNFYEPQIITTDNTFVSGNCDVVIGIVNNTVYDPLQPELDSFKEELDKYFKNHTSPDVDLGDISGINASVVNIQKEIDRLNEVAKNLNESLIDLQELGKYEQYIKGGGSGGGQIYEGKLTAEGLRFGIVASRFNHALVDRLVEGAIDAIVRHGGREEDITLVRVPGSWEIPVAAGELARKEDIDAVIAIGVLIRGATPHFDYIASEVSKGLADLSLELRKPITFGVITADTLEQAIERAGTKHGNKGWEAALSAIEMANLFKSLR

SEQ ID NO: 3883 - protein, 1371 aa, Artificial Sequence
  SARS-CoV-2/Congo/158/2020__EPI_ISL_417950 spike protein (1-1211)(K986P_V987P_P1069F) LumSynth construct
MFVFLVLLPLVSSQCVNLTTRTQLPPAYTNSFTRGVYYPDKVFRSSVLHSTQDLFLPFFSNVTWFHAIHVSGTNGTKRFDNPVLPFNDGVYFASTEKSNIIRGWIFGTTLDSKTQSLLIVNNATNVVIKVCEFQFCNDPFLGVYYHKNNKSWMESEFRVYSSANNCTFEYVSQPFLMDLEGKQGNFKNLREFVFKNIDGYFKIYSKHTPINLVRDLPQGFSALEPLVDLPIGINITRFQTLLALHRSYLTPGDSSSGWTAGAAAYYVGYLQPRTFLLKYNENGTITDAVDCALDPLSETKCTLKSFTVEKGIYQTSNFRVQPTESIVRFPNITNLCPFGEVFNATRFASVYAWNRKRISNCVADYSVLYNSASFSTFKCYGVSPTKLNDLCFTNVYADSFVIRGDEVRQIAPGQTGKIADYNYKLPDDFTGCVIAWNSNNLDSKVGGNYNYLYRLFRKSNLKPFERDISTEIYQAGSTPCNGVEGFNCYFPLQSYGFQPTNGVGYQPYRVVVLSFELLHAPATVCGPKKSTNLVKNKCVNFNFNGLTGTGVLTESNKKFLPFQQFGRDIADTTDAVRDPQTLEILDITPCSFGGVSVITPGTNTSNQVAVLYQDVNCTEVPVAIHADQLTPTWRVYSTGSNVFQTRAGCLIGAEHVNNSYECDIPIGAGICASYQTQTNSPRRARSVASQSIIAYTMSLGAENSVAYSNNSIAIPTNFTISVTTEILPVSMTKTSVDCTMYICGDSTECSNLLLQYGSFCTQLNRALTGIAVEQDKNTQEVFAQVKQIYKTPPIKDFGGFNFSQILPDPSKPSKRSFIEDLLFNKVTLADAGFIKQYGDCLGDIAARDLICAQKFNGLTVLPPLLTDEMIAQYTSALLAGTITSGWTFGAGAALQIPFAMQMAYRFNGIGVTQNVLYENQKLIANQFNSAIGKIQDSLSSTASALGKLQDVVNQNAQALNTLVKQLSSNFGAISSVLNDILSRLDPPEAEVQIDRLITGRLQSLQTYVTQQLIRAAEIRASANLAATKMSECVLGQSKRVDFCGKGYHLMSFPQSAPHGVVFLHVTYVFAQEKNFTTAPAICHDGKAHFPREGVFVSNGTHWFVTQRNFYEPQIITTDNTFLSGNCDVVIGIVNNTVYDPLQPELDSFKEELDKYFKNHTSPDVDLGDISGINASVVNIQKEIDRLNEVAKNLNESLIDLQELGKYEQYIKGGGSGGGQIYEGKLTAEGLRFGIVASRFNHALVDRLVEGAIDAIVRHGGREEDITLVRVPGSWEIPVAAGELARKEDIDAVIAIGVLIRGATPHFDYIASEVSKGLADLSLELRKPITFGVITADTLEQAIERAGTKHGNKGWEAALSAIEMANLFKSLR

SEQ ID NO: 3884 - protein, 1371 aa, Artificial Sequence
  SARS-CoV-2/USA/UT-00034/2020__EPI_ISL_417977 spike protein (1-1211)(K986P_V987P_P1069F) LumSynth construct
MFVFLVLLPLVSSQCVNLTTRTQLPPAYTNSFTRGVYYPDKVFRSSVLHSTQDLFLPFFSNVTWFHAIHVSGTNGTKRFDNPVLPFNDGVYFASTEKSNIIRGWIFGTTLDSKTQSLLIVNNATNVVIKVCEFQFCNDPFLGVYYYKNNKSWMESEFRVYSSANNCTFEYVSQPFLMDLEGKQGNFKNLREFVFKNIDGYFKIYSKHTPINLVRDLPQGFSALEPLVDLPIGINITRFQTLLALHRSYLTPGDSSSGWTAGAAAYYVGYLQPRTFLLKYNENGTITDAVDCALDPLSETKCTLKSFTVEKGIYQTSNFRVQPTESIVRFPNITNLCPFGEVFNATRFASVYAWNRKRISNCVADYSVLYNSASFSTFKCYGVSPTKLNDLCFTNVYADSFVIRGDEVRQIAPGQTGKIADYNYKLPDDFTGCVIAWNSNNLDSKVGGNYNYLYRLFRKSNLKPFERDISTEIYQAGSTPCNGVEGFNCYFPLQSYGFQPTNGVGYQPYRVVVLSFELLHAPATVCGPKKSTNLVKNKCVNFNFNGLTGTGVLTESNKKFLPFQQFGRDIADTTDAVRDPQTLEILDITPCSFGGVSVITPGTNTSNQVAVLYQGVNCTEVPVAIHADQLTPTWRVYSTGSNVFQTRAGCLIGAEHVNNSYECDIPIGAGICASYQTQTNSPRRARSVASQSIIAYTMSLGAENSVAYSNNSIAIPTNFTISVTTEILPVSMTKTSVDCTMYICGDSTECSNLLLQYGSFCTQLNRALTGIAVEQDKNTQEVFAQVKQIYKTPPIKDFGGFNFSQILPDPSKPSKRSFIEDLLFNKVTLADAGFIKQYGDCLGDIAARDLICAQKFNGLTVLPPLLTDEMIAQYTSALLAGTITSGWTFGAGAALQIPFAMQMAYRFNGIGVTQNVLYENQKLIANQFNSAIGKIQDSLSSTASALGKLQDVVNQNAQALNTLVKQLSSNFGAISSVLNDILSRLDPPEAEVQIDRLITGRLQSLQTYVTQQLIRAAEIRASANLAATKMSECVLGQSKRVDFCGKGYHLMSFPQSAPHGVVFLHVTYVFAQEKNFTTAPAICHDGKAHFPREGVFVSNGTHWFVTQRNFYEPQIITTDNTFVSGNCDVVIGIVNNTVYDPLQPELDSFKEELDKYFKNHTSPDVDLGDISGINASVVNIQKEIDRLNEVAKNLNESLIDLQELGKYEQYIKGGGSGGGQIYEGKLTAEGLRFGIVASRFNHALVDRLVEGAIDAIVRHGGREEDITLVRVPGSWEIPVAAGELARKEDIDAVIAIGVLIRGATPHFDYIASEVSKGLADLSLELRKPITFGVITADTLEQAIERAGTKHGNKGWEAALSAIEMANLFKSLR

SEQ ID NO: 3885 - protein, 1371 aa, Artificial Sequence
  SARS-CoV-2/USA/UT-00033/2020__EPI_ISL_417976 spike protein (1-1211)(K986P_V987P_P1069F) LumSynth construct
MFVFLVLLPLVSSQCVNLTTRTQLPPAYTNSFTRGVYYPDKVFRSSVLHSTQDLFLPFFSNVTWFHAIHVSGTNGTKRFDNPVLPFNDGVYFASTEKSNIIRGWIFGTTLDSKTQSLLIVNNATNVVIKVCEFQFCNDPFLGVYYHKNNKSWMESEFRVYSSANNCTFEYVSQPFLMDLEGKQGNFKNLREFVFKNIDGYFKIYSKHTPINLVRDLPQGFSALEPLVDLPIGINITRFQTLLALHRSYLTPGDSSSGLTAGAAAYYVGYLQPRTFLLKYNENGTITDAVDCALDPLSETKCTLKSFTVEKGIYQTSNFRVQPTESIVRFPNITNLCPFGEVFNATRFASVYAWNRKRISNCVADYSVLYNSASFSTFKCYGVSPTKLNDLCFTNVYADSFVIRGDEVRQIAPGQTGKIADYNYKLPDDFTGCVIAWNSNNLDSKVGGNYNYLYRLFRKSNLKPFERDISTEIYQAGSTPCNGVEGFNCYFPLQSYGFQPTNGVGYQPYRVVVLSFELLHAPATVCGPKKSTNLVKNKCVNFNFNGLTGTGVLTESNKKFLPFQQFGRDIADTTDAVRDPQTLEILDITPCSFGGVSVITPGTNTSNQVAVLYQGVNCTEVPVAIHADQLTPTWRVYSTGSNVFQTRAGCLIGAEHVNNSYECDIPIGAGICASYQTQTNSPRRARSVASQSIIAYTMSLGAENSVAYSNNSIAIPTNFTISVTTEILPVSMTKTSVDCTMYICGDSTECSNLLLQYGSFCTQLNRALTGIAVEQDKNTQEVFAQVKQIYKTPPIKDFGGFNFSQILPDPSKPSKRSFIEDLLFNKVTLADAGFIKQYGDCLGDIAARDLICAQKFNGLTVLPPLLTDEMIAQYTSALLAGTITSGWTFGAGAALQIPFAMQMAYRFNGIGVTQNVLYENQKLIANQFNSAIGKIQDSLSSTASALGKLQDVVNQNAQALNTLVKQLSSNFGAISSVLNDILSRLDPPEAEVQIDRLITGRLQSLQTYVTQQLIRAAEIRASANLAATKMSECVLGQSKRVDFCGKGYHLMSFPQSAPHGVVFLHVTYVFAQEKNFTTAPAICHDGKAHFPREGVFVSNGTHWFVTQRNFYEPQIITTDNTFVSGNCDVVIGIVNNTVYDPLQPELDSFKEELDKYFKNHTSPDVDLGDISGINASVVNIQKEIDRLNEVAKNLNESLIDLQELGKYEQYIKGGGSGGGQIYEGKLTAEGLRFGIVASRFNHALVDRLVEGAIDAIVRHGGREEDITLVRVPGSWEIPVAAGELARKEDIDAVIAIGVLIRGATPHFDYIASEVSKGLADLSLELRKPITFGVITADTLEQAIERAGTKHGNKGWEAALSAIEMANLFKSLR

SEQ ID NO: 3886 - protein, 1371 aa, Artificial Sequence
  SARS-CoV-2/USA/WI-13/2020__EPI_ISL_417516 spike protein (1-1211)(K986P_V987P_P1069F) LumSynth construct
MFVFLVLLPLVSSQCVNLTTRTQLPPAYTNSFTRGVYYPDKVFRSSVLHSTQDLFLPFFSNVTWFHAIHVSGTNGTKRFDNPVLPFNDGVYFASTEKSNIIRGWIFGTTLDSKTQSLLIVNNATNVVIKVCEFQFCNDPFLGVYYHKNNKSWMESEFRVYSSANNCTFEYVSQPFLMDLEGKQGNFKNLREFVFKNIDGYFKIYSKHTPINLVRDLPQGFSALEPLVDLPIGINITRFQTLLALHRSYLTPGDSSSGWTAGAAAYYVGYLQPRTFLLKYNENGTITDAVDCALDPLSETKCTLKSFTVEKGIYQTSNFRVLPTESIVRFPNITNLCPFGEVFNATRFASVYAWNRKRISNCVADYSVLYNSASFSTFKCYGVSPTKLNDLCFTNVYADSFVIRGDEVRQIAPGQTGKIADYNYKLPDDFTGCVIAWNSNNLDSKVGGNYNYLYRLFRKSNLKPFERDISTEIYQAGSTPCNGVEGFNCYFPLQSYGFQPTNGVGYQPYRVVVLSFELLHAPATVCGPKKSTNLVKNKCVNFNFNGLTGTGVLTESNKKFLPFQQFGRDIADTTDAVRDPQTLEILDITPCSFGGVSVITPGTNTSNQVAVLYQGVNCTEVPVAIHADQLTPTWRVYSTGSNVFQTRAGCLIGAEHVNNSYECDIPIGAGICASYQTQTNSPRRARSVASQSIIAYTMSLGAENSVAYSNNSIAIPTNFTISVTTEILPVSMTKTSVDCTMYICGDSTECSNLLLQYGSFCTQLNRALTGIAVEQDKNTQEVFAQVKQIYKTPPIKDFGGFNFSQILPDPSKPSKRSFIEDLLFNKVTLADAGFIKQYGDCLGDIAARDLICAQKFNGLTVLPPLLTDEMIAQYTSALLAGTITSGWTFGAGAALQIPFAMQMAYRFNGIGVTQNVLYENQKLIANQFNSAIGKIQDSLSSTASALGKLQDVVNQNAQALNTLVKQLSSNFGAISSVLNDILSRLDPPEAEVQIDRLITGRLQSLQTYVTQQLIRAAEIRASANLAATKMSECVLGQSKRVDFCGKGYHLMSFPQSAPHGVVFLHVTYVFAQEKNFTTAPAICHDGKAHFPREGVFVSNGTHWFVTQRNFYEPQIITTDNTFVSGNCDVVIGIVNNTVYDPLQPELDSFKEELDKYFKNHTSPDVDLGDISGINASVVNIQKEIDRLNEVAKNLNESLIDLQELGKYEQYIKGGGSGGGQIYEGKLTAEGLRFGIVASRFNHALVDRLVEGAIDAIVRHGGREEDITLVRVPGSWEIPVAAGELARKEDIDAVIAIGVLIRGATPHFDYIASEVSKGLADLSLELRKPITFGVITADTLEQAIERAGTKHGNKGWEAALSAIEMANLFKSLR

SEQ ID NO: 3887 - protein, 1370 aa, Artificial Sequence
  SARS-CoV-2/India/1-27/2020__EPI_ISL_413522 spike protein (1-1210)(K985P_V986P_P1068F) LumSynth construct
MFVFLVLLPLVSSQCVNLTTRTQLPPAYTNSFTRGVYYPDKVFRSSVLHSTQDLFLPFFSNVTWFHAIHVSGTNGTKRFDNPVLPFNDGVYFASTEKSNIIRGWIFGTTLDSKTQSLLIVNNATNVVIKVCEFQFCNDPFLGVYHKNNKSWMESEFRVYSSANNCTFEYVSQPFLMDLEGKQGNFKNLREFVFKNIDGYFKIYSKHTPINLVRDLPQGFSALEPLVDLPIGINITRFQTLLALHRSYLTPGDSSSGWTAGAAAYYVGYLQPRTFLLKYNENGTITDAVDCALDPLSETKCTLKSFTVEKGIYQTSNFRVQPTESIVRFPNITNLCPFGEVFNATRFASVYAWNRKRISNCVADYSVLYNSASFSTFKCYGVSPTKLNDLCFTNVYADSFVIRGDEVIQIAPGQTGKIADYNYKLPDDFTGCVIAWNSNNLDSKVGGNYNYLYRLFRKSNLKPFERDISTEIYQAGSTPCNGVEGFNCYFPLQSYGFQPTNGVGYQPYRVVVLSFELLHAPATVCGPKKSTNLVKNKCVNFNFNGLTGTGVLTESNKKFLPFQQFGRDIADTTDAVRDPQTLEILDITPCSFGGVSVITPGTNTSNQVAVLYQDVNCTEVPVAIHADQLTPTWRVYSTGSNVFQTRAGCLIGAEHVNNSYECDIPIGAGICASYQTQTNSPRRARSVASQSIIAYTMSLGAENSVAYSNNSIAIPTNFTISVTTEILPVSMTKTSVDCTMYICGDSTECSNLLLQYGSFCTQLNRALTGIAVEQDKNTQEVFAQVKQIYKTPPIKDFGGFNFSQILPDPSKPSKRSFIEDLLFNKVTLADAGFIKQYGDCLGDIAARDLICAQKFNGLTVLPPLLTDEMIAQYTSALLAGTITSGWTFGAGAALQIPFAMQMAYRFNGIGVTQNVLYENQKLIANQFNSAIGKIQDSLSSTASALGKLQDVVNQNAQALNTLVKQLSSNFGAISSVLNDILSRLDPPEAEVQIDRLITGRLQSLQTYVTQQLIRAAEIRASANLAATKMSECVLGQSKRVDFCGKGYHLMSFPQSAPHGVVFLHVTYVFAQEKNFTTAPAICHDGKAHFPREGVFVSNGTHWFVTQRNFYEPQIITTDNTFVSGNCDVVIGIVNNTVYDPLQPELDSFKEELDKYFKNHTSPDVDLGDISGINASVVNIQKEIDRLNEVAKNLNESLIDLQELGKYEQYIKGGGSGGGQIYEGKLTAEGLRFGIVASRFNHALVDRLVEGAIDAIVRHGGREEDITLVRVPGSWEIPVAAGELARKEDIDAVIAIGVLIRGATPHFDYIASEVSKGLADLSLELRKPITFGVITADTLEQAIERAGTKHGNKGWEAALSAIEMANLFKSLR

SEQ ID NO: 3888 - protein, 1365 aa, Artificial Sequence
  SARS-CoV-2/pangolin/Guangxi/P4L/2017__EPI_ISL_410538 spike protein (1-1205)(K980P_V981P_P1063F) LumSynth construct
MFVFLFVLPLVSSQCVNLTTRTGIPPGYTNSSTRGVYYPDKVFRSSILHLTQDLFLPFFSNVTWFNTINYQGGFKKFDNPVLPFNDGVYFASTEKSNIIRGWIFGTTLDARTQSLLIVNNATNVVIKVCEFQFCTDPFLGVYYHNNNKTWVENEFRVYSSANNCTFEYISQPFLMDLEGKQGNFKNLREFVFKNVDGYFKIYSKHTPIDLVRDLPRGFAALEPLVDLPIGINITRFQTLLALHRSYLTPGNLESGWTTGAAAYYVGYLQQRTFLLSYNQNGTITDAVDCSLDPLSETKCTLKSLTVEKGIYQTSNFRVQPTISIVRFPNITNLCPFGEVFNASKFASVYAWNRKRISNCVADYSVLYNSTSFSTFKCYGVSPTKLNDLCFTNVYADSFVVKGDEVRQIAPGQTGVIADYNYKLPDDFTGCVIAWNSVKQDALTGGNYGYLYRLFRKSKLKPFERDISTEIYQAGSTPCNGQVGLNCYYPLERYGFHPTTGVNYQPFRVVVLSFELLNGPATVCGPKLSTTLVKDKCVNFNFNGLTGTGVLTTSKKQFLPFQQFGRDISDTTDAVRDPQTLEILDITPCSFGGVSVITPGTNTSNQVAVLYQDVNCTEVPMAIHAEQLTPAWRVYSAGANVFQTRAGCLVGAEHVNNSYECDIPVGAGICASYHSMSSLRSVNQRSIIAYTMSLGAENSVAYSNNSIAIPTNFTISVTTEILPVSMTKTSVDCTMYICGDSIECSNLLLQYGSFCTQLNRALTGIAVEQDKNTQEVFAQVKQIYKTPPIKDFGGFNFSQILPDPSKPSKRSFIEDLLFNKVTLADAGFIKQYGDCLGDIAARDLICAQKFNGLTVLPPLLTDEMIAQYTSALLAGTITSGWTFGAGAALQIPFAMQMAYRFNGIGVTQNVLYENQKLIANQFNSAIGKIQDSLSSTASALGKLQDVVNQNAQALNTLVKQLSSNFGAISSVLNDILSRLDPPEAEVQIDRLITGRLQSLQTYVTQQLIRAAEIRASANLAATKMSECVLGQSKRVDFCGKGYHLMSFPQSAPHGVVFLHVTYVFAQEKNFTTAPAICHEGKAHFPREGVFVSNGTHWFITQRNFYEPQIITTDNTFVSGSCDVVIGIVNNTVYDPLQPELDSFKEELDKYFKNHTSPDVDLGDISGINASVVNIQKEIDRLNEVAKNLNESPIDLQELGKYEQYIKGGGSGGGQIYEGKLTAEGLRFGIVASRFNHALVDRLVEGAIDAIVRHGGREEDITLVRVPGSWEIPVAAGELARKEDIDAVIAIGVLIRGATPHFDYIASEVSKGLADLSLELRKPITFGVITADTLEQAIERAGTKHGNKGWEAALSAIEMANLFKSLR

SEQ ID NO: 3889 - protein, 1365 aa, Artificial Sequence
  SARS-CoV-2/pangolin/Guangxi/P5L/2017__EPI_ISL_410540 spike protein (1-1205)(K980P_V981P_P1063F) LumSynth construct
MFVFLFVLPLVSSQCVNLTTRTGIPPGYTNSSTRGVYYPDKVFRSSILHLTQDLFLPFFSNVTWFNTINYQGGFKKFDNPVLPFNDGVYFASTEKSNIIRGWIFGTTLDARTQSLLIVNNATNVVIKVCEFQFCTDPFLGVYYHNNNKTWVENEFRVYSSANNCTFEYISQPFLMDLEGKQGNFKNLREFVFKNVDGYFKIYSKHTPIDLVRDLPRGFAALEPLVDLPIGINITRFQTLLALHRSYLTPGKLESGWTTGAAAYYVGYLQQRTFLLSYNQNGTITDAVDCSLDPLSETKCTLKSLTVEKGIYQTSNFRVQPTISIVRFPNITNLCPFGEVFNASKFASVYAWNRKRISNCVADYSVLYNSTSFSTFKCYGVSPTKLNDLCFTNVYADSFVVKGDEVRQIAPGQTGVIADYNYKLPDDFTGCVIAWNSVKQDALTGGNYGYLYRLFRKSKLKPFERDISTEIYQAGSTPCNGQVGLNCYYPLERYGFHPTTGVNYQPFRVVVLSFELLNGPATVCGPKLSTTLVKDKCVNFNFNGLTGTGVLTTSKKQFLPFQQFGRDISDTTDAVRDPQTLEILDITPCSFGGVSVITPGTNTSNQVAVLYQDVNCTEVPMAIHAEQLTPAWRVYSAGANVFQTRAGCLVGAEHVNNSYECDIPVGAGICASYHSMSSFRSVNQRSIIAYTMSLGAENSVAYSNNSIAIPTNFTISVTTEILPVSMTKTSVDCTMYICGDSIECSNLLLQYGSFCTQLNRALTGIAVEQDKNTQEVFAQVKQIYKTPPIKDFGGFNFSQILPDPSKPSKRSFIEDLLFNKVTLADAGFIKQYGDCLGDIAARDLICAQKFNGLTVLPPLLTDEMIAQYTSALLAGTITSGWTFGAGAALQIPFAMQMAYRFNGIGVTQNVLYENQKLIANQFNSAIGKIQDSLSSTASALGKLQDVVNQNAQALNTLVKQLSSNFGAISSVLNDILSRLDPPEAEVQIDRLITGRLQSLQTYVTQQLIRAAEIRASANLAATKMSECVLGQSKRVDFCGKGYHLMSFPQSAPHGVVFLHVTYVFAQEKNFTTAPAICHEGKAHFPREGVFVSNGTHWFITQRNFYEPQIITTDNTFVSGSCDVVIGIVNNTVYDPLQPELDSFKEELDKYFKNHTSPDVDLGDISGINASVVNIQKEIDRLNEVAKNLNESLIDLQELGKYEQYIKGGGSGGGQIYEGKLTAEGLRFGIVASRFNHALVDRLVEGAIDAIVRHGGREEDITLVRVPGSWEIPVAAGELARKEDIDAVIAIGVLIRGATPHFDYIASEVSKGLADLSLELRKPITFGVITADTLEQAIERAGTKHGNKGWEAALSAIEMANLFKSLR

SEQ ID NO: 3890 - protein, 1365 aa, Artificial Sequence
  SARS-CoV-2/pangolin/Guangxi/P5E/2017__EPI_ISL_410541 spike protein (1-1205)(K980P_V981P_P1063F) LumSynth construct
MFVFLFVLPLVSSQCVNLTTRTGIPPGYTNSSTRGVYYPDKVFRSSILHLTQDLFLPFFSNVTWFNTITYQGGSKKFDNPVLPFNDGVYFASTEKSNIIRGWIFGTTLDARTQSLLIVNNATNVVIKVCEFQFCTDPFLGVYYHNNNKTWVENEFRVYSSANNCTFEYISQPFLMDLEGKQGNFKNLREFVFKNVDGYFKIYSKHTPIDLVRDLPRGFAALEPLVDLPIGINITRFQTLLALHRSYLTPGKLESGWTTGAAAYYVGYLQQRTFLLSYNQNGTITDAVDCSLDPLSETKCTLKSLTVEKGIYQTSNFRVQPTISIVRFPNITNLCPFGEVFNASKFASVYAWNRKRISNCVADYSVLYNSTSFSTFKCYGVSPTKLNDLCFTNVYADSFVVKGDEVRQIAPGQTGVIADYNYKLPDDFTGCVIAWNSVKQDALTGDNYGYLYRLFRKSKLKPFERDISTEIYQAGSTPCNGQVGLNCYYPLERYGFHPTTGVNYQPFRVVVLSFELLNGPATVCGPKLSTTLVKDKCVNFNFNGLTGTGVLTTSKKQFLPFQQFGRDISDTTDAVRDPQTLEILDITPCSFGGVSVITPGTNTSNQVAVLYQDVNCTEVPMAIHAEQLTPAWRVYSAGANVFQTRAGCLVGAEHVNNSYECDIPVGAGICASYHSMSSFRSVNQRSIIAYTMSLGAENSVAYSNNSIAIPTNFTISVTTEILPVSMTKTSVDCTMYICGDSIECSNLLLQYGSFCTQLNRALTGIAVEQDKNTQEVFAQVKQIYKTPPIKDFGGFNFSQILPDPSKPSKRSFIEDLLFNKVTLADAGFIKQYGDCLGDIAARDLICAQKFNGLTVLPPLLTDEMIAQYTSALLAGTITSGWTFGAGAALQIPFAMQMAYRFNGIGVTQNVLYENQKLIANQFNSAIGKIQDSLSSTASALGKLQDVVNQNAQALNTLVKQLSSNFGAISSVLNDILSRLDPPEAEVQIDRLITGRLQSLQTYVTQQLIRAAEIRASANLAATKMSECVLGQSKRVDFCGKGYHLMSFPQSAPHGVVFLHVTYVFAQEKNFTTAPAICHEGKAHFPREGVFVSNGTHWFITQRNFYEPQIITTDNTFVSGSCDVVIGIVNNTVYDPLQPELDSFKEELDKYFKNHTSPDVDLGDISGINASVVNIQKEIDRLNEVAKNLNESLIDLQELGKYEQYIKGGGSGGGQIYEGKLTAEGLRFGIVASRFNHALVDRLVEGAIDAIVRHGGREEDITLVRVPGSWEIPVAAGELARKEDIDAVIAIGVLIRGATPHFDYIASEVSKGLADLSLELRKPITFGVITADTLEQAIERAGTKHGNKGWEAALSAIEMANLFKSLR

SEQ ID NO: 3891 - protein, 1363 aa, Artificial Sequence
  SARS-CoV-2/pangolin/Guangxi/P1E/2017__EPI_ISL_410539 spike protein (1-1203)(K978P_V979P_P1061F) LumSynth construct
MFVFLFVLPLVSSQCVNLTTRTGIQPGYTNSSTRGVYYPDKVFRSSILHLTQDLFLPFFSNVTWFNTINYQGGFKKFDNPVLPFNDGVYFASTEKSNIIRGWIFGTTLDARTQSLLIVNNATNVVIKVCEFQFCTDPFLGVYYHNNNKTWVENEFRVYSSANNCTFEYISQPFLMDLEGKQGNFKNLREFVFKNVDGYFKIYSKHTPIDLVRDLPRGFAALEPLVDLPIGINITRFQTLLALHRSYLTPGKLESGWTTGAAAYYVGYLQQRTFLLSYNQNGTITDAVDCSLDPLSETKCTLKSLTVEKGIYQTSNFRVQPTISIVRFPNITNLCPFGEVFNASKFASVYAWNRKRISNCVADYSVLYNSTSFSTFKCYGVSPTKLNDLCFTNVYADSFVVKGDEVRQIAPGQTGVIADYNYKLPDDFTGCVIAWNSVKQDALTGGNYLYRLFRKSKLKPFERDISTEIYQAGSTPCNGQVGLNCYYPLERYGFHPTTGVNYQPFRVVVLSFELLNGPATVCGPKLSTTLVKDKCVNFNFNGLTGTGVLTTSKKQFLPFQQFGRDISDTTDAVRDPQTLEILDITPCSFGGVSVITPGTNTSNQVAVLYQDVNCTEVPMAIHAEQLTPAWRVYSAGANVFQTRAGCLVGAEHVNNSYECDIPVGAGICASYHSMSSLRSVNQRSIIAYTMSLGAENSVAYSNNSIAIPTNFTISVTTEILPVSMTKTSVDCTMYICGDSIECSNLLLQYGSFCTQLNRALTGIAVEQDKNTQEVFAQVKQIYKTPPIKDFGGFNFSQILPDPSKPSKRSFIEDLLFNKVTLADAGFIKQYGDCLGDIAARDLICAQKFNGLTVLPPLLTDEMIAQYTSALLAGTITSGWTFGAGAALQIPFAMQMAYRFNGIGVTQNVLYENQKLIANQFNSAIGKIQDSLSSTASALGKLQDVVNQNAQALNTLVKQLSSNFGAISSVLNDILSRLDPPEAEVQIDRLITGRLQSLQTYVTQQLIRAAEIRASANLAATKMSECVLGQSKRVDFCGKGYHLMSFPQSAPHGVVFLHVTYVFAQEKNFTTAPAICHEGKAHFPREGVFVSNGTHWFITQRNFYEPQIITTDNTFVSGSCDVVIGIVNNTVYDPLQPELDSFKEELDKYFKNHTSPDVDLGDISGINASVVNIQKEIDRLNEVAKNLNESLIDLQELGKYEQYIKGGGSGGGQIYEGKLTAEGLRFGIVASRFNHALVDRLVEGAIDAIVRHGGREEDITLVRVPGSWEIPVAAGELARKEDIDAVIAIGVLIRGATPHFDYIASEVSKGLADLSLELRKPITFGVITADTLEQAIERAGTKHGNKGWEAALSAIEMANLFKSLR

SEQ ID NO: 3892 - protein, 1371 aa, Artificial Sequence
  SARS-CoV-2/Wuhan/WIV05/2019__EPI_ISL_402128 spike protein (1-1211)(K986P_V987P_ H1048Q_H1064N_ H1083N_H1101N) LumSynth construct
MFVFLVLLPLVSSQCVNLTTRTQLPPAYTNSFTRGVYYPDKVFRSSVLHSTQDLFLPFFSNVTWFHAIHVSGTNGTKRFDNPVLPFNDGVYFASTEKSNIIRGWIFGTTLDSKTQSLLIVNNATNVVIKVCEFQFCNDPFLGVYYHKNNKSWMESEFRVYSSANNCTFEYVSQPFLMDLEGKQGNFKNLREFVFKNIDGYFKIYSKHTPINLVRDLPQGFSALEPLVDLPIGINITRFQTLLALHRSYLTPGDSSSGWTAGAAAYYVGYLQPRTFLLKYNENGTITDAVDCALDPLSETKCTLKSFTVEKGIYQTSNFRVQPTESIVRFPNITNLCPFGEVFNATRFASVYAWNRKRISNCVADYSVLYNSASFSTFKCYGVSPTKLNDLCFTNVYADSFVIRGDEVRQIAPGQTGKIADYNYKLPDDFTGCVIAWNSNNLDSKVGGNYNYLYRLFRKSNLKPFERDISTEIYQAGSTPCNGVEGFNCYFPLQSYGFQPTNGVGYQPYRVVVLSFELLHAPATVCGPKKSTNLVKNKCVNFNFNGLTGTGVLTESNKKFLPFQQFGRDIADTTDAVRDPQTLEILDITPCSFGGVSVITPGTNTSNQVAVLYQDVNCTEVPVAIHADQLTPTWRVYSTGSNVFQTRAGCLIGAEHVNNSYECDIPIGAGICASYQTQTNSPRRARSVASQSIIAYTMSLGAENSVAYSNNSIAIPTNFTISVTTEILPVSMTKTSVDCTMYICGDSTECSNLLLQYGSFCTQLNRALTGIAVEQDKNTQEVFAQVKQIYKTPPIKDFGGFNFSQILPDPSKPSKRSFIEDLLFNKVTLADAGFIKQYGDCLGDIAARDLICAQKFNGLTVLPPLLTDEMIAQYTSALLAGTITSGWTFGAGAALQIPFAMQMAYRFNGIGVTQNVLYENQKLIANQFNSAIGKIQDSLSSTASALGKLQDVVNQNAQALNTLVKQLSSNFGAISSVLNDILSRLDPPEAEVQIDRLITGRLQSLQTYVTQQLIRAAEIRASANLAATKMSECVLGQSKRVDFCGKGYQLMSFPQSAPHGVVFLNVTYVPAQEKNFTTAPAICNDGKAHFPREGVFVSNGTNWFVTQRNFYEPQIITTDNTFVSGNCDVVIGIVNNTVYDPLQPELDSFKEELDKYFKNHTSPDVDLGDISGINASVVNIQKEIDRLNEVAKNLNESLIDLQELGKYEQYIKGGGSGGGQIYEGKLTAEGLRFGIVASRFNHALVDRLVEGAIDAIVRHGGREEDITLVRVPGSWEIPVAAGELARKEDIDAVIAIGVLIRGATPHFDYIASEVSKGLADLSLELRKPITFGVITADTLEQAIERAGTKHGNKGWEAALSAIEMANLFKSLR

SEQ ID NO: 3893 - protein, 1367 aa, Artificial Sequence
  SARS-CoV-2/bat/Yunnan/RaTG13/2013__EPI_ISL_402131 spike protein (1-1207)(K982P_V983P_ H1044Q_H1060N_ H1079N_H1097N) LumSynth construct
MFVFLVLLPLVSSQCVNLTTRTQLPPAYTNSSTRGVYYPDKVFRSSVLHLTQDLFLPFFSNVTWFHAIHVSGTNGIKRFDNPVLPFNDGVYFASTEKSNIIRGWIFGTTLDSKTQSLLIVNNATNVVIKVCEFQFCNDPFLGVYYHKNNKSWMESEFRVYSSANNCTFEYVSQPFLMDLEGKQGNFKNLREFVFKNIDGYFKIYSKHTPINLVRDLPPGFSALEPLVDLPIGINITRFQTLLALHRSYLTPGDSSSGWTAGAAAYYVGYLQPRTFLLKYNENGTITDAVDCALDPLSETKCTLKSFTVEKGIYQTSNFRVQPTDSIVRFPNITNLCPFGEVFNATTFASVYAWNRKRISNCVADYSVLYNSTSFSTFKCYGVSPTKLNDLCFTNVYADSFVITGDEVRQIAPGQTGKIADYNYKLPDDFTGCVIAWNSKHIDAKEGGNFNYLYRLFRKANLKPFERDISTEIYQAGSKPCNGQTGLNCYYPLYRYGFYPTDGVGHQPYRVVVLSFELLNAPATVCGPKKSTNLVKNKCVNFNFNGLTGTGVLTESNKKFLPFQQFGRDIADTTDAVRDPQTLEILDITPCSFGGVSVITPGTNASNQVAVLYQDVNCTEVPVAIHADQLTPTWRVYSTGSNVFQTRAGCLIGAEHVNNSYECDIPIGAGICASYQTQTNSRSVASQSIIAYTMSLGAENSVAYSNNSIAIPTNFTISVTTEILPVSMTKTSVDCTMYICGDSTECSNLLLQYGSFCTQLNRALTGIAVEQDKNTQEVFAQVKQIYKTPPIKDFGGFNFSQILPDPSKPSKRSFIEDLLFNKVTLADAGFIKQYGDCLGDIAARDLICAQKFNGLTVLPPLLTDEMIAQYTSALLAGTITSGWTFGAGAALQIPFAMQMAYRFNGIGVTQNVLYENQKLIANQFNSAIGKIQDSLSSTASALGKLQDVVNQNAQALNTLVKQLSSNFGAISSVLNDILSRLDPPEAEVQIDRLITGRLQSLQTYVTQQLIRAAEIRASANLAATKMSECVLGQSKRVDFCGKGYQLMSFPQSAPHGVVFLNVTYVPAQEKNFTTAPAICNDGKAHFPREGVFVSNGTNWFVTQRNFYEPQIITTDNTFVSGSCDVVIGIVNNTVYDPLQPELDSFKEELDKYFKNHTSPDVDLGDISGINASVVNIQKEIDRLNEVAKNLNESLIDLQELGKYEQYIKGGGSGGGQIYEGKLTAEGLRFGIVASRFNHALVDRLVEGAIDAIVRHGGREEDITLVRVPGSWEIPVAAGELARKEDIDAVIAIGVLIRGATPHFDYIASEVSKGLADLSLELRKPITFGVITADTLEQAIERAGTKHGNKGWEAALSAIEMANLFKSLR

SEQ ID NO: 3894 - protein, 1371 aa, Artificial Sequence
  SARS-CoV-2/Wuhan/HBCDC-HB-01/2019__EPI_ISL_402132 spike protein (1-1211)(K986P_V987P_ H1048Q_H1064N_ H1083N_H1101N) LumSynth construct
MFVFLVLLPLVSSQCVNLTTRTQLPPAYTNSITRGVYYPDKVFRSSVLHSTQDLFLPFFSNVTWFHAIHVSGTNGTKRFDNPVLPFNDGVYFASTEKSNIIRGWIFGTTLDSKTQSLLIVNNATNVVIKVCEFQFCNDPFLGVYYHKNNKSWMESEFRVYSSANNCTFEYVSQPFLMDLEGKQGNFKNLREFVFKNIDGYFKIYSKHTPINLVRDLPQGFSALEPLVDLPIGINITRFQTLLALHRSYLTPGDSSSGWTAGAAAYYVGYLQPRTFLLKYNENGTITDAVDCALDPLSETKCTLKSFTVEKGIYQTSNFRVQPTESIVRFPNITNLCPFGEVFNATRFASVYAWNRKRISNCVADYSVLYNSASFSTFKCYGVSPTKLNDLCFTNVYADSFVIRGDEVRQIAPGQTGKIADYNYKLPDDFTGCVIAWNSNNLDSKVGGNYNYLYRLFRKSNLKPFERDISTEIYQAGSTPCNGVEGFNCYFPLQSYGFQPTNGVGYQPYRVVVLSFELLHAPATVCGPKKSTNLVKNKCVNFNFNGLTGTGVLTESNKKFLPFQQFGRDIADTTDAVRDPQTLEILDITPCSFGGVSVITPGTNTSNQVAVLYQDVNCTEVPVAIHADQLTPTWRVYSTGSNVFQTRAGCLIGAEHVNNSYECDIPIGAGICASYQTQTNSPRRARSVASQSIIAYTMSLGAENSVAYSNNSIAIPTNFTISVTTEILPVSMTKTSVDCTMYICGDSTECSNLLLQYGSFCTQLNRALTGIAVEQDKNTQEVFAQVKQIYKTPPIKDFGGFNFSQILPDPSKPSKRSFIEDLLFNKVTLADAGFIKQYGDCLGDIAARDLICAQKFNGLTVLPPLLTDEMIAQYTSALLAGTITSGWTFGAGAALQIPFAMQMAYRFNGIGVTQNVLYENQKLIANQFNSAIGKIQDSLSSTASALGKLQDVVNQNAQALNTLVKQLSSNFGAISSVLNDILSRLDPPEAEVQIDRLITGRLQSLQTYVTQQLIRAAEIRASANLAATKMSECVLGQSKRVDFCGKGYQLMSFPQSAPHGVVFLNVTYVPAQEKNFTTAPAICNDGKAHFPREGVFVSNGTNWFVTQRNFYEPQIITTDNTFVSGNCDVVIGIVNNTVYDPLQPELDSFKEELDKYFKNHTSPDVDLGDISGINASVVNIQKEIDRLNEVAKNLNESLIDLQELGKYEQYIKGGGSGGGQIYEGKLTAEGLRFGIVASRFNHALVDRLVEGAIDAIVRHGGREEDITLVRVPGSWEIPVAAGELARKEDIDAVIAIGVLIRGATPHFDYIASEVSKGLADLSLELRKPITFGVITADTLEQAIERAGTKHGNKGWEAALSAIEMANLFKSLR

SEQ ID NO: 3895 - protein, 1371 aa, Artificial Sequence
  SARS-CoV-2/Guangdong/20SF028/2020__EPI_ISL_403936 spike protein (1-1211)(K986P_V987P_ H1048Q_H1064N_ H1083N_H1101N) LumSynth construct
MFVFLVLLPLVSSQCVNLTTRTQLPPAYTNSFTRGVYYPDKVFRSSVLYSTQDLFLPFFSNVTWFHAIHVSGTNGTKRFDNPVLPFNDGVYFASTEKSNIIRGWIFGTTLDSKTQSLLIVNNATNVVIKVCEFQFCNDPFLGVYYHKNNKSWMESEFRVYSSANNCTFEYVSQPFLMDLEGKQGNFKNLREFVFKNIDGYFKIYSKHTPINLVRDLPQGFSALEPLVDLPIGINITRFQTLLALHRSYLTPGDSSSGWTAGAAAYYVGYLQPRTFLLKYNENGTITDAVDCALDPLSETKCTLKSFTVEKGIYQTSNFRVQPTESIVRFPNITNLCPFGEVFNATRFASVYAWNRKRISNCVADYSVLYNSASFSTFKCYGVSPTKLNDLCFTNVYADSFVIRGDEVRQIAPGQTGKIADYNYKLPDDFTGCVIAWNSNNLDSKVGGNYNYLYRLFRKSNLKPFERDISTEIYQAGSTPCNGVEGFNCYFPLQSYGFQPTNGVGYQPYRVVVLSFELLHAPATVCGPKKSTNLVKNKCVNFNFNGLTGTGVLTESNKKFLPFQQFGRDIADTTDAVRDPQTLEILDITPCSFGGVSVITPGTNTSNQVAVLYQDVNCTEVPVAIHADQLTPTWRVYSTGSNVFQTRAGCLIGAEHVNNSYECDIPIGAGICASYQTQTNSPRRARSVASQSIIAYTMSLGAENSVAYSNNSIAIPTNFTISVTTEILPVSMTKTSVDCTMYICGDSTECSNLLLQYGSFCTQLNRALTGIAVEQDKNTQEVFAQVKQIYKTPPIKDFGGFNFSQILPDPSKPSKRSFIEDLLFNKVTLADAGFIKQYGDCLGDIAARDLICAQKFNGLTVLPPLLTDEMIAQYTSALLAGTITSGWTFGAGAALQIPFAMQMAYRFNGIGVTQNVLYENQKLIANQFNSAIGKIQDSLSSTASALGKLQDVVNQNAQALNTLVKQLSSNFGAISSVLNDILSRLDPPEAEVQIDRLITGRLQSLQTYVTQQLIRAAEIRASANLAATKMSECVLGQSKRVDFCGKGYQLMSFPQSAPHGVVFLNVTYVPAQEKNFTTAPAICNDGKAHFPREGVFVSNGTNWFVTQRNFYEPQIITTDNTFVSGNCDVVIGIVNNTVYDPLQPELDSFKEELDKYFKNHTSPDVDLGDISGINASVVNIQKEIDRLNEVAKNLNESLIDLQELGKYEQYIKGGGSGGGQIYEGKLTAEGLRFGIVASRFNHALVDRLVEGAIDAIVRHGGREEDITLVRVPGSWEIPVAAGELARKEDIDAVIAIGVLIRGATPHFDYIASEVSKGLADLSLELRKPITFGVITADTLEQAIERAGTKHGNKGWEAALSAIEMANLFKSLR

SEQ ID NO: 3896 - protein, 1371 aa, Artificial Sequence
  SARS-CoV-2/Shenzhen/SZTH-001/2020__EPI_ISL_406592 spike protein (1-1211)(K986P_V987P_ H1048Q_H1064N_ H1083N_H1101N) LumSynth construct
MFVFLVLLPLVSSQCVNLTTRTQLPPAYTNSFTRGVYYPDKVFRSSVLHSTQDLFLPFFSNVTWFHAIHVSGTNGTKRFDNPVLPFNDGVYFASTEKSNIIRGWIFGTTLDSKTQSLLIVNNATNVVIKVCEFQFCNDPFLGVYYHKNNKSWMESEFRVYSSANNCTFEYVSQPFLMDLEGKQGNFKNLREFVFKNIDGYFKIYSKHTPINLVRDLPQGFSALEPLVDLPIGINITRFQTLLALHRSYLTPGDSSSGWTAGAAAYYVGYLQPRTFLLKYNENGTITDAVDCALDPLSETKCTLKSFTVEKGIYQTSNFRVQPTESIVRFPNITNLCPFGEVFNATRFASVYAWNRKRISNCVADYSVLYNSASFSTFKCYGVSPTKLNDLCFTNVYADSFVIRGDEVRQIAPGQTGKIADYNYKLPDDFTGCVIAWNSNNLDSKVGGNYNYLYRLFRKSNLKPFERDISTEIYQAGSTPCNGVEGFNCYFPLQSYGFQPTNGVGYQPYRVVVLSFELLHAPATVCGPKKSTNLVKNKCVNFNFNGLTGTGVLTESNKKFLPFQQFGRDIADTTDAVRDPQTLEILDITPCSFGGVSVITPGTNTSNQVAVLYQDVNCTEVPVAIHADQLTPTWRVYSTGSNVFQTRAGCLIGAEHVNNSYECDIPIGAGICASYQTQTNSPRRARSVASQSIIAYTMSLGAENSVAYSNNSIAIPTNFTISVTTEILPVSMTKTSVDCTMYICGDSTECSNLLLQYGSFCTQLNRALTGIAVEQDKNTQEVFAQVKQIYKTPPIKDFGGFNFSQILPDPSKPSKRSFIEDLLFNKVTLADAGFIKQYGDCLGDIAARDLICAQKFNGLTVLPPLLTDEMIAQYTSALLAGTITSGWTFGAGAALQIPFAMQMAYRFNGIGVTQNVLYENQKLIANQFNSAIGKIQDSLSSTASALGKLQDVVNQNAQALNTLVKQLSSNFGAISSVLNDILSRLDPPEAEVQIDRLITGRLQSLQTYVTQQLIRAAEIRASANLAATKMSECVLGQSKRVDFCGKGYQLMSFPQSAPHGVVFLNVTYVPAQEKNFTTAPAICNDGKAHFPREGVFVSNGTNWFVTQRNFYEPQIITTDNTFVSGNCDVLIGIVNNTVYDPLQPELDSFKEELDKYFKNHTSPDVDLGDISGINASVVNIQKEIDRLNEVAKNLNESLIDLQELGKYEQYIKGGGSGGGQIYEGKLTAEGLRFGIVASRFNHALVDRLVEGAIDAIVRHGGREEDITLVRVPGSWEIPVAAGELARKEDIDAVIAIGVLIRGATPHFDYIASEVSKGLADLSLELRKPITFGVITADTLEQAIERAGTKHGNKGWEAALSAIEMANLFKSLR

SEQ ID NO: 3897 - protein, 1371 aa, Artificial Sequence
  SARS-CoV-2/Shenzhen/SZTH-004/2020__EPI_ISL_406595 spike protein (1-1211)(K986P_V987P_ H1048Q_H1064N_ H1083N_H1101N) LumSynth construct
MFVFLVLLPLVSSQCVNLTTRTQLPPAYTNSFTRGVYYPDKVFRSSVLHSTQDLFLPFFSNVTWFHAIHVSGTNGTKRFDNPVLPFNDGVYFASTEKSNIIRGWIFGTTLDSKTQSLLIVNNATNVVIKVCEFQFCNDPFLGVYYHKNNKSWMESEFRVYSSANNCTFEYVSQPFLMDLEGKQGNFKNLREFVFKNIDGYFKIYSKHTPINLVRDLPQGFSALEPLVDLPIGINITRFQTLLALHRSYLTPGDSSSGWTAGAAAYYVGYLQPRTFLLKYNENGTITDAVDCALDPLSETKCTLKSFTVEKGIYQTSNFRVQPTESIVRFPNITNLCPFGEVFNATRFASVYAWDRKRISNCVAYYSVLYNSASFSTFKCYGVSPTKLNDLCFTNVYADSFVIRGDEVRQIAPGQTGKIADYNYKLPDDFTGCVIAWNSNNLDSKVGGNYNYLYRLFRKSNLKPFERDISTEIYQAGSTPCNGVEGFNCYFPLQSYGFQPTNGVGYQPYRVVVLSFELLHAPATVCGPKKSTNLVKNKCVNFNFNGLTGTGVLTESNKKFLPFQQFGRDIADTTDAVRDPQTLEILDITPCSFGGVSVITPGTNTSNQVAVLYQDVNCTEVPVAIHADQLTPTWRVYSTGSNVFQTRAGCLIGAEHVNNSYECDIPIGAGICASYQTQTNSPRRARSVASQSIIAYTMSLGAENSVAYSNNSIAIPTNFTISVTTEILPVSMTKTSVDCTMYICGDSTECSNLLLQYGSFCTQLNRALTGIAVEQDKNTQEVFAQVKQIYKTPPIKDFGGFNFSQILPDPSKPSKRSFIEDLLFNKVTLADAGFIKQYGDCLGDIAARDLICAQKFNGLTVLPPLLTDEMIAQYTSALLAGTITSGWTFGAGAALQIPFAMQMAYRFNGIGVTQNVLYENQKLIANQFNSAIGKIQDSLSSTASALGKLQDVVNQNAQALNTLVKQLSSNFGAISSVLNDILSRLDPPEAEVQIDRLITGRLQSLQTYVTQQLIRAAEIRASANLAATKMSECVLGQSKRVDFCGKGYQLMSFPQSAPHGVVFLNVTYVPAQEKNFTTAPAICNDGKAHFPREGVFVSNGTNWFVTQRNFYEPQIITTDNTFVSGNCDVVIGIVNNTVYDPLQPELDSFKEELDKYFKNHTSPDVDLGDISGINASVVNIQKEIDRLNEVAKNLNESLIDLQELGKYEQYIKGGGSGGGQIYEGKLTAEGLRFGIVASRFNHALVDRLVEGAIDAIVRHGGREEDITLVRVPGSWEIPVAAGELARKEDIDAVIAIGVLIRGATPHFDYIASEVSKGLADLSLELRKPITFGVITADTLEQAIERAGTKHGNKGWEAALSAIEMANLFKSLR

SEQ ID NO: 3898 - protein, 1371 aa, Artificial Sequence
  SARS-CoV-2/France/IDF0372/2020__EPI_ISL_406596 spike protein (1-1211)(K986P_V987P_ H1048Q_H1064N_ H1083N_H1101N) LumSynth construct
MFVFLVLLPLVSSQCVNLTTRTQLPPAYTNSFTRGVYYPDKVFRSSVLHSTQDLFLPFFSNVTWFHAIHVSGTNGTKRFDNPVLPFNDGVYFASTEKSNIIRGWIFGTTLDSKTQSLLIVNNATNVVIKVCEFQFCNDPFLGVYYHKNNKSWMESEFRVYSSANNCTFEYVSQPFLMDLEGKQGNFKNLREFVFKNIDGYFKIYSKHTPINLVRDLPQGFSALEPLVDLPIGINITRFQTLLALHRSYLTPGDSSSGWTAGAAAYYVGYLQPRTFLLKYNENGTITDAVDCALDPLSETKCTLKSFTVEKGIYQTSNFRVQPTESIVRFPNITNLCPFGEVFNATRFASVYAWNRKRISNCVADYSFLYNSASFSTFKCYGVSPTKLNDLCFTNVYADSFVIRGDEVRQIAPGQTGKIADYNYKLPDDFTGCVIAWNSNNLDSKVGGNYNYLYRLFRKSNLKPFERDISTEIYQAGSTPCNGVEGFNCYFPLQSYGFQPTNGVGYQPYRVVVLSFELLHAPATVCGPKKSTNLVKNKCVNFNFNGLTGTGVLTESNKKFLPFQQFGRDIADTTDAVRDPQTLEILDITPCSFGGVSVITPGTNTSNQVAVLYQDVNCTEVPVAIHADQLTPTWRVYSTGSNVFQTRAGCLIGAEHVNNSYECDIPIGAGICASYQTQTNSPRRARSVASQSIIAYTMSLGAENSVAYSNNSIAIPTNFTISVTTEILPVSMTKTSVDCTMYICGDSTECSNLLLQYGSFCTQLNRALTGIAVEQDKNTQEVFAQVKQIYKTPPIKDFGGFNFSQILPDPSKPSKRSFIEDLLFNKVTLADAGFIKQYGDCLGDIAARDLICAQKFNGLTVLPPLLTDEMIAQYTSALLAGTITSGWTFGAGAALQIPFAMQMAYRFNGIGVTQNVLYENQKLIANQFNSAIGKIQDSLSSTASALGKLQDVVNQNAQALNTLVKQLSSNFGAISSVLNDILSRLDPPEAEVQIDRLITGRLQSLQTYVTQQLIRAAEIRASANLAATKMSECVLGQSKRVDFCGKGYQLMSFPQSAPHGVVFLNVTYVPAQEKNFTTAPAICNDGKAHFPREGVFVSNGTNWFVTQRNFYEPQIITTDNTFVSGNCDVVIGIVNNTVYDPLQPELDSFKEELDKYFKNHTSPDVDLGDISGINASVVNIQKEIDRLNEVAKNLNESLIDLQELGKYEQYIKGGGSGGGQIYEGKLTAEGLRFGIVASRFNHALVDRLVEGAIDAIVRHGGREEDITLVRVPGSWEIPVAAGELARKEDIDAVIAIGVLIRGATPHFDYIASEVSKGLADLSLELRKPITFGVITADTLEQAIERAGTKHGNKGWEAALSAIEMANLFKSLR

SEQ ID NO: 3899 - protein, 1371 aa, Artificial Sequence
  SARS-CoV-2/Australia/VIC01/2020__EPI_ISL_406844 spike protein (1-1211)(K986P_V987P_ H1048Q_H1064N_ H1083N_H1101N) LumSynth construct
MFVFLVLLPLVSSQCVNLTTRTQLPPAYTNSFTRGVYYPDKVFRSSVLHSTQDLFLPFFSNVTWFHAIHVSGTNGTKRFDNPVLPFNDGVYFASTEKSNIIRGWIFGTTLDSKTQSLLIVNNATNVVIKVCEFQFCNDPFLGVYYHKNNKSWMESEFRVYSSANNCTFEYVSQPFLMDLEGKQGNFKNLREFVFKNIDGYFKIYSKHTPINLVRDLPQGFSALEPLVDLPIGINITRFQTLLALHRRYLTPGDSSSGWTAGAAAYYVGYLQPRTFLLKYNENGTITDAVDCALDPLSETKCTLKSFTVEKGIYQTSNFRVQPTESIVRFPNITNLCPFGEVFNATRFASVYAWNRKRISNCVADYSVLYNSASFSTFKCYGVSPTKLNDLCFTNVYADSFVIRGDEVRQIAPGQTGKIADYNYKLPDDFTGCVIAWNSNNLDSKVGGNYNYLYRLFRKSNLKPFERDISTEIYQAGSTPCNGVEGFNCYFPLQSYGFQPTNGVGYQPYRVVVLSFELLHAPATVCGPKKSTNLVKNKCVNFNFNGLTGTGVLTESNKKFLPFQQFGRDIADTTDAVRDPQTLEILDITPCSFGGVSVITPGTNTSNQVAVLYQDVNCTEVPVAIHADQLTPTWRVYSTGSNVFQTRAGCLIGAEHVNNSYECDIPIGAGICASYQTQTNSPRRARSVASQSIIAYTMSLGAENSVAYSNNSIAIPTNFTISVTTEILPVSMTKTSVDCTMYICGDSTECSNLLLQYGSFCTQLNRALTGIAVEQDKNTQEVFAQVKQIYKTPPIKDFGGFNFSQILPDPSKPSKRSFIEDLLFNKVTLADAGFIKQYGDCLGDIAARDLICAQKFNGLTVLPPLLTDEMIAQYTSALLAGTITSGWTFGAGAALQIPFAMQMAYRFNGIGVTQNVLYENQKLIANQFNSAIGKIQDSLSSTASALGKLQDVVNQNAQALNTLVKQLSSNFGAISSVLNDILSRLDPPEAEVQIDRLITGRLQSLQTYVTQQLIRAAEIRASANLAATKMSECVLGQSKRVDFCGKGYQLMSFPQSAPHGVVFLNVTYVPAQEKNFTTAPAICNDGKAHFPREGVFVSNGTNWFVTQRNFYEPQIITTDNTFVSGNCDVVIGIVNNTVYDPLQPELDSFKEELDKYFKNHTSPDVDLGDISGINASVVNIQKEIDRLNEVAKNLNESLIDLQELGKYEQYIKGGGSGGGQIYEGKLTAEGLRFGIVASRFNHALVDRLVEGAIDAIVRHGGREEDITLVRVPGSWEIPVAAGELARKEDIDAVIAIGVLIRGATPHFDYIASEVSKGLADLSLELRKPITFGVITADTLEQAIERAGTKHGNKGWEAALSAIEMANLFKSLR

SEQ ID NO: 3900 - protein, 1371 aa, Artificial Sequence
  SARS-CoV-2/Germany/BavPat1/2020__EPI_ISL_406862 spike protein (1-1211)(K986P_V987P_ H1048Q_H1064N_ H1083N_H1101N) LumSynth construct
MFVFLVLLPLVSSQCVNLTTRTQLPPAYTNSFTRGVYYPDKVFRSSVLHSTQDLFLPFFSNVTWFHAIHVSGTNGTKRFDNPVLPFNDGVYFASTEKSNIIRGWIFGTTLDSKTQSLLIVNNATNVVIKVCEFQFCNDPFLGVYYHKNNKSWMESEFRVYSSANNCTFEYVSQPFLMDLEGKQGNFKNLREFVFKNIDGYFKIYSKHTPINLVRDLPQGFSALEPLVDLPIGINITRFQTLLALHRSYLTPGDSSSGWTAGAAAYYVGYLQPRTFLLKYNENGTITDAVDCALDPLSETKCTLKSFTVEKGIYQTSNFRVQPTESIVRFPNITNLCPFGEVFNATRFASVYAWNRKRISNCVADYSVLYNSASFSTFKCYGVSPTKLNDLCFTNVYADSFVIRGDEVRQIAPGQTGKIADYNYKLPDDFTGCVIAWNSNNLDSKVGGNYNYLYRLFRKSNLKPFERDISTEIYQAGSTPCNGVEGFNCYFPLQSYGFQPTNGVGYQPYRVVVLSFELLHAPATVCGPKKSTNLVKNKCVNFNFNGLTGTGVLTESNKKFLPFQQFGRDIADTTDAVRDPQTLEILDITPCSFGGVSVITPGTNTSNQVAVLYQGVNCTEVPVAIHADQLTPTWRVYSTGSNVFQTRAGCLIGAEHVNNSYECDIPIGAGICASYQTQTNSPRRARSVASQSIIAYTMSLGAENSVAYSNNSIAIPTNFTISVTTEILPVSMTKTSVDCTMYICGDSTECSNLLLQYGSFCTQLNRALTGIAVEQDKNTQEVFAQVKQIYKTPPIKDFGGFNFSQILPDPSKPSKRSFIEDLLFNKVTLADAGFIKQYGDCLGDIAARDLICAQKFNGLTVLPPLLTDEMIAQYTSALLAGTITSGWTFGAGAALQIPFAMQMAYRFNGIGVTQNVLYENQKLIANQFNSAIGKIQDSLSSTASALGKLQDVVNQNAQALNTLVKQLSSNFGAISSVLNDILSRLDPPEAEVQIDRLITGRLQSLQTYVTQQLIRAAEIRASANLAATKMSECVLGQSKRVDFCGKGYQLMSFPQSAPHGVVFLNVTYVPAQEKNFTTAPAICNDGKAHFPREGVFVSNGTNWFVTQRNFYEPQIITTDNTFVSGNCDVVIGIVNNTVYDPLQPELDSFKEELDKYFKNHTSPDVDLGDISGINASVVNIQKEIDRLNEVAKNLNESLIDLQELGKYEQYIKGGGSGGGQIYEGKLTAEGLRFGIVASRFNHALVDRLVEGAIDAIVRHGGREEDITLVRVPGSWEIPVAAGELARKEDIDAVIAIGVLIRGATPHFDYIASEVSKGLADLSLELRKPITFGVITADTLEQAIERAGTKHGNKGWEAALSAIEMANLFKSLR

SEQ ID NO: 3901 - protein, 1371 aa, Artificial Sequence
  SARS-CoV-2/Wuhan/HBCDC-HB-02/2020__EPI_ISL_412978 spike protein (1-1211)(K986P_V987P_ H1048Q_H1064N_ H1083N_H1101N) LumSynth construct
MFVFLVLLPLVSSQCVNLTTRTQLPPAYTNSFTRGVYYPDKVFRSSVLHSTQDLFLPFFSNVTWFHAIHVSGTNGTKRFDNPVLPFNDGVYFASTEKSNIIRGWIFGTTLDSKTQSLLIVNNATNVVIKVCEFQFCNDPFLGVYYHKNNKSWMESEFRVYSSANNCTFEYVSQPFLMDLEGKQGNFKNLREFVFKNIDGYFKIYSKHTPINLVRDLPQGFSALEPLVDLPIGINITRFQTLLALHRSYLTPGDSSSGWTAGAAAYYVGYLQPRTFLLKYNENGTITDAVDCALDPLSETKCTLKSFTVEKGIYQTSNFRVQPTESIVRFPNITNLCPFGEVFNATRFASVYAWNRKRISNCVADYSVLYNSASFSTFKCYGVSPTKLNDLCFTNVYADSFVIRGDEVRQIAPGQTGKIADYNYKLPDDFTGCVIAWNSNNLDSKVGGNYNYLYRLFRKSNLKPFERDISTEIYQAGSTPCNGVEGFNCYFPLQSYGFQPTNGVGYQPYRVVVLSFELLHAPATVCGPKKSTNLVKNKCVNFNFNGLTGTGVLTESNKKFLPFQQFGRDIADTTDAVRDPQTLEILDITPCSFGGVSVITPGTNTSNQVAVLYQDVNCTEVPVAIHADQLTPTWRVYSTGSNVFQTRAGCLIGAEHVNNSYECDIPIGAGICASYQTQTNSPRRARSVASQSIIAYTMSLGAENSVAYSNNSIAIPTNFTISVTTEILPVSMTKTSVDCTMYICGDSTECSNFLLQYGSFCTQLNRALTGIAVEQDKNTQEVFAQVKQIYKTPPIKDFGGFNFSQILPDPSKPSKRSFIEDLLFNKVTLADAGFIKQYGDCLGDIAARDLICAQKFNGLTVLPPLLTDEMIAQYTSALLAGTITSGWTFGAGAALQIPFAMQMAYRFNGIGVTQNVLYENQKLIANQFNSAIGKIQDSLSSTASALGKLQDVVNQNAQALNTLVKQLSSNFGAISSVLNDILSRLDPPEAEVQIDRLITGRLQSLQTYVTQQLIRAAEIRASANLAATKMSECVLGQSKRVDFCGKGYQLMSFPQSAPHGVVFLNVTYVPAQEKNFTTAPAICNDGKAHFPREGVFVSNGTNWFVTQRNFYEPQIITTDNTFVSGNCDVVIGIVNNTVYDPLQPELDSFKEELDKYFKNHTSPDVDLGDISGINASVVNIQKEIDRLNEVAKNLNESLIDLQELGKYEQYIKGGGSGGGQIYEGKLTAEGLRFGIVASRFNHALVDRLVEGAIDAIVRHGGREEDITLVRVPGSWEIPVAAGELARKEDIDAVIAIGVLIRGATPHFDYIASEVSKGLADLSLELRKPITFGVITADTLEQAIERAGTKHGNKGWEAALSAIEMANLFKSLR

SEQ ID NO: 3902 - protein, 1371 aa, Artificial Sequence
  SARS-CoV-2/Australia/QLD02/2020__EPI_ISL_407896 spike protein (1-1211)(K986P_V987P_ H1048Q_H1064N_ H1083N_H1101N) LumSynth construct
MFVFLVLLPLVSSQCVNLTTRTQLPPAYTNSFTRGVYYPDKVFRSSVLHSTQDLFLPFFSNVTWFHAIHVSGTNGTKRFDNPVLPFNDGVYFASTEKSNIIRGWIFGTTLDSKTQSLLIVNNATNVVIKVCEFQFCNDPFLGVYYHKNNKSWMESEFRVYSSANNCTFEYVSQPFLMDLEGKQGNFKNLREFVFKNIDGYFKIYSKHTPINLVRDLPQGFSALEPLVDLPIGINITRFQTLLALHRSYLTPGDSSSGWTAGAAAYYVGYLQPRTFLLKYNENGTITDAVDCALDPLSETKCTLKSFTVEKGIYQTSNFRVQPTESIVRFPNITNLCPFGEVFNATRFASVYAWNRKRISNCVADYSVLYNSASFSTFKCYGVSPTKLNDLCFTNVYADSFVIRGDEVRQIAPGQTGKIADYNYKLPDDFTGCVIAWNSNNLDSKVGGNYNYLYRLFRKSNLKPFERDISTEIYQAGSTPCNGVEGFNCYFPLQSYGFQPTNGVGYQPYRVVVLSFELLHAPATVCGPKKSTNLVKNKCVNFNFNGLTGTGVLTESNKKFLPFQQFGRDIADTTDAVRDPQTLEILDITPCSFGGVSVITPGTNTSNQVAVLYQDVNCTEVPVAIHADQLTPTWRVYSTGSNVFQTRAGCLIGAEHVNNSYECDIPIGAGICASYQTQTNSPRRARSVASQSIIAYTMSLGAENSVAYSNNSIAIPTNFTISVTTEILPVSMTKTSVDCTMYICGDSTECSNLLLQYGSFCTQLNRALTGIAVEQDKNTQEVFAQVKQIYKTPPIKDFGGFNFSQILPDPSKPSKRSFIEDLLFNKVTLADAGFIKQYGDCLGDIAARDLICAQKFNGLTVLPPLLTDEMIAQYTSALLAGTITSGWTFGAGAALQIPFAMQMAYRFNGIGVTQNVLYENQKLIANQFNSAIGKIQDSLSSTASALGKLQDVVNQNAQALNTLVKQLSSNFGAISSVLNDILSRLDPPEAEVQIDRLITGRLQSLQTYVTQQLIRAAEIRASANLAATKMSECVLGQSKRVDFCGKGYQLMSFPQSAPHGVVFLNVTYVPAQEKNFTTAPAICNDGKAHFPREGVFVSNGTNWFVTQRNFYEPQIITTDNTFVSGNCDVVIGIVNNTVYDPLQLELDSFKEELDKYFKNHTSPDVDLGDISGINASVVNIQKEIDRLNEVAKNLNESLIDLQELGKYEQYIKGGGSGGGQIYEGKLTAEGLRFGIVASRFNHALVDRLVEGAIDAIVRHGGREEDITLVRVPGSWEIPVAAGELARKEDIDAVIAIGVLIRGATPHFDYIASEVSKGLADLSLELRKPITFGVITADTLEQAIERAGTKHGNKGWEAALSAIEMANLFKSLR

SEQ ID NO: 3903 - protein, 1371 aa, Artificial Sequence
  SARS-CoV-2/India/1-31/2020__EPI_ISL_413523 spike protein (1-1211)(K986P_V987P_ H1048Q_H1064N_ H1083N_H1101N) LumSynth construct
MFVFLVLLPLVSSQCVNLTTRTQLPPAYTNSFTRGVYYPDKVFRSSVLHSTQDLFLPFFSNVTWFHAIHVSGTNGTKRFDNPVLPFNDGVYFASTEKSNIIRGWIFGTTLDSKTQSLLIVNNATNVVIKVCEFQFCNDPFLGVYYHKNNKSWMESEFRVYSSANNCTFEYVSQPFLMDLEGKQGNFKNLREFVFKNIDGYFKIYSKHTPINLVRDLPQGFSALEPLVDLPIGINITRFQTLLALHRSYLTPGDSSSGWTAGAAAYYVGYLQPRTFLLKYNENGTITDAVDCALDPLSETKCTLKSFTVEKGIYQTSNFRVQPTESIVRFPNITNLCPFGEVFNATRFASVYAWNRKRISNCVADYSVLYNSASFSTFKCYGVSPTKLNDLCFTNVYADSFVIRGDEVRQIAPGQTGKIADYNYKLPDDFTGCVIAWNSNNLDSKVGGNYNYLYRLFRKSNLKPFERDISTEIYQAGSTPCNGVEGFNCYFPLQSYGFQPTNGVGYQPYRVVVLSFELLHAPATVCGPKKSTNLVKNKCVNFNFNGLTGTGVLTESNKKFLPFQQFGRDIADTTDAVRDPQTLEILDITPCSFGGVSVITPGTNTSNQVAVLYQDVNCTEVPVAIHADQLTPTWRVYSTGSNVFQTRAGCLIGAEHVNNSYECDIPIGAGICASYQTQTNSPRRARSVASQSIIAYTMSLGAENSVAYSNNSIAIPTNFTISVTTEILPVSMTKTSVDCTMYICGDSTECSNLLLQYGSFCTQLNRALTGIAVEQDKNTQEVFAQVKQIYKTPPIKDFGGFNFSQILPDPSKPSKRSFIEDLLFNKVTLADAGFIKQYGDCLGDIAARDLICAQKFNGLTVLPPLLTDEMIAQYTSALLAGTITSGWTFGAGAALQIPFAMQMAYRFNGIGVTQNVLYENQKLIANQFNSVIGKIQDSLSSTASALGKLQDVVNQNAQALNTLVKQLSSNFGAISSVLNDILSRLDPPEAEVQIDRLITGRLQSLQTYVTQQLIRAAEIRASANLAATKMSECVLGQSKRVDFCGKGYQLMSFPQSAPHGVVFLNVTYVPAQEKNFTTAPAICNDGKAHFPREGVFVSNGTNWFVTQRNFYEPQIITTDNTFVSGNCDVVIGIVNNTVYDPLQPELDSFKEELDKYFKNHTSPDVDLGDISGINASVVNIQKEIDRLNEVAKNLNESLIDLQELGKYEQYIKGGGSGGGQIYEGKLTAEGLRFGIVASRFNHALVDRLVEGAIDAIVRHGGREEDITLVRVPGSWEIPVAAGELARKEDIDAVIAIGVLIRGATPHFDYIASEVSKGLADLSLELRKPITFGVITADTLEQAIERAGTKHGNKGWEAALSAIEMANLFKSLR

SEQ ID NO: 3904 - protein, 1371 aa, Artificial Sequence
  SARS-CoV-2/Guangdong/GD2020087-P0008/2020__EPI_ISL_413863 spike protein (1-1211)(K986P_V987P_ H1048Q_H1064N_ H1083N_H1101N) LumSynth construct
MFVFLVLLPLVSSQCVNLTTRTQLPPAYTNSFTRGVYYPDKVFRSSVLHSTQDLFLPFFSNVTWFHAIHVSGTNGTKRFDNPVLPFNDGVYFASTEKSNIIRGWIFGTTLDSKTQSLLIVNNATNVVIKVCEFQFCNDPFLGVYYHKNNKSWMESEFRVYSSANNCTFEYVSQPFLMDLEGKQGNFKNLREFVFKNIDGYFKIYSKHTPINLVRDLPQGFSALEPLVDLPIGINITRFQTLLALHRSYLTPGDSSSGWTAGAAAYYVGYLQPRTFLLKYNENGTITDAVDCALDPLSETKCTLKSFTVEKGIYQTSNFRVQPTESIVRFPNITNLCPFGEVFNATRFASVYAWNRKRISNCVADYSVLYNSASFSTFKCYGVSPTKLNDLCFTNVYADSFVIRGDEVREIAPGQTGKIADYNYKLPDDFTGCVIAWNSNNLDSKVGGNYNYLYRLFRKSNLKPFERDISTEIYQAGSTPCNGVEGFNCYFPLQSYGFQPTNGVGYQPYRVVVLSFELLHAPATVCGPKKSTNLVKNKCVNFNFNGLTGTGVLTESNKKFLPFQQFGRDIADTTDAVRDPQTLEILDITPCSFGGVSVITPGTNTSNQVAVLYQDVNCTEVPVAIHADQLTPTWRVYSTGSNVFQTRAGCLIGAEHVNNSYECDIPIGAGICASYQTQTNSPRRARSVASQSIIAYTMSLGAENSVAYSNNSIAIPTNFTISVTTEILPVSMTKTSVDCTMYICGDSTECSNLLLQYGSFCTQLNRALTGIAVEQDKNTQEVFAQVKQIYKTPPIKDFGGFNFSQILPDPSKPSKRSFIEDLLFNKVTLADAGFIKQYGDCLGDIAARDLICAQKFNGLTVLPPLLTDEMIAQYTSALLAGTITSGWTFGAGAALQIPFAMQMAYRFNGIGVTQNVLYENQKLIANQFNSAIGKIQDSLSSTASALGKLQDVVNQNAQALNTLVKQLSSNFGAISSVLNDILSRLDPPEAEVQIDRLITGRLQSLQTYVTQQLIRAAEIRASANLAATKMSECVLGQSKRVDFCGKGYQLMSFPQSAPHGVVFLNVTYVPAQEKNFTTAPAICNDGKAHFPREGVFVSNGTNWFVTQRNFYEPQIITTDNTFVSGNCDVVIGIVNNTVYDPLQPELDSFKEELDKYFKNHTSPDVDLGDISGINASVVNIQKEIDRLNEVAKNLNESLIDLQELGKYEQYIKGGGSGGGQIYEGKLTAEGLRFGIVASRFNHALVDRLVEGAIDAIVRHGGREEDITLVRVPGSWEIPVAAGELARKEDIDAVIAIGVLIRGATPHFDYIASEVSKGLADLSLELRKPITFGVITADTLEQAIERAGTKHGNKGWEAALSAIEMANLFKSLR

SEQ ID NO: 3905 - protein, 1371 aa, Artificial Sequence
  SARS-CoV-2/Sweden/01/2020__EPI_ISL_411951 spike protein (1-1211)(K986P_V987P_ H1048Q_H1064N_ H1083N_H1101N) LumSynth construct
MFVFLVLLPLVSSQCVNLTTRTQLPPAYTNSFTRGVYYPDKVFRSSVLHSTQDLFLPFFSNVTWFHAIHVSGTNGTKRFDNPVLPFNDGVYFASTEKSNIIRGWIFGTTLDSKTQSLLIVNNATNVVIKVCEFQFCNDPFLGVYYHKNNKSWMESEFRVYSSANNCTFEYVSQPFLMDLEGKQGNFKNLREFVFKNIDGYFKIYSKHTPINLVRDLPQGFSALEPLVDLPIGINITRFQTLLALHRSYLTPGDSSSGWTAGAAAYYVGYLQPRTFLLKYNENGTITDAVDCALDPLSETKCTLKSFTVEKGIYQTSNFRVQPTESIVRFPNITNLCPFGEVFNATRFASVYAWNRKRISNCVADYSVLYNSASFSTFKCYGVSPTKLNDLCFTNVYADSFVIRGDEVRQIAPGQTGKIADYNYKLPDDFTGCVIAWNSNNLDSKVGGNYNYLYRLFRKSNLKPFERDISTEIYQAGSTPCNGVEGFNCYFPLQSYGFQPTNGVGYQPYRVVVLSFELLHAPATVCGPKKSTNLVKNKCVNFNFNGLTGTGVLTESNKKFLPFQQFGRDIADTTDAVRDPQTLEILDITPCSFGGVSVITPGTNTSNQVAVLYQDVNCTEVPVAIHADQLTPTWRVYSTGSNVFQTRAGCLIGAEHVNNSYECDIPIGAGICASYQTQTNSPRRARSVASQSIIAYTMSLGAENSVAYSNNSIAIPTNFTISVTTEILPVSMTKTSVDCTMYICGDSTECSNLLLQYGSFCTQLNRALTGIAVEQDKNTQEVFAQVKQIYKTPPIKDCGGFNFSQILPDPSKPSKRSFIEDLLFNKVTLADAGFIKQYGDCLGDIAARDLICAQKFNGLTVLPPLLTDEMIAQYTSALLAGTITSGWTFGAGAALQIPFAMQMAYRFNGIGVTQNVLYENQKLIANQFNSAIGKIQDSLSSTASALGKLQDVVNQNAQALNTLVKQLSSNFGAISSVLNDILSRLDPPEAEVQIDRLITGRLQSLQTYVTQQLIRAAEIRASANLAATKMSECVLGQSKRVDFCGKGYQLMSFPQSAPHGVVFLNVTYVPAQEKNFTTAPAICNDGKAHFPREGVFVSNGTNWFVTQRNFYEPQIITTDNTFVSGNCDVVIGIVNNTVYDPLQPELDSFKEELDKYFKNHTSPDVDLGDISGINASVVNIQKEIDRLNEVAKNLNESLIDLQELGKYEQYIKGGGSGGGQIYEGKLTAEGLRFGIVASRFNHALVDRLVEGAIDAIVRHGGREEDITLVRVPGSWEIPVAAGELARKEDIDAVIAIGVLIRGATPHFDYIASEVSKGLADLSLELRKPITFGVITADTLEQAIERAGTKHGNKGWEAALSAIEMANLFKSLR

SEQ ID NO: 3906 - protein, 1371 aa, Artificial Sequence
  SARS-CoV-2/Tianmen/HBCDC-HB-07/2020__EPI_ISL_412983 spike protein (1-1211)(K986P_V987P_ H1048Q_H1064N_ H1083N_H1101N) LumSynth construct
MFVFLVLLPLVSSQCVNLTTRTQLPPAYTNSFTRGVYYPDKVFRSSVLHSTQDLFLPFFSNVTWFHAIHVSGTNGTKRFDNPVLPFNDGVYFASTEKSNIIRGWIFGTTLDSKTQSLLIVNNATNVVIKVCEFQFCNDPFLGVYYHKNNKSWMESEFRVYSSANNCTFEYVSQPFLMDLEGKQGNFKNLREFVFKNIDGYFKIYSKHTPINLVRDLPQGFSALEPLVDLPIGINITRFQTLLALHRSYLTPGDSSSGWTAGAAAYYVGYLQPRTFLLKYNENGTITDAVDCALDPLSETKCTLKSFTVEKGIYQTSNFRVQPTESIVRFPNITNLCPFGEVFNATRFASVYAWNRKRISNCVADYSVLYNSASFSTFKCYGVSPTKLNDLCFTNVYADSFVIRGDEVRQIAPGQTGKIADYNYKLPDDFTGCVIAWNSNNLDSKVGGNYNYLYRLFRKSNLKPFERDISTEIYQAGSTPCNGVEGFNCYFPLQSYGFQPTNGVGYQPYRVVVLSFELLHAPATVCGPKKSTNLVKNKCVNFNFNGLTGTGVLTESNKKFLPFQQFGRDIADTTDAVRDPQTLEILDITPCSFGGVSVITPGTNTSNQVAVLYQDLNCTEVPVAIHADQLTPTWRVYSTGSNVFQTRAGCLIGAEHVNNSYECDIPIGAGICASYQTQTNSPRRARSVASQSIIAYTMSLGAENSVAYSNNSIAIPTNFTISVTTEILPVSMTKTSVDCTMYICGDSTECSNLLLQYGSFCTQLNRALTGIAVEQDKNTQEVFAQVKQIYKTPPIKDFGGFNFSQILPDPSKPSKRSFIEDLLFNKVTLADAGFIKQYGDCLGDIAARDLICAQKFNGLTVLPPLLTDEMIAQYTSALLAGTITSGWTFGAGAALQIPFAMQMAYRFNGIGVTQNVLYENQKLIANQFNSAIGKIQDSLSSTASALGKLQDVVNQNAQALNTLVKQLSSNFGAISSVLNDILSRLDPPEAEVQIDRLITGRLQSLQTYVTQQLIRAAEIRASANLAATKMSECVLGQSKRVDFCGKGYQLMSFPQSAPHGVVFLNVTYVPAQEKNFTTAPAICNDGKAHFPREGVFVSNGTNWFVTQRNFYEPQIITTDNTFVSGNCDVVIGIVNNTVYDPLQPELDSFKEELDKYFKNHTSPDVDLGDISGINASVVNIQKEIDRLNEVAKNLNESLIDLQELGKYEQYIKGGGSGGGQIYEGKLTAEGLRFGIVASRFNHALVDRLVEGAIDAIVRHGGREEDITLVRVPGSWEIPVAAGELARKEDIDAVIAIGVLIRGATPHFDYIASEVSKGLADLSLELRKPITFGVITADTLEQAIERAGTKHGNKGWEAALSAIEMANLFKSLR

SEQ ID NO: 3907 - protein, 1371 aa, Artificial Sequence
  SARS-CoV-2/Hong Kong/case42_VM20002493/2020__EPI_ISL_414527 spike protein (1-1211)(K986P_V987P_ H1048Q_H1064N_ H1083N_H1101N) LumSynth construct
MFVFLVLLPLVSSQCVNLTTRTQLPPAYTNSFTRGVYYPDKVFRSSVLHSTQDLFLPFFSNVTWFHAIHVSGTNGTKRFDNPVLPFNDGVYFASTEKSNIIRGWIFGTTLDSKTQSLLIVNNATNVVIKVCEFQFCNDPFLGVYYHKNNKSWMESEFRVYSSANNCTFEYVSQPFLMDLEGKQGNFKNLREFVFKNIDGYFKIYSKHTPINLVRDLPQGFSALEPLVDLPIGINITRFQTLLALHRSYLTPGDSSSGWTAGAAAYYVGYLQPRTFLLKYNENGTITDAVDCALDPLSETKCTLKSFTVEKGIYQTSNFRVQPTESIVRFPNITNLCPFGEVFNATRFASVYAWNRKRISNCVADYSVLYNSASFSTFKCYGVSPTKLNDLCFTNVYADSFVIRGDEVRQIAPGQTGKIADYNYKLPDDFTGCVIAWNSNNLDSKVGGNYNYLYRLFRKSNLKPFERDISTEIYQAGSTPCNGVEGFNCYFPLQSYGFQPTNGVGYQPYRVVVLSFELLHAPATVCGPKKSTNLVKNKCVNFNFNGLTGTGVLTESNKKFLPFQQFGRDIADTTDAVRDPQTLEILDITPCSFGGVSVITPGTNTSNQVAVLYQDVNCTEVPVAIHADQLTPTWRVYSTGSNVFQTRAGCLIGAEHVNNSYECDIPIGAGICASYQTQTNSPRRARSVASQSIIAYTMSLGAENSVAYSNNSIAIPTNFAISVTTEILPVSMTKTSVDCTMYICGDSTECSNLLLQYGSFCTQLNRALTGIAVEQDKNTQEVFAQVKQIYKTPPIKDFGGFNFSQILPDPSKPSKRSFIEDLLFNKVTLADAGFIKQYGDCLGDIAARDLICAQKFNGLTVLPPLLTDEMIAQYTSALLAGTITSGWTFGAGAALQIPFAMQMAYRFNGIGVTQNVLYENQKLIANQFNSAIGKIQDSLSSTASALGKLQDVVNQNAQALNTLVKQLSSNFGAISSVLNDILSRLDPPEAEVQIDRLITGRLQSLQTYVTQQLIRAAEIRASANLAATKMSECVLGQSKRVDFCGKGYQLMSFPQSAPHGVVFLNVTYVPAQEKNFTTAPAICNDGKAHFPREGVFVSNGTNWFVTQRNFYEPQIITTDNTFVSGNCDVVIGIVNNTVYDPLQPELDSFKEELDKYFKNHTSPDVDLGDISGINASVVNIQKEIDRLNEVAKNLNESLIDLQELGKYEQYIKGGGSGGGQIYEGKLTAEGLRFGIVASRFNHALVDRLVEGAIDAIVRHGGREEDITLVRVPGSWEIPVAAGELARKEDIDAVIAIGVLIRGATPHFDYIASEVSKGLADLSLELRKPITFGVITADTLEQAIERAGTKHGNKGWEAALSAIEMANLFKSLR

SEQ ID NO: 3908 - protein, 1371 aa, Artificial Sequence
  SARS-CoV-2/USA/CruiseA-23/2020__EPI_ISL_414482 spike protein (1-1211)(K986P_V987P_ H1048Q_H1064N_ H1083N_H1101N) LumSynth construct
MFVFLVLLPLVSSQCVNLTTRTQLPPAYTNSFTRGVYYPDKVFRSSVLHSTQDLFLPFFSNVTWFHAIHVSGTNGTKRFDNPVLPFNDGVYFASTEKSNIIRGWIFGTTLDSKTQSLLIVNNATNVVIKVCEFQFCNDPFLGVYYHKNNKSWMESEFRVYSSANNCTFEYVSQPFLMDLEVKQGNFKNLREFVFKNIDGYFKIYSKHTPINLVRDLPQGFSALEPLVDLPIGINITRFQTLLALHRSYLTPGDSSSGWTAGAAAYYVGYLQPRTFLLKYNENGTITDAVDCALDPLSETKCTLKSFTVEKGIYQTSNFRVQPTESIVRFPNITNLCPFGEVFNATRFASVYAWNRKRISNCVADYSVLYNSASFSTFKCYGVSPTKLNDLCFTNVYADSFVIRGDEVRQIAPGQTGKIADYNYKLPDDFTGCVIAWNSNNLDSKVGGNYNYLYRLFRKSNLKPFERDISTEIYQAGSTPCNGVEGFNCYFPLQSYGFQPTNGVGYQPYRVVVLSFELLHAPATVCGPKKSTNLVKNKCVNFNFNGLTGTGVLTESNKKFLPFQQFGRDIADTTDAVRDPQTLEILDITPCSFGGVSVITPGTNTSNQVAVLYQDVNCTEVPVAIHADQLTPTWRVYSTGSNVFQTRAGCLIGAEHVNNSYECDIPIGAGICASYQTQTNSPRRARSVASQSIIAYTMSLGAENSVAYSNNSIAIPTNFTISVTTEILPVSMTKTSVDCTMYICGDSTECSNLLLQYGSFCTQLNRALTGIAVEQDKNTQEVFAQVKQIYKTPPIKDFGGFNFSQILPDPSKPSKRSFIEDLLFNKVTLADAGFIKQYGDCLGDIAARDLICAQKFNGLTVLPPLLTDEMIAQYTSALLAGTITSGWTFGAGAALQIPFAMQMAYRFNGIGVTQNVLYENQKLIANQFNSAIGKIQDSLSSTASALGKLQDVVNQNAQALNTLVKQLSSNFGAISSVLNDILSRLDPPEAEVQIDRLITGRLQSLQTYVTQQLIRAAEIRASANLAATKMSECVLGQSKRVDFCGKGYQLMSFPQSAPHGVVFLNVTYVPAQEKNFTTAPAICNDGKAHFPREGVFVSNGTNWFVTQRNFYEPQIITTDNTFVSGNCDVVIGIVNNTVYDPLQPELDSFKEELDKYFKNHTSPDVDLGDISGINASVVNIQKEIDRLNEVAKNLNESLIDLQELGKYEQYIKGGGSGGGQIYEGKLTAEGLRFGIVASRFNHALVDRLVEGAIDAIVRHGGREEDITLVRVPGSWEIPVAAGELARKEDIDAVIAIGVLIRGATPHFDYIASEVSKGLADLSLELRKPITFGVITADTLEQAIERAGTKHGNKGWEAALSAIEMANLFKSLR

SEQ ID NO: 3909 - protein, 1371 aa, Artificial Sequence
  SARS-CoV-2/Hong Kong/case85_VM20002868/2020__EPI_ISL_414519 spike protein (1-1211)(K986P_V987P_ H1048Q_H1064N_ H1083N_H1101N) LumSynth construct
MFVFLVLVPLVSSQCVNLTTRTQLPPAYTNSFTRGVYYPDKVFRSSVLHSTQDLFLPFFSNVTWFHAIHVSGTNGTKRFDNPVLPFNDGVYFASTEKSNIIRGWIFGTTLDSKTQSLLIVNNATNVVIKVCEFQFCNDPFLGVYYHKNNKSWMESEFRVYSSANNCTFEYVSQPFLMDLEGKQGNFKNLREFVFKNIDGYFKIYSKHTPINLVRDLPQGFSALEPLVDLPIGINITRFQTLLALHRSYLTPGDSSSGWTAGAAAYYVGYLQPRTFLLKYNENGTITDAVDCALDPLSETKCTLKSFTVEKGIYQTSNFRVQPTESIVRFPNITNLCPFGEVFNATRFASVYAWNRKRISNCVADYSVLYNSASFSTFKCYGVSPTKLNDLCFTNVYADSFVIRGDEVRQIAPGQTGKIADYNYKLPDDFTGCVIAWNSNNLDSKVGGNYNYLYRLFRKSNLKPFERDISTEIYQAGSTPCNGVEGFNCYFPLQSYGFQPTNGVGYQPYRVVVLSFELLHAPATVCGPKKSTNLVKNKCVNFNFNGLTGTGVLTESNKKFLPFQQFGRDIADTTDAVRDPQTLEILDITPCSFGGVSVITPGTNTSNQVAVLYQDVNCTEVPVAIHADQLTPTWRVYSTGSNVFQTRAGCLIGAEHVNNSYECDIPIGAGICASYQTQTNSPRRARSVASQSIIAYTMSLGAENSVAYSNNSIAIPTNFTISVTTEILPVSMTKTSVDCTMYICGDSTECSNLLLQYGSFCTQLNRALTGIAVEQDKNTQEVFAQVKQIYKTPPIKDFGGFNFSQILPDPSKPSKRSFIEDLLFNKVTLADAGFIKQYGDCLGDIAARDLICAQKFNGLTVLPPLLTDEMIAQYTSALLAGTITSGWTFGAGAALQIPFAMQMAYRFNGIGVTQNVLYENQKLIANQFNSAIGKIQDSLSSTASALGKLQDVVNQNAQALNTLVKQLSSNFGAISSVLNDILSRLDPPEAEVQIDRLITGRLQSLQTYVTQQLIRAAEIRASANLAATKMSECVLGQSKRVDFCGKGYQLMSFPQSAPHGVVFLNVTYVPAQEKNFTTAPAICNDGKAHFPREGVFVSNGTNWFVTQRNFYEPQIITTDNTFVSGNCDVVIGIVNNTVYDPLQPELDSFKEELDKYFKNHTSPDVDLGDISGINASVVNIQKEIDRLNEVAKNLNESLIDLQELGKYEQYIKGGGSGGGQIYEGKLTAEGLRFGIVASRFNHALVDRLVEGAIDAIVRHGGREEDITLVRVPGSWEIPVAAGELARKEDIDAVIAIGVLIRGATPHFDYIASEVSKGLADLSLELRKPITFGVITADTLEQAIERAGTKHGNKGWEAALSAIEMANLFKSLR

SEQ ID NO: 3910 - protein, 1371 aa, Artificial Sequence; identical to SEQ ID NO: 3900
  SARS-CoV-2/England/200990660/2020__EPI_ISL_414523 spike protein (1-1211)(K986P_V987P_ H1048Q_H1064N_ H1083N_H1101N) LumSynth construct

SEQ ID NO: 3911 - protein, 1371 aa, Artificial Sequence
  SARS-CoV-2/Australia/NSW09/2020__EPI_ISL_413595 spike protein (1-1211)(K986P_V987P_ H1048Q_H1064N_ H1083N_H1101N) LumSynth construct
MFVFLVLLPLVSSQCVNLTTRTQLPPAYTNSFTRGVYYPDKVFRSSVLHSTQDLFLPFFSNVTWFHAIHVSGTNGTKRFDNPVLPFNDGVYFASTEKSNIIRGWIFGTTLDSKTQSLLIVNNATNVVIKVCEFQFCNDPFLGVYYHKNNKSWMESEFRVYSSANNCTFEYVSQPFLMDLEGKQGNFKNLREFVFKNIDGYFKIYSKHTPINLVRDLPQGFSALEPLVDLPIGINITRFQTLLALHRSYLTPGDSSSGWTAGAAAYYVGYLQPRTFLLKYNENGTITDAVDCALDPLSETKCTLKSFTVEKGIYQTSNFRVQPTESIVRFPNITNLCPFGEVFNATRFASVYAWNRKRISNCVADYSVLYNSASFSTFKCYGVSPTKLNDLCFTNVYADSFVIRGDEVRQIAPGQTGKIADYNYKLPDDFTGCVIAWNSNNLDSKVGGNYNYLYRLFRKSNLKPFERDISTEIYQAGSTPCNGVEGFNCYFPLQSYGFQPTNGVGYQPYRVVVLSFELLHAPATVCGPKKSTNLVKNKCVNFNFNGLTGTGVLTESNKKFLPFQQFGRDIADTTDAVRDPQTLEILDITPCSFGGVSVITPGTNTSNQVAVLYQDVNCTEVPVAIHADQLTPTWRVYSTGSNVFQTRAGCLIGAEHVNNSYECDIPIGAGICASYQTQTNSPRRARSVASQSIIAYTMSLGAENSVAYSNNSIAIPTNFTISVTTEILPVSMTKTSVDCTMYICGDSTECSNLLLQYGSFCTQLNRALTGIAVEQDKNTQEVFAQVKQIYKTPPIKDFGGFNFSQILPDPSKPSKRSFIEDLLFNKVTLADAGFIKQYGDCLGDIAARDLICAQKFNGLTVLPPLLTDEMIAQYTSALLAGTITSGWTFGAGAALQIPFAMQMAYRFNGIGVTQNVLYENQKLIANQFNSAIGKIQDSLSFTASALGKLQDVVNQNAQALNTLVKQLSSNFGAISSVLNDILSRLDPPEAEVQIDRLITGRLQSLQTYVTQQLIRAAEIRASANLAATKMSECVLGQSKRVDFCGKGYQLMSFPQSAPHGVVFLNVTYVPAQEKNFTTAPAICNDGKAHFPREGVFVSNGTNWFVTQRNFYEPQIITTDNTFVSGNCDVVIGIVNNTVYDPLQPELDSFKEELDKYFKNHTSPDVDLGDISGINASVVNIQKEIDRLNEVAKNLNESLIDLQELGKYEQYIKGGGSGGGQIYEGKLTAEGLRFGIVASRFNHALVDRLVEGAIDAIVRHGGREEDITLVRVPGSWEIPVAAGELARKEDIDAVIAIGVLIRGATPHFDYIASEVSKGLADLSLELRKPITFGVITADTLEQAIERAGTKHGNKGWEAALSAIEMANLFKSLR

SEQ ID NO: 3912 - protein, 1371 aa, Artificial Sequence; identical to SEQ ID NO: 3892
  SARS-CoV-2/Australia/NSW10/2020__EPI_ISL_413596 spike protein (1-1211)(K986P_V987P_ H1048Q_H1064N_ H1083N_H1101N) LumSynth construct

SEQ ID NO: 3913 - protein, 1371 aa, Artificial Sequence
  SARS-CoV-2/Switzerland/1000477797/2020__EPI_ISL_413023 spike protein (1-1211)(K986P_V987P_ H1048Q_H1064N_ H1083N_H1101N) LumSynth construct
MFVFLVLLPLVSSQCVNLTTRTQLPPAYTNSFTRGVYYPDKVFRSSVLHSTQDLFLPFFSNVTWFHAIHVSGTNGTKRFDNPVLPFNDGVYFASTEKSNIIRGWIFGTTLDSKTQSLLIVNNATNVVIKVCEFQFCNDPFLGVYYHKNNKSWMESEFRVYSSANNCTFEYVSQPFLMDLEGKQGNFKNLREFVFKNIDGYFNIYSKHTPINLVRDLPQGFSALEPLVDLPIGINITRFQTLLALHRSYLTPGDSSSGWTAGAAAYYVGYLQPRTFLLKYNENGTITDAVDCALDPLSETKCTLKSFTVEKGIYQTSNFRVQPTESIVRFPNITNLCPFGEVFNATRFASVYAWNRKRISNCVADYSVLYNSASFSTFKCYGVSPTKLNDLCFTNVYADSFVIRGDEVRQIAPGQTGKIADYNYKLPDDFTGCVIAWNSNNLDSKVGGNYNYLYRLFRKSNLKPFERDISTEIYQAGSTPCNGVEGFNCYFPLQSYGFQPTNGVGYQPYRVVVLSFELLHAPATVCGPKKSTNLVKNKCVNFNFNGLTGTGVLTESNKKFLPFQQFGRDIADTTDAVRDPQTLEILDITPCSFGGVSVITPGTNTSNQVAVLYQGVNCTEVPVAIHADQLTPTWRVYSTGSNVFQTRAGCLIGAEHVNNSYECDIPIGAGICASYQTQTNSPRRARSVASQSIIAYTMSLGAENSVAYSNNSIAIPTNFTISVTTEILPVSMTKTSVDCTMYICGDSTECSNLLLQYGSFCTQLNRALTGIAVEQDKNTQEVFAQVKQIYKTPPIKDFGGFNFSQILPDPSKPSKRSFIEDLLFNKVTLADAGFIKQYGDCLGDIAARDLICAQKFNGLTVLPPLLTDEMIAQYTSALLAGTITSGWTFGAGAALQIPFAMQMAYRFNGIGVTQNVLYENQKLIANQFNSAIGKIQDSLSSTASALGKLQDVVNQNAQALNTLVKQLSSNFGAISSVLNDILSRLDPPEAEVQIDRLITGRLQSLQTYVTQQLIRAAEIRASANLAATKMSECVLGQSKRVDFCGKGYQLMSFPQSAPHGVVFLNVTYVPAQEKNFTTAPAICNDGKAHFPREGVFVSNGTNWFVTQRNFYEPQIITTDNTFVSGNCDVVIGIVNNTVYDPLQPELDSFKEELDKYFKNHTSPDVDLGDISGINASVVNIQKEIDRLNEVAKNLNESLIDLQELGKYEQYIKGGGSGGGQIYEGKLTAEGLRFGIVASRFNHALVDRLVEGAIDAIVRHGGREEDITLVRVPGSWEIPVAAGELARKEDIDAVIAIGVLIRGATPHFDYIASEVSKGLADLSLELRKPITFGVITADTLEQAIERAGTKHGNKGWEAALSAIEMANLFKSLR

SEQ ID NO: 3914 - protein, 1371 aa, Artificial Sequence
  SARS-CoV-2/Belgium/BA-02291/2020__EPI_ISL_415159 spike protein (1-1211)(K986P_V987P_ H1048Q_H1064N_ H1083N_H1101N) LumSynth construct
MFVFLVLLPLVSSQCVNLTTRTQLPPAYTNSFTRGVYYPDKVFRSSVLHSTQDLFLPFFSNVTWFHAIHVSGTNGTKRFDNPVLPFNDGVYFASTEKSNIIRGWIFGTTLDSKTQSLLIVNNATNVVIKVCEFQFCNDPFLGVYYHKNNKSWMESEFRVYSSANNCTFEYVSQPFLMDLEGKQGNFKNLREFVFKNIDGYFKIYSKHTPINLVRDLPQGFSALEPLVDLPIGINITRFQTLLALHRSYLTPGDSSSGWTAGAAAYYVGYLQPRTFLLKYNENGTITDAVDCALDPLSETKCTLKSFTVEKGIYQTSNFRVQPTESIVRFPNITNLCPFGEVFNATRFASVYAWNRKRISNCVADYSVLYNSASFSTFKCYGVSPTKLNDLCFTNVYADSFVIRGDEVRQIAPGQTGKIADYNYKLPDDFTGCVIAWNSNNLDSKVGGNYNYLYRLFRRSNLKPFERDISTEIYQAGSTPCNGVEGFNCYFPLQSYGFQPTNGVGYQPYRVVVLSFELLPAPATVCGPKKSTNLVKNKCVNFNFNGLTGTGVLTESNKKFLPFQQFGRDIADTTDAVRDPQTLEILDITPCSFGGVSVITPGTNTSNQVAVLYQGVNCTEVPVAIHADQLTPTWRVYSTGSNVFQTRAGCLIGAEHVNNSYECDIPIGAGICASYQTQTNSPRRARSVASQSIIAYTMSLGAENSVAYSNNSIAIPTNFTISVTTEILPVSMTKTSVDCTMYICGDSTECSNLLLQYGSFCTQLNRALTGIAVEQDKNTQEVFAQVKQIYKTPPIKDFGGFNFSQILPDPSKPSKRSFIEDLLFNKVTLADAGFIKQYGDCLGDIAARDLICAQKFNGLTVLPPLLTDEMIAQYTSALLAGTITSGWTFGAGAALQIPFAMQMAYRFNGIGVTQNVLYENQKLIANQFNSAIGKIQDSLSSAAPALGKLQDVVNQNAQALNTLVKQLSSNFGAISSVLNDILSRLDPPEAEVQIDRLITGRLQSLQTYVTQQLIRAAEIRASANLAATKMSECVLGQSKRVDFCGKGYQLMSFPQSAPHGVVFLNVTYVPAQEKNFTTAPAICNDGKAHFPREGVFVSNGTNWFVTQRNFYEPQIITTDNTFVSGNCDVVIGIVNNTVYDPLQPELDSFKEELDKYFKNHTSPDVDLGDISGINASVVNIQKEIDRLNEVAKNLNESLIDLQELGKYEQYIKGGGSGGGQIYEGKLTAEGLRFGIVASRFNHALVDRLVEGAIDAIVRHGGREEDITLVRVPGSWEIPVAAGELARKEDIDAVIAIGVLIRGATPHFDYIASEVSKGLADLSLELRKPITFGVITADTLEQAIERAGTKHGNKGWEAALSAIEMANLFKSLR

SEQ ID NO: 3915 - protein, 1371 aa, Artificial Sequence
  SARS-CoV-2/USA/WA8-UW5/2020__EPI_ISL_413486 spike protein (1-1211)(K986P_V987P_ H1048Q_H1064N_ H1083N_H1101N) LumSynth construct
MFVFLVLLPLVSSQCVNLTTRTQLPPAYTNSFTRGVYYPDKVFRSSVLHSTQDLFLPFFSNVTWFHAIHVSGTNGTKRFDNPVLPFNDGVYFASTEKSNIIRGWIFGTTLDSKTQSLLIVNNATNVVIKVCEFQFCNDPFLGVYYHKNNKSWMESEFRVYSSANNCTFEYVSQPFLMDLEGKQGNFKNLREFVFKNIDGYFKIYSKHTPINLVRDLPQGFSALEPLVDLPIGINITRFQTLLALHRSYLTPGDSSSGWTAGAAAYYVGYLQPRTFLLKYNENGTITDAVDCALDPLSETKCTLKSFTVEKGIYQTSNFRVQPTESIVRFPNITNLCPFGEVFNATRFASVYAWNRKRISNCVADYSVLYNSASFSTFKCYGVSPTKLNDLCFTNVYADSFVIRGDEVRQIAPGQTGKIADYNYKLPDDFTGCVIAWNSNNLDSKVGGNYNYLYRLFRKSNLKPFERDISTEIYQAGSTPCNGVEGFNCYFPLQSYGFQPTNGVGYQPYRVVVLSFELLHAPATVCGPKKSTNLVKNKCVNFNFNGLTGTGVLTESNKKFLPFQQFGRDIADTTDAVRDPQTLEILDITPCSFGGVSVITPGTNTSNQVAVLYQDVNCTEVPVAIHADQLTPTWRVYSTGSNVFQTRAGCLIGAEYVNNSYECDIPIGAGICASYQTQTNSPRRARSVASQSIIAYTMSLGAENSVAYSNNSIAIPTNFTISVTTEILPVSMTKTSVDCTMYICGDSTECSNLLLQYGSFCTQLNRALTGIAVEQDKNTQEVFAQVKQIYKTPPIKDFGGFNFSQILPDPSKPSKRSFIEDLLFNKVTLADAGFIKQYGDCLGDIAARDLICAQKFNGLTVLPPLLTDEMIAQYTSALLAGTITSGWTFGAGAALQIPFAMQMAYRFNGIGVTQNVLYENQKLIANQFNSAIGKIQDSLSSTASALGKLQDVVNQNAQALNTLVKQLSSNFGAISSVLNDILSRLDPPEAEVQIDRLITGRLQSLQTYVTQQLIRAAEIRASANLAATKMSECVLGQSKRVDFCGKGYQLMSFPQSAPHGVVFLNVTYVPAQEKNFTTAPAICNDGKAHFPREGVFVSNGTNWFVTQRNFYEPQIITTDNTFVSGNCDVVIGIVNNTVYDPLQPELDSFKEELDKYFKNHTSPDVDLGDISGINASVVNIQKEIDRLNEVAKNLNESLIDLQELGKYEQYIKGGGSGGGQIYEGKLTAEGLRFGIVASRFNHALVDRLVEGAIDAIVRHGGREEDITLVRVPGSWEIPVAAGELARKEDIDAVIAIGVLIRGATPHFDYIASEVSKGLADLSLELRKPITFGVITADTLEQAIERAGTKHGNKGWEAALSAIEMANLFKSLR

SEQ ID NO: 3916 - protein, 1371 aa, Artificial Sequence
  SARS-CoV-2/England/20102000506/2020__EPI_ISL_415147 spike protein (1-1211)(K986P_V987P_ H1048Q_H1064N_ H1083N_H1101N) LumSynth construct
MFVFLVLLPLVSSQCVNLTTRTQLPPAYTNSFTRGVYYPDKVFRSSVLHSTQDLFLPFFSNVTWFHAIHVSGTNGTKRFDNPVLPFNDGVYFASTEKSNIIRGWIFGTTLDSKTQSLLIVNNATNVVIKVCEFQFCNDPFLGVYYHKNNKSWMESEFRVYSSANNCTFEYVSQPFLMDLEGKQGNFKNLREFVFKNIDGYFKIYSKHTPINLVRDLPQGFSALEPLVDLPIGINITRFQTLLALHRSYLTPGDSSSGWTAGAAAYYVGYLQPRTFLLKYNENGTITDAVDCALDPLSETKCTLKSFTVEKGIYQTSNFRVQPTESIVRFPNITNLCPFGEVFNATRFASVYAWNRKRISNCVADYSVLYNSASFSTFKCYGVSPTKLNDLCFTNVYADSFVIRGDEVRQIAPGQTGKIADYNYKLPDDFTGCVIAWNSNNLDSKVGGNYNYLYRLFRKSNLKPFERDISTEIYQAGSTPCNGVEGFNCYFPLQSYGFQPTNGVGYQPYRVVVLSFELLHAPATVCGPKKSTNLVKNKCVNFNFNGLTGTGVLTESNKKFLPFQQFGRDIADTTDAVRDPQTLEILDITPCSFGGVSVITPGTNTSNQVAVLYQGVNCTEVPVAIHADQLTPTWRVYSTGSNVFQTRAGCLIGAEHVNNSYECDIPIGAGICASYQTQTNSPRRARSVASQSIIAYTMSLGAENSVAYSNNSIAIPTNFTISVTTEILPVSMTKTSVDCTMYICGDSTECSNLLLQYGSFCTQLNRALTGIAVEQDKNTQEVFAQVKQIYKTPPIKDFGGFNFSQILPDPSKPSKRSFIEDLLFNKVTLADAGFIKQYGYCLGDIAARDLICAQKFNGLTVLPPLLTDEMIAQYTSALLAGTITSGWTFGAGAALQIPFAMQMAYRFNGIGVTQNVLYENQKLIANQFNSAIGKIQDSLSSTASALGKLQDVVNQNAQALNTLVKQLSSNFGAISSVLNDILSRLDPPEAEVQIDRLITGRLQSLQTYVTQQLIRAAEIRASANLAATKMSECVLGQSKRVDFCGKGYQLMSFPQSAPHGVVFLNVTYVPAQEKNFTTAPAICNDGKAHFPREGVFVSNGTNWFVTQRNFYEPQIITTDNTFVSGNCDVVIGIVNNTVYDPLQPELDSFKEELDKYFKNHTSPDVDLGDISGINASVVNIQKEIDRLNEVAKNLNESLIDLQELGKYEQYIKGGGSGGGQIYEGKLTAEGLRFGIVASRFNHALVDRLVEGAIDAIVRHGGREEDITLVRVPGSWEIPVAAGELARKEDIDAVIAIGVLIRGATPHFDYIASEVSKGLADLSLELRKPITFGVITADTLEQAIERAGTKHGNKGWEAALSAIEMANLFKSLR

SEQ ID NO: 3917 - protein, 1371 aa, Artificial Sequence
  SARS-CoV-2/Belgium/VAG-03013/2020__EPI_ISL_415155 spike protein (1-1211)(K986P_V987P_ H1048Q_H1064N_ H1083N_H1101N) LumSynth construct
MFVFLVLLPLVSSQCVNLTTRTQLPPAYTNSFTRGVYYPDKVFRSSVLHSTQDLFLPFFSNVTWFHAIHVSGTNGTKRFDNPVLPFNDGVYFASTEKSNIIRGWIFGTTLDSKTQSLLIVNNATNVVIKVCEFQFCNDPFLGVYYHKNNKSWMESEFRVYSSANNCTFEYVSQPFLMDLEGKQGNFKNLREFVFKNIDGYFKIYSKHTPINLVRDLPQGFSALEPLVDLPIGINITRFQTLLALHRSYLTPGDSSSGWTAGAAAYYVGYLQPRTFLLKYNENGTITDAVDCALDPLSETKCTLKSFTVEKGIYQTSNFRVQPTESIVRFPNITNLCPFGEVFNATRFASVYAWNRKRISNCVADYSVLYNSASFSTFKCYGVSPTKLNDLCFTNVYADSFVIRGDEVRQIAPGQTGKIADYNYKLPDDFTGCVIAWNSNNLDSKVGGNYNYLYRLFRKSNLKPFERDISTEIYQAGSTPCNGVEGFNCYFPLQSYGFQPTNGVGYQPYRVVVLSFELLHAPATVCGPKKSTNLVKNKCVNFNFNGLTGTGVLTESNKKFLPFQQFGRDIADTTDAVRDPQTLEILDITPCSFGGVSVITPGTNTSNQVAVLYQGVNCTEVPVAIHADQLTPTWRVYSTGSNVFQTRAGCLIGAEHVNNSYECDIPIGAGICASYQTQTNSPRRARSVASQSIIAYTMSLGAENSVAYSNNSIAIPTNFTISVTTEILPVSMTKTSVDCTMYICGDSTECSNLLLQYGSFCTQLNRALTGIAVEQDKNTQEVFAQVKQIYKTPPIKDFGGFNFSQILPDPSKPSKRSFIEDLLFNKVTLADAGFIKQYGDCLGDIAARDLICAQKFNGLTVLPPLLTDEMIAQYTSALLAGTITSGWTFGAGAALQIPFAMQMAYRFNGIGVTQNVLYENQKLIANQFNSAIGKIQDSLSSTATALGKLQDVVNQNAQALNTLVKQLSSNFGAISSVLNDILSRLDPPEAEVQIDRLITGRLQSLQTYVTQQLIRAAEIRASANLAATKMSECVLGQSKRVDFCGKGYQLMSFPQSAPHGVVFLNVTYVPAQEKNFTTAPAICNDGKAHFPREGVFVSNGTNWFVTQRNFYEPQIITTDNTFVSGNCDVVIGIVNNTVYDPLQPELDSFKEELDKYFKNHTSPDVDLGDISGINASVVNIQKEIDRLNEVAKNLNESLIDLQELGKYEQYIKGGGSGGGQIYEGKLTAEGLRFGIVASRFNHALVDRLVEGAIDAIVRHGGREEDITLVRVPGSWEIPVAAGELARKEDIDAVIAIGVLIRGATPHFDYIASEVSKGLADLSLELRKPITFGVITADTLEQAIERAGTKHGNKGWEAALSAIEMANLFKSLR

SEQ ID NO: 3918 - protein, 1371 aa, Artificial Sequence
  SARS-CoV-2/Belgium/BC-03016/2020__EPI_ISL_415157 spike protein (1-1211)(K986P_V987P_ H1048Q_H1064N_ H1083N_H1101N) LumSynth construct
MFVFLVLLPLVSSQCVNLTTRTQLPPAYTNSFTRGVYYPDKVFRSSVLHSTQDLFLPFFSNVTWFHAIHVSGTNGTKRFDNPVLPFNDGVYFASTEKSNIIRGWIFGTTLDSKTQSLLIVNNATNVVIKVCEFQFCNDPFLGVYYHKNNKSWMESEFRVYSSANNCTFEYVSQPFLMDLEGKQGNFKNLREFVFKNIDGYFKIYSKHTPINLVRDLPQGFSALEPLVDLPIGINITRFQTLLALHRSYLTPGDSSSGWTAGAAAYYVGYLQPRTFLLKYNENGTITDAVDCALDPLSETKCTLKSFTVEKGIYQTSNFRVQPTESIVRFPNITNLCPFGEVFNATRFASVYAWNRKRISNCVADYSVLYNSASFSTFKCYGVSPTKLNDLCFTNVYADSFVIRGDEVRQIAPGQTGKIADYNYKLPDDFTGCVIAWNSNNLDSKVGGNYNYLYRLFRKSNLKPFERDISTEIYQAGSTPCNGVEGFNCYFPLQSYGFQPTNGVGYQPYRVVVLSFELLHAPATVCGPKKSTNLVKNKCVNFNFNGLTGTGVLTESNKKFLPFQQFGRDIADTTDAVRDPQTLEILDITPCSFGGVSVITPGTNTSNQVAVLYQGVNCTEVPVAIHADQLTPTWRVYSTGSNVFQTRAGCLIGAEHVNNSYECDIPIGAGICASYQTQTNSPRRARSVASQSIIAYTMSLGAENSVAYSNNSIAIPTNFTISVTTEILPVSMTKTSVDCTMYICGDSTECSNLLLQYGSFCTQLNRALTGIAVEQDKNTQEVFAQVKQIYKTPPIKDFGGFNFSQILPDPSKPSKRSFIEDLLFNKVTLADAGFIKQYGDCLGDIAARDLICAQKFNGLTVLPPLLTDEMIAQYTSALLAGTITSGWTFGAGAALQIPFAMQMAYRFNGIGVTQNVLYENQKLIANQFNSAIGKIQDSLSSTAPALGKLQDVVNQNAQALNTLVKQLSSNFGAISSVLNDILSRLDPPEAEVQIDRLITGRLQSLQTYVTQQLIRAAEIRASANLAATKMSECVLGQSKRVDFCGKGYQLMSFPQSAPHGVVFLNVTYVPAQEKNFTTAPAICNDGKAHFPREGVFVSNGTNWFVTQRNFYEPQIITTDNTFVSGNCDVVIGIVNNTVYDPLQPELDSFKEELDKYFKNHTSPDVDLGDISGINASVVNIQKEIDRLNEVAKNLNESLIDLQELGKYEQYIKGGGSGGGQIYEGKLTAEGLRFGIVASRFNHALVDRLVEGAIDAIVRHGGREEDITLVRVPGSWEIPVAAGELARKEDIDAVIAIGVLIRGATPHFDYIASEVSKGLADLSLELRKPITFGVITADTLEQAIERAGTKHGNKGWEAALSAIEMANLFKSLR

SEQ ID NO: 3919 - protein, 1371 aa, Artificial Sequence
  SARS-CoV-2/Germany/BavPat3/2020__EPI_ISL_414521 spike protein (1-1211)(K986P_V987P_ H1048Q_H1064N_ H1083N_H1101N) LumSynth construct
MFVFLVLLPLVSSQCVNLTTRTQLPPAYTNSFTRGVYYPDKVFRSSVLHSTQDLFLPFFSNVTWFHAIHVSGTNGTKRFDNPVLPFNDGVYFASTEKSNIIRGWIFGTTLDSKTQSLLIVNNATNVVIKVCEFQFCNDPFLGVYYHKNNKSWMESEFRVYSSANNCTFEYVSQPFLMDLEGKQGNFKNLREFVFKNIDGYFKIYSKHTPINLVRDLPQGFSALEPLVDLPIGINITRFQTLLALHRSYLTPGDSSSGWTAGAAAYYVGYLQPRTFLLKYNENGTITDAVDCALDPLSETKCTLKSFTVEKGIYQTSNFRVQPTESIVRFPNITNLCPFGEVFNATRFASVYAWNRKRISNCVADYSVLYNSASFSTFKCYGVSPTKLNDLCFTNVYADSFVIRGDEVRQIAPGQTGKIADYNYKLPDDFTGCVIAWNSNNLDSKVGGNYNYLYRLFRKSNLKPFERDISTEIYQAGSTPCNGVEGFNCYFPLQSYGFQPTNGVGYQPYRVVVLSFELLHAPATVCGPKKSTNLVKNKCVNFNFNGLTGTGVLTESNKKFLPFQQFGRDIADTTDAVRDPQTLEILDITPCSFGGVSVITPGTNTSNQVAVLYQDVNCTEVPVAIHADQLTPTWRVYSTGSNVFQTRAGCLIGAEHVNNSYECDIPIGAGICASYQTQTNSPRRARSVASQSIIAYTMSLGAENSVAYSNNSIAIPTNFTISVTTEILPVSMTKTSVDCTMYICGDSTECSNLLLQYGSFCTQLNRALTGIAVEQDKNTQQVFAQVKQIYKTPPIKDFGGFNFSQILPDPSKPSKRSFIEDLLFNKVTLADAGFIKQYGDCLGDIAARDLICAQKFNGLTVLPPLLTDEMIAQYTSALLAGTITSGWTFGAGAALQIPFAMQMAYRFNGIGVTQNVLYENQKLIANQFNSAIGKIQDSLSSTASALGKLQDVVNQNAQALNTLVKQLSSNFGAISSVLNDILSRLDPPEAEVQIDRLITGRLQSLQTYVTQQLIRAAEIRASANLAATKMSECVLGQSKRVDFCGKGYQLMSFPQSAPHGVVFLNVTYVPAQEKNFTTAPAICNDGKAHFPREGVFVSNGTNWFVTQRNFYEPQIITTDNTFVSGNCDVVIGIVNNTVYDPLQPELDSFKEELDKYFKNHTSPDVDLGDISGINASVVNIQKEIDRLNEVAKNLNESLIDLQELGKYEQYIKGGGSGGGQIYEGKLTAEGLRFGIVASRFNHALVDRLVEGAIDAIVRHGGREEDITLVRVPGSWEIPVAAGELARKEDIDAVIAIGVLIRGATPHFDYIASEVSKGLADLSLELRKPITFGVITADTLEQAIERAGTKHGNKGWEAALSAIEMANLFKSLR

SEQ ID NO: 3920 - protein, 1371 aa, Artificial Sequence
  SARS-CoV-2/France/HF1805/2020__EPI_ISL_414628 spike protein (1-1211)(K986P_V987P_ H1048Q_H1064N_ H1083N_H1101N) LumSynth construct
MFVFLVLLPLVSSQCVNLTTRTQLPPAYTNSFTRGVYYPDKVFRSSVLHSTQDLFLPFFSNVTWFHAIHVSGTNGTKRFDNPVLPFNDGVYFASTEKSNIIRGWIFGTTLDSKTQSLLIVNNATNVVIKVCEFQFCNDPFLGVYYHKNNKSWMESEFRVYSSANNCTFEYVSQPFLMDLEGKQGNFKNLREFVFKNIDGYFKIYSKHTPINLVRDLPQGFSALEPLVDLPIGINITRFQTLLALHRSYLTPGDSSSGWTAGAAAYYVGYLQPRTFLLKYNENGTITDAVDCALDPLSETKCTLKSFTVEKGIYQTSNFRVQPTESIVRFPNITNLCPFGEVFNATRFASVYAWNRKRISNCVADYSVLYNSASFSTFKCYGVSPTKLNDLCFTNVYADSFVIRGDEVRQIAPGQTGKIADYNYKLPDDFTGCVIAWNSNNLDSKVGGNYNYLYRLFRKSNLKPFERDISTEIYQAGSTPCNGVEGFNCYFPLQSYGFQPTNGVGYQPYRVVVLSFELLHAPATVCGPKKSTNLVKNKCVNFNFNGLTGTGVLTESNKKFLPFQQFGRDIADTTDAVRDPQTLEILDITPCSFGGVSVITPGTNTSNQVAVLYQGVNCTEVPVAIHADQLTPTWRVYSTGSNVFQTRAGCLIGAEHVNNSYECDIPIGAGICASYQTQTNSPRRARSVASQSIIAYTMSLGAENSVAYSNNSIAIPTNFTISVTTEILPVSMTKTSVDCTMYICGDSTECSNLLLQYGSFCTQLNRALTGIAVEQDKNTQEVFAQVKQIYKTPPIKDFGGFNFSQILPDPSKPSKRSFIEDLLFNKVTLADAGFIKQYGDCLGDIAARDLICAQKFNGLTVLPPLLTDEMIAQYTSALLAGTITSGWTFGAGAALQIPFAMQMAYRFNGIGVTQNVLYENQKLIANQFNSAIGKIQDSLSSTASALGKLQDVVNQNAQALNTLVKQLSSNFGAISSVLNDILSRLDPPEAEVQIDRLITGRLQSLQTYVTQQLIRAAEIRASANLAATKMSECVLGQSKRVDFCGKGYQLMSFPQSAPHGVVFLNVTYVPAQEKNFTTAPAICNDGKAHFPREGVFVSNGTNWFVTQRNFYEPQIITTDNTFVSGNCDVVIGVVNNTVYDPLQPELDSFKEELDKYFKNHTSPDVDLGDISGINASVVNIQKEIDRLNEVAKNLNESLIDLQELGKYEQYIKGGGSGGGQIYEGKLTAEGLRFGIVASRFNHALVDRLVEGAIDAIVRHGGREEDITLVRVPGSWEIPVAAGELARKEDIDAVIAIGVLIRGATPHFDYIASEVSKGLADLSLELRKPITFGVITADTLEQAIERAGTKHGNKGWEAALSAIEMANLFKSLR

SEQ ID NO: 3921 - protein, 1371 aa, Artificial Sequence
  SARS-CoV-2/Netherlands/ZuidHolland_9/2020__EPI_ISL_414445 spike protein (1-1211)(K986P_V987P_ H1048Q_H1064N_ H1083N_H1101N) LumSynth construct
MFVFLVLLPLVSSQCVNLTTRTQLPPAYTNSFTRGVYYPDKVFRSSVLHSTQDLFLPFFSNVTWFHAIHVSGTNGTKRFDNPVLPFNDGVYFASTEKSNIIRGWIFGTTLDSKTQSLLIVNNATNVVIKVCEFQFCNDPFLGVYYHKNNKSWMESEFRVYSSANNCTFEYVSQPFLMDLEGKQGNFKNLREFVFKNIDGYFKIYSKHTPINLVRDLPQGFSALEPLVDLPIGINITRFQTLLALHRSYLTPGDSSSGWTAGAAAYYVGYLQPRTFLLKYNENGTITDAVDCALDPLSETKCTLKSFTVEKGIYQTSNFRVQPTESIVRFPNITNLCPFGEVFNATRFASVYAWNRKRISNCVADYSVLYNSASFSTFKCYGVSPTKLNDLCFTNVYADSFVIRGDEVRQIAPGQTGKIADYNYKLPDDFTGCVIAWNSNNLDSKVGGNYNYLYRLFRKSNLKPFERDISTEIYQAGSTPCNGVEGFNCYFPLQSYGFQPTNGVGYQPYRVVVLSFELLHAPATVCGPKKSTNLVKNKCVNFNFNGLTGTGVLTESNKKFLPFQQFGRDIADTTDAVRDPQTLEILDITPCSFGGVSVITPGTNTSNQVAVLYQGVNCTEVPVAIHADQLTPTWRVYSTGSNVFQTRAGCLIGAEHVNNSYECDIPIGAGICASYQTQTNSPRRARSVASQSIIAYTMSLGAENSVAYSNNSIAIPTNFTISVTTEILPVSMTKTSVDCTMYICGDSTECSNLLLQYGSFCTQLNRALTGIAVEQDKNTQEVFAQVKQIYKTPPIKDFGGFNFSQILPDPSKPSKRSFIEDLLFNKVTLADAGFIKQYGDCLGDIAARDLICVQKFNGLTVLPPLLTDEMIAQYTSALLAGTITSGWTFGAGAALQIPFAMQMAYRFNGIGVTQNVLYENQKLIANQFNSAIGKIQDSLSSTASALGKLQDVVNQNAQALNTLVKQLSSNFGAISSVLNDILSRLDPPEAEVQIDRLITGRLQSLQTYVTQQLIRAAEIRASANLAATKMSECVLGQSKRVDFCGKGYQLMSFPQSAPHGVVFLNVTYVPAQEKNFTTAPAICNDGKAHFPREGVFVSNGTNWFVTQRNFYEPQIITTDNTFVSGNCDVVIGIVNNTVYDPLQPELDSFKEELDKYFKNHTSPDVDLGDISGINASVVNIQKEIDRLNEVAKNLNESLIDLQELGKYEQYIKGGGSGGGQIYEGKLTAEGLRFGIVASRFNHALVDRLVEGAIDAIVRHGGREEDITLVRVPGSWEIPVAAGELARKEDIDAVIAIGVLIRGATPHFDYIASEVSKGLADLSLELRKPITFGVITADTLEQAIERAGTKHGNKGWEAALSAIEMANLFKSLR

SEQ ID NO: 3922 - protein, 1371 aa, Artificial Sequence
  SARS-CoV-2/Finland/FIN03032020A/2020__EPI_ISL_413602 spike protein (1-1211)(K986P_V987P_ H1048Q_H1064N_ H1083N_H1101N) LumSynth construct
MFVFLVLLPLVSSQCVNLTTRTQLPPAYTNSFTRGVYYPDKVFRSSVLHSTQDLFLPFFSNVTWFHAIHVSGTNGTKRFDNPVLPFNDGVYFASTEKSNIIRGWIFGTTLDSKTQSLLIVNNATNVVIKVCEFQFCNDPFLGVYYHKNNKSWMESEFRVYSSANNCTFEYVSQPFLMDLEGKQGNFKNLREFVFKNIDGYFKIYSKHTPINLVRDLPQGFSALEPLVDLPIGINITRFQTLLALHRSYLTPGDSSSGWTAGAAAYYVGYLQPRTFLLKYNENGTITDAVDCALDPLSETKCTLKSFTVEKGIYQTSNFRVQPTESIVRFPNITNLCPFGEVFNATRFASVYAWNRKRISNCVADYSVLYNSASFSTFKCYGVSPTKLNDLCFTNVYADSFVIRGDEVRQIAPGQTGKIADYNYKLPDDFTGCVISWNSNNLDSKVGGNYNYLYRLFRKSNLKPFERDISTEIYQAGSTPCNGVEGFNCYFPLQSYGFQPTNGVGYQPYRVVVLSFELLHAPATVCGPKKSTNLVKNKCVNFNFNGLTGTGVLTESNKKFLPFQQFGRDIADTTDAVRDPQTLEILDITPCSFGGVSVITPGTNTSNQVAVLYQGVNCTEVPVAIHADQLTPTWRVYSTGSNVFQTRAGCLIGAEHVNNSYECDIPIGAGICASYQTQTNSPRRARSVASQSIIAYTMSLGAENSVAYSNNSIAIPTNFTISVTTEILPVSMTKTSVDCTMYICGDSTECSNLLLQYGSFCTQLNRALTGIAVEQDKNTQEVFAQVKQIYKTPPIKDFGGFNFSQILPDPSKPSKRSFIEDLLFNKVTLADAGFIKQYGDCLGDIAARDLICAQKFNGLTVLPPLLTDEMIAQYTSALLAGTITSGWTFGAGAALQIPFAMQMAYRFNGIGVTQNVLYENQKLIANQFNSAIGKIQDSLSSTASALGKLQDVVNQNAQALNTLVKQLSSNFGAISSVLNDILSRLDPPEAEVQIDRLITGRLQSLQTYVTQQLIRAAEIRASANLAATKMSECVLGQSKRVDFCGKGYQLMSFPQSAPHGVVFLNVTYVPAQEKNFTTAPAICNDGKAHFPREGVFVSNGTNWFVTQRNFYEPQIITTDNTFVSGNCDVVIGIVNNTVYDPLQPELDSFKEELDKYFKNHTSPDVDLGDISGINASVVNIQKEIDRLNEVAKNLNESLIDLQELGKYEQYIKGGGSGGGQIYEGKLTAEGLRFGIVASRFNHALVDRLVEGAIDAIVRHGGREEDITLVRVPGSWEIPVAAGELARKEDIDAVIAIGVLIRGATPHFDYIASEVSKGLADLSLELRKPITFGVITADTLEQAIERAGTKHGNKGWEAALSAIEMANLFKSLR

SEQ ID NO: 3923 - protein, 1371 aa, Artificial Sequence
  SARS-CoV-2/France/GE1977/2020__EPI_ISL_414632 spike protein (1-1211)(K986P_V987P_ H1048Q_H1064N_ H1083N_H1101N) LumSynth construct
MFVFLVLLPLVSSQCVNLTTRTQLPPAYTNSFTRGVYYPDKVFRSSVLHSTQDLFLPFFSNVTWFHAIHVSGTNGTKRFDNPVLPFNDGVYFASTEKSNIIRGWIFGTTLDSKTQSLLIVNNATNVVIKVCEFQFCNDPFLGVYYHKNNKSWMESEFRVYSSANNCTFEYVSQPFLMDLEGKQGNFKNLREFVFKNIDGYFKIYSKHTPINLVRDLPQGFSALEPLVDLPIGINITRFQTLLALHRSYLTPGDSSSGWTAGAAAYYVGYLQPRTFLLKYNENGTITDAVDCALDPLSETKCTLKSFTVEKGIYQTSNFRVQPTESIVRFPNITNLCPFGEVFNATRFASVYAWNRKRISNCVADYSVLYNSASFSTFKCYGVSPTKLNDLCFTNVYADSFVIRGDEVRQIAPGQTGKIADYNYKLPDDFTGCVIAWNSNNLDSKVGGNYNYLYRLFRKSNLKPFERDISTEIYQAGSTPCNGVEGFNCYFPLQSYGFQPTNGVGYQPYRVVVLSFELLHAPATVCGPKKSTNLVKNKCVNFNFNGLTGTGVLTESNKKFLPFQQFGRDIADTTDAVRDPQTLEILDITPCSFGGVSVITPGTNTSNQVAVLYQGVNCTEVPVAIHADQLTPTWRVYSTGSNVFQTRAGCLIGAEHVNNSYECDIPIGAGICASYQTQTNSPRRARSVASQSIIAYTMSLGAENSVAYSNNSIAIPTNFTISVTTEILPVSMTKTSVDCTMYICGDSTECSNLLLQYGSFCTQLNRALTGIAVEQDKNTQEVFAQVKQIYKTPPIKDFGGFNFSQILPDPSKPSKRSFIEDLLFNKVTLADAGFIKQYGDCLGDIAARDLICAQKFNGLTVLPPLLTDEMIAQYTSALLAGTITSGWTFGAGAALQIPFAMQMAYRFNGIGVTQNVLYENQKLIANQFNSAIGKIQDSLFSTASALGKLQDVVNQNAQALNTLVKQLSSNFGAISSVLNDILSRLDPPEAEVQIDRLITGRLQSLQTYVTQQLIRAAEIRASANLAATKMSECVLGQSKRVDFCGKGYQLMSFPQSAPHGVVFLNVTYVPAQEKNFTTAPAICNDGKAHFPREGVFVSNGTNWFVTQRNFYEPQIITTDNTFVSGNCDVVIGIVNNTVYDPLQPELDSFKEELDKYFKNHTSPDVDLGDISGINASVVNIQKEIDRLNEVAKNLNESLIDLQELGKYEQYIKGGGSGGGQIYEGKLTAEGLRFGIVASRFNHALVDRLVEGAIDAIVRHGGREEDITLVRVPGSWEIPVAAGELARKEDIDAVIAIGVLIRGATPHFDYIASEVSKGLADLSLELRKPITFGVITADTLEQAIERAGTKHGNKGWEAALSAIEMANLFKSLR

SEQ ID NO: 3924 - protein, 1371 aa, Artificial Sequence
  SARS-CoV-2/Finland/FIN-313/2020__EPI_ISL_414641 spike protein (1-1211)(K986P_V987P_ H1048Q_H1064N_ H1083N_H1101N) LumSynth construct
MFVFLVLLPLVSSQCVNLTTRTQLPPAYTNSFTRGVYYPDKVFRSSVLHSTQDLFLPFFSNVTWFHAIHVSGTNGTKRFDNPVLPFNDGVYFASTEKSNIIRGWIFGTTLDSKTQSLLIVNNATNVVIKVCEFQFCNDPFLGVYYHKNNKSWMESEFRVYSSANNCTFEYVSQPFLMDLEGKQGNFKNLREFVFKNIDGYFKIYSKHTPINLVRDLPQGFSALEPLVDLPIGINITRFKTLLALHRSYLTPGDSSSGWTAGAAAYYVGYLQPRTFLLKYNENGTITDAVDCALDPLSETKCTLKSFTVEKGIYQTSNFRVQPTESIVRFPNITNLCPFGEVFNATRFASVYAWNRKRISNCVADYSVLYNSASFSTFKCYGVSPTKLNDLCFTNVYADSFVIRGDEVRQIAPGQTGKIADYNYKLPDDFTGCVIAWNSNNLDSKVGGNYNYLYRLFRKSNLKPFERDISTEIYQAGSTPCNGVEGFNCYFPLQSYGFQPTNGVGYQPYRVVVLSFELLHAPATVCGPKKSTNLVKNKCVNFNFNGLTGTGVLTESNKKFLPFQQFGRDIADTTDAVRDPQTLEILDITPCSFGGVSVITPGTNTSNQVAVLYQGVNCTEVPVAIHADQLTPTWRVYSTGSNVFQTRAGCLIGAEHVNNSYECDIPIGAGICASYQTQTNSPRRARSVASQSIIAYTMSLGAENSVAYSNNSIAIPTNFTISVTTEILPVSMTKTSVDCTMYICGDSTECSNLLLQYGSFCTQLNRALTGIAVEQDKNTQEVFAQVKQIYKTPPIKDFGGFNFSQILPDPSKPSKRSFIEDLLFNKVTLADAGFIKQYGDCLGDIAARDLICAQKFNGLTVLPPLLTDEMIAQYTSALLAGTITSGWTFGAGAALQIPFAMQMAYRFNGIGVTQNVLYENQKLIANQFNSAIGKIQDSLSSTASALGKLQDVVNQNAQALNTLVKQLSSNFGAISSVLNDILSRLDPPEAEVQIDRLITGRLQSLQTYVTQQLIRAAEIRASANLAATKMSECVLGQSKRVDFCGKGYQLMSFPQSAPHGVVFLNVTYVPAQEKNFTTAPAICNDGKAHFPREGVFVSNGTNWFVTQRNFYEPQIITTDNTFVSGNCDVVIGIVNNTVYDPLQPELDSFKEELDKYFKNHTSPDVDLGDISGINASVVNIQKEIDRLNEVAKNLNESLIDLQELGKYEQYIKGGGSGGGQIYEGKLTAEGLRFGIVASRFNHALVDRLVEGAIDAIVRHGGREEDITLVRVPGSWEIPVAAGELARKEDIDAVIAIGVLIRGATPHFDYIASEVSKGLADLSLELRKPITFGVITADTLEQAIERAGTKHGNKGWEAALSAIEMANLFKSLR

SEQ ID NO: 3925 - protein, 1371 aa, Artificial Sequence
  SARS-CoV-2/Netherlands/ZuidHolland_2/2020__EPI_ISL_414556 spike protein (1-1211)(K986P_V987P_ H1048Q_H1064N_ H1083N_H1101N) LumSynth construct
MFVFLVLLPLVSSQCVNLTTRTQLPPAYTNSFTRGVYYPDKVFRSSVLHSTQDLFLPFFSNVTWFHAIHVSGTNGTKRFDNPVLPFNDGVYFASTEKSNIIRGWIFGTTLDSKTQSLLIVNNATNVVIKVCEFQFCNDPFLGVYYHKNNKSWMESEFRVYSSANNCTFEYVSQPFLMDLEGKQGNFKNLREFVFKNIDGYFKIYSKHTPINLVRDLPQGFSALEPLVDLPIGINITRFQTLLALHRSYLTPGDSSSGWTAGAAAYYVGYLQPRTFLLKYNENGTITDAVDCALDPLSETKCTLKSFTVEKGIYQTSNFRVQPTESIVRFPNITNLCPFGEVFNATRFASVYAWNRKRISNCVADYSVLYNSASFSTFKCYGVSPTKLNDLCFTNVYADSFVIRGDEVRQIAPGQTGKIADYNYKLPDDFTGCVIAWNSNNLDSKVGGNYNYLYRLFRKSNLKPFERDISTEIYQAGSTPCNGVEGFNCYFPLQSYGFQPTNGVGYQPYRVVVLSFELLHAPATVCGPKKSTNLVKNKCVNFNFNGLTGTGVLTESNKKFLPFQQFGRDIADTTDAVRDPQTLEILDITPCSFGGVSVITPGTNTSNQVAVLYQGVNCTEVPVAIHADQLTPTWRVYSTGSNVFQTRAGCLIGAEHVNNSYECDIPIGAGICASYQTQTNSPRRARSVASQSIIAYTMSLGAENSVAYSNNSIAIPTNFTISVTTEILPVSMTKTSVDCTMYICGDSTECSNLLLQYGSFCTQLNRALTGIALEQDKNTQEVFAQVKQIYKTPPIKDFGGFNFSQILPDPSKPSKRSFIEDLLFNKVTLADAGFIKQYGDCLGDIAARDLICAQKFNGLTVLPPLLTDEMIAQYTSALLAGTITSGWTFGAGAALQIPFAMQMAYRFNGIGVTQNVLYENQKLIANQFNSAIGKIQDSLSSTASALGKLQDVVNQNAQALNTLVKQLSSNFGAISSVLNDILSRLDPPEAEVQIDRLITGRLQSLQTYVTQQLIRAAEIRASANLAATKMSECVLGQSKRVDFCGKGYQLMSFPQSAPHGVVFLNVTYVPAQEKNFTTAPAICNDGKAHFPREGVFVSNGTNWFVTQRNFYEPQIITTDNTFVSGNCDVVIGIVNNTVYDPLQPELDSFKEELDKYFKNHTSPDVDLGDISGINASVVNIQKEIDRLNEVAKNLNESLIDLQELGKYEQYIKGGGSGGGQIYEGKLTAEGLRFGIVASRFNHALVDRLVEGAIDAIVRHGGREEDITLVRVPGSWEIPVAAGELARKEDIDAVIAIGVLIRGATPHFDYIASEVSKGLADLSLELRKPITFGVITADTLEQAIERAGTKHGNKGWEAALSAIEMANLFKSLR

SEQ ID NO: 3926 - protein, 1371 aa, Artificial Sequence
  SARS-CoV-2/USA/WA-UW31/2020__EPI_ISL_414618 spike protein (1-1211)(K986P_V987P_ H1048Q_H1064N_ H1083N_H1101N) LumSynth construct
MFVFLVLLPLVSSQCVNLTTRTQLPPAYTNSFTRGVYYPDKVFRSSVLHSTQDLFLPFFSNVTWFHAIHVSGTNGTKRFDNPVLPFNDGVYFASTEKSNIIRGWIFGTTLDSKTQSLLIVNNATNVVIKVCEFQFCNDPFLGVYYHKNNKSWMESEFRVYSSANNCTFEYVSQPFLMDLEGKQGNFKNLREFVFKNIDGYFKIYSKHTPINLVRDLPQGFSALEPLVDLPIGINITRFQTLLALHRSYLTPGDSSSGWTAGAAAYYVGYLQPRTFLLKYNENGTITDAVDCALDPLSETKCTLKSFTVEKGIYQTSNFRVQPTESIVRFPNITNLCPFGEVFNATRFASVYAWNRKRISNCVADYSVLYNSASFSTFKCYGVSPTKLNDLCFTNVYADSFVIRGDEVRQIAPGQTGKIADYNYKLPDDFTGCVIAWNSNNLDSKVGGNYNYLYRLFRKSNLKPFERDISTEIYQAGSTPCNGAEGFNCYFPLQSYGFQPTNGVGYQPYRVVVLSFELLHAPATVCGPKKSTNLVKNKCVNFNFNGLTGTGVLTESNKKFLPFQQFGRDIADTTDAVRDPQTLEILDITPCSFGGVSVITPGTNTSNQVAVLYQDVNCTEVPVAIHADQLTPTWRVYSTGSNVFQTRAGCLIGAEHVNNSYECDIPIGAGICASYQTQTNSPRRARSVASQSIIAYTMSLGAENSVAYSNNSIAIPTNFTISVTTEILPVSMTKTSVDCTMYICGDSTECSNLLLQYGSFCTQLNRALTGIAVEQDKNTQEVFAQVKQIYKTPPIKDFGGFNFSQILPDPSKPSKRSFIEDLLFNKVTLADAGFIKQYGDCLGDIAARDLICAQKFNGLTVLPPLLTDEMIAQYTSALLAGTITSGWTFGAGAALQIPFAMQMAYRFNGIGVTQNVLYENQKLIANQFNSAIGKIQDSLSSTASALGKLQDVVNQNAQALNTLVKQLSSNFGAISSVLNDILSRLDPPEAEVQIDRLITGRLQSLQTYVTQQLIRAAEIRASANLAATKMSECVLGQSKRVDFCGKGYQLMSFPQSAPHGVVFLNVTYVPAQEKNFTTAPAICNDGKAHFPREGVFVSNGTNWFVTQRNFYEPQIITTDNTFVSGNCDVVIGIVNNTVYDPLQPELDSFKEELDKYFKNHTSPDVDLGDISGINASVVNIQKEIDRLNEVAKNLNESLIDLQELGKYEQYIKGGGSGGGQIYEGKLTAEGLRFGIVASRFNHALVDRLVEGAIDAIVRHGGREEDITLVRVPGSWEIPVAAGELARKEDIDAVIAIGVLIRGATPHFDYIASEVSKGLADLSLELRKPITFGVITADTLEQAIERAGTKHGNKGWEAALSAIEMANLFKSLR

SEQ ID NO: 3927 - protein, 1371 aa, Artificial Sequence
  SARS-CoV-2/South Korea/SNU01/2020__EPI_ISL_411929 spike protein (1-1211)(K986P_V987P_ H1048Q_H1064N_ H1083N_H1101N) LumSynth construct
MFVFLVLLPLVSSQCVNLTTRTQLPPAYTNSFTRGVYYPDKVFRSSVLHSTQDLFLPFFSNVTWFHAIHVSGTNGTKRFDNPVLPFNDGVYFASTEKSNIIRGWIFGTTLDSKTQSLLIVNNATNVVIKVCEFQFCNDPFLGVYYHKNNKSWMESEFRVYSSANNCTFEYVSQPFLMDLEGKQGNFKNLREFVFKNIDGYFKIYSKHTPINLVRDLPQGFWALEPLVDLPIGINITRFQTLLALHRSYLTPGDSSSGWTAGAAAYYVGYLQPRTFLLKYNENGTITDAVDCALDPLSETKCTLKSFTVEKGIYQTSNFRVQPTESIVRFPNITNLCPFGEVFNATRFASVYAWNRKRISNCVADYSVLYNSASFSTFKCYGVSPTKLNDLCFTNVYADSFVIRGDEVRQIAPGQTGKIADYNYKLPDDFTGCVIAWNSNNLDSKVGGNYNYLYRLFRKSNLKPFERDISTEIYQAGSTPCNGVEGFNCYFPLQSYGFQPTNGVGYQPYRVVVLSFELLHAPATVCGPKKSTNLVKNKCVNFNFNGLTGTGVLTESNKKFLPFQQFGRDIADTTDAVRDPQTLEILDITPCSFGGVSVITPGTNTSNQVAVLYQDVNCTEVPVAIHADQLTPTWRVYSTGSNVFQTRAGCLIGAEHVNNSYECDIPIGAGICASYQTQTNSPRRARSVASQSIIAYTMSLGAENSVAYSNNSIAIPTNFTISVTTEILPVSMTKTSVDCTMYICGDSTECSNLLLQYGSFCTQLNRALTGIAVEQDKNTQEVFAQVKQIYKTPPIKDFGGFNFSQILPDPSKPSKRSFIEDLLFNKVTLADAGFIKQYGDCLGDIAARDLICAQKFNGLTVLPPLLTDEMIAQYTSALLAGTITSGWTFGAGAALQIPFAMQMAYRFNGIGVTQNVLYENQKLIANQFNSAIGKIQDSLSSTASALGKLQDVVNQNAQALNTLVKQLSSNFGAISSVLNDILSRLDPPEAEVQIDRLITGRLQSLQTYVTQQLIRAAEIRASANLAATKMSECVLGQSKRVDFCGKGYQLMSFPQSAPHGVVFLNVTYVPAQEKNFTTAPAICNDGKAHFPREGVFVSNGTNWFVTQRNFYEPQIITTDNTFVSGNCDVVIGIVNNTVYDPLQPELDSFKEELDKYFKNHTSPDVDLGDISGINASVVNIQKEIDRLNEVAKNLNESLIDLQELGKYEQYIKGGGSGGGQIYEGKLTAEGLRFGIVASRFNHALVDRLVEGAIDAIVRHGGREEDITLVRVPGSWEIPVAAGELARKEDIDAVIAIGVLIRGATPHFDYIASEVSKGLADLSLELRKPITFGVITADTLEQAIERAGTKHGNKGWEAALSAIEMANLFKSLR

SEQ ID NO: 3928 - protein, 1371 aa, Artificial Sequence
  SARS-CoV-2/China/WF0004/2020__EPI_ISL_413694 spike protein (1-1211)(K986P_V987P_ H1048Q_H1064N_ H1083N_H1101N) LumSynth construct
MFVFLVLLPLVSSQCVNLTTRTQLPPAYTNSFTRGVYYPDKVFRSSVLHSTQDLFLPFFSNVTWFHAIHVSGTNGTKRFDNPVLPFNDGVYFASTEKSNIIRGWIFGTTLDSKTQSLLIVNNATNVVIKVCEFQFCNDPFLGVYYHKNNKSWTESEFRVYSSANNCTFEYVSQPFLMDLEGKQGNFKNLREFVFKNIDGYFKIYSKHTPINLVRDLPQGFSALEPLVDLPIGINITRFQTLLALHRSYLTPGDSSSGWTAGAAAYYVGYLQPRTFLLKYNENGTITDAVDCALDPLSETKCTLKSFTVEKGIYQTSNFRVQPTESIVRFPNITNLCPFGEVFNATRFASVYAWNRKRISNCVADYSVLYNSASFSTFKCYGVSPTKLNDLCFTNVYADSFVIRGDEVRQIAPGQTGKIADYNYKLPDDFTGCVIAWNSNNLDSKVGGNYNYLYRLFRKSNLKPFERDISTEIYQAGSTPCNGVEGFNCYFPLQSYGFQPTNGVGYQPYRVVVLSFELLHAPATVCGPKKSTNLVKNKCVNFNFNGLTGTGVLTESNKKFLPFQQFGRDIADTTDAVRDPQTLEILDITPCSFGGVSVITPGTNTSNQVAVLYQDVNCTEVPVAIHADQLTPTWRVYSTGSNVFQTRAGCLIGAEHVNNSYECDIPIGAGICASYQTQTNSPRRARSVASQSIIAYTMSLGAENSVAYSNNSIAIPTNFTISVTTEILPVSMTKTSVDCTMYICGDSTECSNLLLQYGSFCTQLNRALTGIAVEQDKNTQEVFAQVKQIYKTPPIKDFGGFNFSQILPDPSKPSKRSFIEDLLFNKVTLADAGFIKQYGDCLGDIAARDLICAQKFNGLTVLPPLLTDEMIAQYTSALLAGTITSGWTFGAGAALQIPFAMQMAYRFNGIGVTQNVLYENQKLIANQFNSAIGKIQDSLSSTASALGKLQDVVNQNAQALNTLVKQLSSNFGAISSVLNDILSRLDPPEAEVQIDRLITGRLQSLQTYVTQQLIRAAEIRASANLAATKMSECVLGQSKRFDFCGKGYQLMSFPQSAPHGVVFLNVTYVPAQEKNFTTAPAICNDGKAHFPREGVFVSNGTNWFVTQRNFYEPQIITTDNTFVSGNCDVVIGIVNNTVYDPLQPELDSFKEELDKYFKNHTSPDVDLGDISGINASVVNIQKEIDRLNEVAKNLNESLIDLQELGKYEQYIKGGGSGGGQIYEGKLTAEGLRFGIVASRFNHALVDRLVEGAIDAIVRHGGREEDITLVRVPGSWEIPVAAGELARKEDIDAVIAIGVLIRGATPHFDYIASEVSKGLADLSLELRKPITFGVITADTLEQAIERAGTKHGNKGWEAALSAIEMANLFKSLR

SEQ ID NO: 3929 - protein, 1371 aa, Artificial Sequence
  SARS-CoV-2/China/WF0028/2020__EPI_ISL_413791 spike protein (1-1211)(K986P_V987P_ H1048Q_H1064N_ H1083N_H1101N) LumSynth construct
MFVFLVLLPLVSSQCVNLTTRTQLPPAYTNSFTRGVYYPDKVFRSSVLHSTQDLFLPFFSNVTWFHAIHVSGTNGTKRFDNPVLPFNDGVYFASTEKSNIIRGWIFGTTLDSKTQSLLIVNNATNVVIKVCEFQFCNDPFLGVYYHKNNKSWMESEFRVYSSANNCTFEYVSQPFLMDLEGKQGNFKNLREFVFKNIDGYFKIYSKHTPINLVRDLPQGFSALEPLVDLPIGINITRFQTLLALHRSYLTPGDSSSGWTAGAAAYYVGYLQPRTFLLKYNENGTITDAVDCALDPLSETKCTLKSFTVEKGIYQTSNFRVQPTESIVRFPNITNLCPFGEVFNATRFASVYAWNRKRISNCVADYSVLYNSASFSTFKCYGVSPTKLNDLCFTNVYADSFVIRGDEVRQIAPGQTGKIADYNYKLPDDFTGCVIAWNSNNLDSKVGGNYNYLYRLFRKSNLKPFERDISTEIYQAGSTPCNGVEGFNCYFPLQSYGFQPTNGVGYQPYRVVVLSFELLHAPATVCGPKKSTNLVKNKCVNFNFNGLTGTGVLTESNKKFLPFQQFGRDIADTTDAVRDPQTLEILDITPCSFGGVSVITPGTNTSNQVAVLYQDVNCTEVPVAIHADQLTPTWRVYSTGSNVFQTRAGCLIGAEHVNNSYECDIPIGAGICASYQTQTNSPRRARSVASQSIIAYTMSLGAENSVAYSNNSIAIPTNFTISVTTEILPVSMTKTSVDCTMYICGDSTECSNLLLQYGSFCTQLNRALTGIAVEQDKNTQEVFAQVKQIYKTPPIKDFGGFNFSQILPDPSKPSKRSFIEDLLFNKVTLADAGFIKQYGDCLGDIAARDLICAQKFNGLTVLPPLLTDEMIAQYTSALLAGTITSGWTFGAGAALQIPFAMQMAYRFNGIGVTQNVLYENQKLIANQFNSAIGKIQDSLSSTASALGKLQDVVNQNAQALNTLVKQLSSNFGAISSVLNDILSRLDPPEAEVQIDRLITGRLQSLQTYVTQQLIRAAEIRASANLAATKMSECVLGQSKRVDFCGKGYQLMSFPQSAPHGVVFLNVTYVPAQEKNFTTAPAICNDGKAHFPREGVFVSNGTNWFVTQRNFYEPQIITTDNTFVSGNCDVVIGIVNNTVYDPLQPELESFKEELDKYFKNHTSPDVDLGDISGINASVVNIQKEIDRLNEVAKNLNESLIDLQELGKYEQYIKGGGSGGGQIYEGKLTAEGLRFGIVASRFNHALVDRLVEGAIDAIVRHGGREEDITLVRVPGSWEIPVAAGELARKEDIDAVIAIGVLIRGATPHFDYIASEVSKGLADLSLELRKPITFGVITADTLEQAIERAGTKHGNKGWEAALSAIEMANLFKSLR

SEQ ID NO: 3930 - protein, 1371 aa, Artificial Sequence
  SARS-CoV-2/2019-nCoV/USA-CruiseA-18/2020__MT159716.1 spike protein (1-1211)(K986P_V987P_ H1048Q_H1064N_ H1083N_H1101N) LumSynth construct
MFVFLVLLPLVSSQCVNLTTRTQLPPAYTNSFTRGVYYPDKVFRSSVLHSTQDLFLPFFSNVTWFHAIHVSGTNGTKRFDNPVLPFNDGVYFASTEKSNIIRGWIFGTTLDSKTQSLLIVNNATNVVIKVCEFQFCNDPFLGVYYHKNNKSWMESELRVYSSANNCTFEYVSQPFLMDLEGKQGNFKNLREFVFKNIDGYFKIYSKHTPINLVRDLPQGFSALEPLVDLPIGINITRFQTLLALHRSYLTPGDSSSGWTAGAAAYYVGYLQPRTFLLKYNENGTITDAVDCALDPLSETKCTLKSFTVEKGIYQTSNFRVQPTESIVRFPNITNLCPFGEVFNATRFASVYAWNRKRISNCVADYSVLYNSASFSTFKCYGVSPTKLNDLCFTNVYADSFVIRGDEVRQIAPGQTGKIADYNYKLPDDFTGCVIAWNSNNLDSKVGGNYNYLYRLFRKSNLKPFERDISTEIYQAGSTPCNGVEGFNCYFPLQSYGFQPTNGVGYQPYRVVVLSFELLHAPATVCGPKKSTNLVKNKCVNFNFNGLTGTGVLTESNKKFLPFQQFGRDIADTTDAVRDPQTLEILDITPCSFGGVSVITPGTNTSNQVAVLYQDVNCTEVPVAIHADQLTPTWRVYSTGSNVFQTRAGCLIGAEHVNNSYECDIPIGAGICASYQTQTNSPRRARSVASQSIIAYTMSLGAENSVAYSNNSIAIPTNFTISVTTEILPVSMTKTSVDCTMYICGDSTECSNLLLQYGSFCTQLNRALTGIAVEQDKNTQEVFAQVKQIYKTPPIKDFGGFNFSQILPDPSKPSKRSFIEDLLFNKVTLADAGFIKQYGDCLGDIAARDLICAQKFNGLTVLPPLLTDEMIAQYTSALLAGTITSGWTFGAGAALQIPFAMQMAYRFNGIGVTQNVLYENQKLIANQFNSAIGKIQDSLSSTASALGKLQDVVNQNAQALNTLVKQLSSNFGAISSVLNDILSRLDPPEAEVQIDRLITGRLQSLQTYVTQQLIRAAEIRASANLAATKMSECVLGQSKRVDFCGKGYQLMSFPQSAPHGVVFLNVTYVPAQEKNFTTAPAICNDGKAHFPREGVFVSNGTNWFVTQRNFYEPQIITTDNTFVSGNCDVVIGIVNNTVYDPLQPELDSFKEELDKYFKNHTSPDVDLGDISGINASVVNIQKEIDRLNEVAKNLNESLIDLQELGKYEQYIKGGGSGGGQIYEGKLTAEGLRFGIVASRFNHALVDRLVEGAIDAIVRHGGREEDITLVRVPGSWEIPVAAGELARKEDIDAVIAIGVLIRGATPHFDYIASEVSKGLADLSLELRKPITFGVITADTLEQAIERAGTKHGNKGWEAALSAIEMANLFKSLR

SEQ ID NO: 3931 - protein, 1371 aa, Artificial Sequence
  SARS-CoV-2/SARS-CoV-2/Yunnan-01/human/2020/CHN__MT049951.1 spike protein (1-1211)(K986P_V987P_ H1048Q_H1064N_ H1083N_H1101N) LumSynth construct
MFVFLVLLPLVSSQCVNLTTRTQLPPANTNSFTRGVYYPDKVFRSSVLHSTQDLFLPFFSNVTWFHAIHVSGTNGTKRFDNPVLPFNDGVYFASTEKSNIIRGWIFGTTLDSKTQSLLIVNNATNVVIKVCEFQFCNDPFLGVYYHKNNKSWMESEFRVYSSANNCTFEYVSQPFLMDLEGKQGNFKNLREFVFKNIDGYFKIYSKHTPINLVRDLPQGFSALEPLVDLPIGINITRFQTLLALHRSYLTPGDSSSGWTAGAAAYYVGYLQPRTFLLKYNENGTITDAVDCALDPLSETKCTLKSFTVEKGIYQTSNFRVQPTESIVRFPNITNLCPFGEVFNATRFASVYAWNRKRISNCVADYSVLYNSASFSTFKCYGVSPTKLNDLCFTNVYADSFVIRGDEVRQIAPGQTGKIADYNYKLPDDFTGCVIAWNSNNLDSKVGGNYNYLYRLFRKSNLKPFERDISTEIYQAGSTPCNGVEGFNCYFPLQSYGFQPTNGVGYQPYRVVVLSFELLHAPATVCGPKKSTNLVKNKCVNFNFNGLTGTGVLTESNKKFLPFQQFGRDIADTTDAVRDPQTLEILDITPCSFGGVSVITPGTNTSNQVAVLYQDVNCTEVPVAIHADQLTPTWRVYSTGSNVFQTRAGCLIGAEHVNNSYECDIPIGAGICASYQTQTNSPRRARSVASQSIIAYTMSLGAENSVAYSNNSIAIPTNFTISVTTEILPVSMTKTSVDCTMYICGDSTECSNLLLQYGSFCTQLNRALTGIAVEQDKNTQEVFAQVKQIYKTPPIKDFGGFNFSQILPDPSKPSKRSFIEDLLFNKVTLADAGFIKQYGDCLGDIAARDLICAQKFNGLTVLPPLLTDEMIAQYTSALLAGTITSGWTFGAGAALQIPFAMQMAYRFNGIGVTQNVLYENQKLIANQFNSAIGKIQDSLSSTASALGKLQDVVNQNAQALNTLVKQLSSNFGAISSVLNDILSRLDPPEAEVQIDRLITGRLQSLQTYVTQQLIRAAEIRASANLAATKMSECVLGQSKRVDFCGKGYQLMSFPQSAPHGVVFLNVTYVPAQEKNFTTAPAICNDGKAHFPREGVFVSNGTNWFVTQRNFYEPQIITTDNTFVSGNCDVVIGIVNNTVYDPLQPELDSFKEELDKYFKNHTSPDVDLGDISGINASVVNIQKEIDRLNEVAKNLNESLIDLQELGKYEQYIKGGGSGGGQIYEGKLTAEGLRFGIVASRFNHALVDRLVEGAIDAIVRHGGREEDITLVRVPGSWEIPVAAGELARKEDIDAVIAIGVLIRGATPHFDYIASEVSKGLADLSLELRKPITFGVITADTLEQAIERAGTKHGNKGWEAALSAIEMANLFKSLR

SEQ ID NO: 3932 - protein, 1371 aa, Artificial Sequence
  SARS-CoV-2/USA/WA-UW292/2020__EPI_ISL_418077 spike protein (1-1211)(K986P_V987P_ H1048Q_H1064N_ H1083N_H1101N) LumSynth construct
MFVFLVLLPLVSSQCVNLTTRTQLPPAYTNSFTRGVYYPDKVFRSSVLHSTQDLFLPFFSNVTWFHAIHVSGTNGTKRFDNPVLPFNDGVYFASTEKSNIIRGWIFGTTLDSKTQSLLIVNNATNVVIKVCEFQFCNDPFLGVYYHKNNKSWMESEFRVYSSANNCTFEYVSQPFLMDLEGKQGNFKNLREFVFKNIDGYFKIYSKHTPINLVRDLPQGFSALEPLVDLPIGINITRFQTLLALHRSYLTPGDSSSGWTAGAAAYYVGYLQPRTFLLKYNENGTITDAVDCALDPLSETKCTLKSFTVEKGIYQTSNFRVQPTESIVRFPNITNLCPFGEVFNATRFASVYAWNRKRISNCVADYSVLYNSASFSTFKCYGVSPTKLNDLCFTNVYADSFVIRGDEVRQIAPGQTGKIADYNYKLPDDFTGCVIAWNSNNLDSKVGGNYNYLYRLFRKSNLKPFERDISTEIYQASSTPCNGVEGFNCYFPLQSYGFQPTNGVGYQPYRVVVLSFELLHAPATVCGPKKSTNLVKNKCVNFNFNGLTGTGVLTESNKKFLPFQQFGRDIADTTDAVRDPQTLEILDITPCSFGGVSVITPGTNTSNQVAVLYQDVNCTEVPVAIHADQLTPTWRVYSTGSNVFQTRAGCLIGAEHVNNSYECDIPIGAGICASYQTQTNSPRRARSVASQSIIAYTMSLGAENSVAYSNNSIAIPTNFTISVTTEILPVSMTKTSVDCTMYICGDSTECSNLLLQYGSFCTQLNRALTGIAVEQDKNTQEVFAQVKQIYKTPPIKDFGGFNFSQILPDPSKPSKRSFIEDLLFNKVTLADAGFIKQYGDCLGDIAARDLICAQKFNGLTVLPPLLTDEMIAQYTSALLAGTITSGWTFGAGAALQIPFAMQMAYRFNGIGVTQNVLYENQKLIANQFNSAIGKIQDSLSSTASALGKLQDVVNQNAQALNTLVKQLSSNFGAISSVLNDILSRLDPPEAEVQIDRLITGRLQSLQTYVTQQLIRAAEIRASANLAATKMSECVLGQSKRVDFCGKGYQLMSFPQSAPHGVVFLNVTYVPAQEKNFTTAPAICNDGKAHFPREGVFVSNGTNWFVTQRNFYEPQIITTDNTFVSGNCDVVIGIVNNTVYDPLQPELDSFKEELDKYFKNHTSPDVDLGDISGINASVVNIQKEIDRLNEVAKNLNESLIDLQELGKYEQYIKGGGSGGGQIYEGKLTAEGLRFGIVASRFNHALVDRLVEGAIDAIVRHGGREEDITLVRVPGSWEIPVAAGELARKEDIDAVIAIGVLIRGATPHFDYIASEVSKGLADLSLELRKPITFGVITADTLEQAIERAGTKHGNKGWEAALSAIEMANLFKSLR

SEQ ID NO: 3933 - protein, 1371 aa, Artificial Sequence
  SARS-CoV-2/Iceland/192/2020__EPI_ISL_417819 spike protein (1-1211)(K986P_V987P_ H1048Q_H1064N_ H1083N_H1101N) LumSynth construct
MFVFFVLLPLVSSQCVNLTTRTQLPPAYTNSFTRGVYYPDKVFRSSVLHSTQDLFLPFFSNVTWFHAIHVSGTNGTKRFDNPVLPFNDGVYFASTEKSNIIRGWIFGTTLDSKTQSLLIVNNATNVVIKVCEFQFCNDPFLGVYYHKNNKSWMESEFRVYSSANNCTFEYVSQPFLMDLEGKQGNFKNLREFVFKNIDGYFKIYSKHTPINLVRDLPQGFSALEPLVDLPIGINITRFQTLLALHRSYLTPGDSSSGWTAGAAAYYVGYLQPRTFLLKYNENGTITDAVDCALDPLSETKCTLKSFTVEKGIYQTSNFRVQPTESIVRFPNITNLCPFGEVFNATRFASVYAWNRKRISNCVADYSVLYNSASFSTFKCYGVSPTKLNDLCFTNVYADSFVIRGDEVRQIAPGQTGKIADYNYKLPDDFTGCVIAWNSNNLDSKVGGNYNYLYRLFRKSNLKPFERDISTEIYQAGSTPCNGVEGFNCYFPLQSYGFQPTNGVGYQPYRVVVLSFELLHAPATVCGPKKSTNLVKNKCVNFNFNGLTGTGVLTESNKKFLPFQQFGRDIADTTDAVRDPQTLEILDITPCSFGGVSVITPGTNTSNQVAVLYQGVNCTEVPVAIHADQLTPTWRVYSTGSNVFQTRAGCLIGAEHVNNSYECDIPIGAGICASYQTQTNSPRRARSVASQSIIAYTMSLGAENSVAYSNNSIAIPTNFTISVTTEILPVSMTKTSVDCTMYICGDSTECSNLLLQYGSFCTQLNRALTGIAVEQDKNTQEVFAQVKQIYKTPPIKDFGGFNFSQILPDPSKPSKRSFIEDLLFNKVTLADAGFIKQYGDCLGDIAARDLICAQKFNGLTVLPPLLTDEMIAQYTSALLAGTITSGWTFGAGAALQIPFAMQMAYRFNGIGVTQNVLYENQKLIANQFNSAIGKIQDSLSSTASALGKLQDVVNQNAQALNTLVKQLSSNFGAISSVLNDILSRLDPPEAEVQIDRLITGRLQSLQTYVTQQLIRAAEIRASANLAATKMSECVLGQSKRVDFCGKGYQLMSFPQSAPHGVVFLNVTYVPAQEKNFTTAPAICNDGKAHFPREGVFVSNGTNWFVTQRNFYEPQIITTDNTFVSGNCDVVIGIVNNTVYDPLQPELDSFKEELDKYFKNHTSPDVDLGDISGINASVVNIQKEIDRLNEVAKNLNESLIDLQELGKYEQYIKGGGSGGGQIYEGKLTAEGLRFGIVASRFNHALVDRLVEGAIDAIVRHGGREEDITLVRVPGSWEIPVAAGELARKEDIDAVIAIGVLIRGATPHFDYIASEVSKGLADLSLELRKPITFGVITADTLEQAIERAGTKHGNKGWEAALSAIEMANLFKSLR

SEQ ID NO: 3934 - protein, 1371 aa, Artificial Sequence
  SARS-CoV-2/Belgium/ULG-6939/2020__EPI_ISL_417020 spike protein (1-1211)(K986P_V987P_ H1048Q_H1064N_ H1083N_H1101N) LumSynth construct
MFVFLVLLPLVSSQCVNLTTRTQLPPAYTNSFTRGVYYPDKVFRSSVLHSTQDLFLPFFSNVTWFHAIHVSGTNGTKRFDNPVLPFNDGVYFASTEKSNIIRGWIFGTTLDSKTQSLLIVNNATNVVIKVCEFQFCNDPFLGVYYHKNNKSWMESEFRVYSSANNCTFEYVSQPFLMDLEGKQGNFKNLREFVFKNIDGYFKIYSKHTPINLVRDLPQGFSALEPLVDLPIGINITRFQTLLALHRSYLTPGDSSSGWTAGAAAYYVGYLQPRTFLLKYNENGTITDAVDCALDPLSETKCTLKSFTVEKGIYQTSNFRVQPTESIVRFPNITNLCPFGEVFNATRFASVYAWNRKRISNCVADYSVLYNSASFSTFKCYGVSPTKLNDLCFTNVYADSFVIRGDEVRQIAPGQTGKIADYNYKLPDDFTGCVIAWNSNNLDSKVGGNYNYLYRLFRKSNLKPFERDISTEIYQAGSTPCNGVEGFNCYFPLQSYGFQPTNGVGYQPYRVVVLSFELLHAPATVCGPKKSTNLVKNKCVNFNFNGLTGTGVLTESNKKFLPFQQFGRDIADTTDAVRDPQTLEILDITPCSFGGVSVITPGTNTSNQVAVLYQGVNCTEVPVAIHADQLTPTWRVYSTGSNVFQTRAGCLIGAEHVNNSYECDIPIGAGICASYQTQTNSPRRARSVASQSIIAYTMSLGAENSVVYSNNSIAIPTNFTISVTTEILPVSMTKTSVDCTMYICGDSTECSNLLLQYGSFCTQLNRALTGIAVEQDKNTQEVFAQVKQIYKTPPIKDFGGFNFSQILPDPSKPSKRSFIEDLLFNKVTLADAGFIKQYGDCLGDIAARDLICAQKFNGLTVLPPLLTDEMIAQYTSALLAGTITSGWTFGAGAALQIPFAMQMAYRFNGIGVTQNVLYENQKLIANQFNSAIGKIQDSLSSTASALGKLQDVVNQNAQALNTLVKQLSSNFGAISSVLNDILSRLDPPEAEVQIDRLITGRLQSLQTYVTQQLIRAAEIRASANLAATKMSECVLGQSKRVDFCGKGYQLMSFPQSAPHGVVFLNVTYVPAQEKNFTTAPAICNDGKAHFPREGVFVSNGTNWFVTQRNFYEPQIITTDNTFVSGNCDVVIGIVNNTVYDPLQPELDSFKEELDKYFKNHTSPDVDLGDISGINASVVNIQKEIDRLNEVAKNLNESLIDLQELGKYEQYIKGGGSGGGQIYEGKLTAEGLRFGIVASRFNHALVDRLVEGAIDAIVRHGGREEDITLVRVPGSWEIPVAAGELARKEDIDAVIAIGVLIRGATPHFDYIASEVSKGLADLSLELRKPITFGVITADTLEQAIERAGTKHGNKGWEAALSAIEMANLFKSLR

SEQ ID NO: 3935 - protein, 1371 aa, Artificial Sequence
  SARS-CoV-2/France/HF2496/2020__EPI_ISL_418231 spike protein (1-1211)(K986P_V987P_ H1048Q_H1064N_ H1083N_H1101N) LumSynth construct
MFVFLVLLPLVSSQCVNLTTRTQLPPAYTNSFTRGVYYPDKVFRSSVLHSTQDLFLPFFSNVTWFHAIHVSGTNGTKRFDNPVLPFNDGVYFASTEKSNIIRGWIFGTTLDSKTQSLLIVNNATNVVIKVCEFQFCNDPFLGVYYHKNNKSWMESEFRVYSSANNCTFEYVSQPFLMDLEGKQGNFKNLREFVFKNIDGYFKIYSKHTPINLVRDLPQGFSALEPLVDLPIGINITRFQTLLALHRSYLTPGDSSSGWTAGAAAYYVGYLQPRTFLLKYNENGTITDAVDCALDPLSETKCTLKSFTVEKGIYQTSNFRVQPTESIVRFPNITNLCPFGEVFNATRFASVYAWNRKRISNCVADYSVLYNSASFSTFKCYGVSPTKLNDLCFTNVYADSFVIRGDEVRQIAPGQTGKIADYNYKLPDDFTGCVIAWNSNNLDSKVGGNYNYLYRLFRKSNLKPFERDISTEIYQAGSTPCNGVEGFNCYFPLQSYGFQPTNGVGYQPYRVVVLSFELLHAPATVCGPKKSTNLVKNKCVNFNFNGLTGTGVLTESNKKFLPFQQFGRDIADTTDAVRDPQTLEILDITPCSFGGVSVITPGTNTSNQVAVLYQGVNCTEVPVAIHADQLTPTWRVYSTGSNVFQTRAGCLIGAEHVNNSYECDIPIGAGICASYQTQTNSPRRARSVASQSIIAYTMSLGAENSVAYSNNSIAIPTNFTISVTTEILPVSMTKTSVDCTMYICGDSTECSNLLLQYGSFCTQLNRALTGIAVEQDKNTQEVFAQVKQIYKTPPIKDFGGFNFSQILPDPSKPSKRSFIEDLLFNKVTLADAGFIKQYGDCLGDIVARDLICAQKFNGLTVLPPLLTDEMIAQYTSALLAGTITSGWTFGAGAALQIPFAMQMAYRFNGIGVTQNVLYENQKLIANQFNSAIGKIQDSLSSTASALGKLQDVVNQNAQALNTLVKQLSSNFGAISSVLNDILSRLDPPEAEVQIDRLITGRLQSLQTYVTQQLIRAAEIRASANLAATKMSECVLGQSKRVDFCGKGYQLMSFPQSAPHGVVFLNVTYVPAQEKNFTTAPAICNDGKAHFPREGVFVSNGTNWFVTQRNFYEPQIITTDNTFVSGNCDVVIGIVNNTVYDPLQPELDSFKEELDKYFKNHTSPDVDLGDISGINASVVNIQKEIDRLNEVAKNLNESLIDLQELGKYEQYIKGGGSGGGQIYEGKLTAEGLRFGIVASRFNHALVDRLVEGAIDAIVRHGGREEDITLVRVPGSWEIPVAAGELARKEDIDAVIAIGVLIRGATPHFDYIASEVSKGLADLSLELRKPITFGVITADTLEQAIERAGTKHGNKGWEAALSAIEMANLFKSLR

SEQ ID NO: 3936 - protein, 1371 aa, Artificial Sequence
  SARS-CoV-2/USA/WA-UW291/2020__EPI_ISL_418076 spike protein (1-1211)(K986P_V987P_ H1048Q_H1064N_ H1083N_H1101N) LumSynth construct
MFVFLVLLPLVSSQCVNLTTRTQLPPAYTNSFTRGVYYPDKVFRSSVLHSTQDLFLPFFSNVTWFHAIHVSGTNGTKRFDNPVLPFNDGVYFASTEKSNIIRGWIFGTTLDSKTQSLLIVNNATNVVIKVCEFQFCNDPFLGVYYHKNNKSWMESEFRVYSSANNCTFEYVSQPFLMDLEGKQGNFKNLREFVFKNIDGYFKIYSKHTPINLVRDLPQGFSALEPLVDLPIGINITRFQTLLALHRSYLTPGDSSSGWTAGAAAYYVGYLQPRTFLLKYNENGTITDAVDCALDPLSETKCTLKSFTVEKGIYQTSNFRVQPTESIVRFPNITNLCPFGEVFNATRFASVYAWNRKRISNCVADYSVLYNSASFSTFKCYGVSPTKLNDLCFTNVYADSFVIRGDEVRQIAPGQTGKIADYNYKLPDDFTGCVIAWNSNNLDSKVGGNYNYLYRLFRKSNLKPFERDISTEIYQAGSTPCNGVEGFNCYFPLQSYGFQPTNGVGYQPYRVVVLSFELLHAPATVCGPKKSTNLVKNKCVNFNFNGLTGTGVLTESNKKFLPFQQFGRDIADTTDAVRDPQTLEILDITPCSFGGVSVITPGTNTSNQVAVLYQGVNCTEVPVAIHADQLTPTWRVYSTGSNVFQTRAGCLIGAEHVNNSYECDIPIGAGICASYQTQTNSPRRARSVASQSIIAYTMSLGAENSVAYSNNSIAIPTNFTISVTTEILPVSMTKTSVDCTMYICGDSTECSNLLLQYGSFCTQLNRALTGIAVEQDKNTQEVFAQVKQIYKTPPIKDFGGFNFSQILPDPSKPSKRSFIEDLLFNKVTLADAGFIKQYGDCLGDIAARDLICAQKFNGLTVLPPLLTDEMIAQYTSALLAGTITSGWTFGAGAALQIPFAMQMAYRFNGIGVTQNVLYENQKLIANQFNSAIGKIQYSLSSTASALGKLQDVVNQNAQALNTLVKQLSSNFGAISSVLNDILSRLDPPEAEVQIDRLITGRLQSLQTYVTQQLIRAAEIRASANLAATKMSECVLGQSKRVDFCGKGYQLMSFPQSAPHGVVFLNVTYVPAQEKNFTTAPAICNDGKAHFPREGVFVSNGTNWFVTQRNFYEPQIITTDNTFVSGNCDVVIGIVNNTVYDPLQPELDSFKEELDKYFKNHTSPDVDLGDISGINASVVNIQKEIDRLNEVAKNLNESLIDLQELGKYEQYIKGGGSGGGQIYEGKLTAEGLRFGIVASRFNHALVDRLVEGAIDAIVRHGGREEDITLVRVPGSWEIPVAAGELARKEDIDAVIAIGVLIRGATPHFDYIASEVSKGLADLSLELRKPITFGVITADTLEQAIERAGTKHGNKGWEAALSAIEMANLFKSLR

SEQ ID NO: 3937 - protein, 1371 aa, Artificial Sequence; identical to SEQ ID NO: 3900
  SARS-CoV-2/Portugal/PT0034/2020__EPI_ISL_418019 spike protein (1-1211)(K986P_V987P_ H1048Q_H1064N_ H1083N_H1101N) LumSynth construct

SEQ ID NO: 3938 - protein, 1371 aa, Artificial Sequence
  SARS-CoV-2/Iceland/202/2020__EPI_ISL_417750 spike protein (1-1211)(K986P_V987P_ H1048Q_H1064N_ H1083N_H1101N) LumSynth construct
MFVFLVLLPLVSSQCVNLTTRTQLPPAYTNSFTRGVYYPDKVFRSSVLHSTQDLFLPFFSNVTWFHAIHVSGTNGTKRFDNPVLPFNDGVYFASTEKSNIIRGWIFGTTLDSKTQSLLIVNNATNVVIKVCEFQFCNDPFLGVYYHKNNKSWMESEFRVYSSANNCTFEYVSQPFLMDLEGKQGNFKNLREFVFKNIDGYFKIYSKHTPINLVRDLPQGFSALEPLVDLPIGINITRFQTLLALHRSYLTPGDSSSGWTAGAAAYYVGYLQPRTFLLKYNENGTITDAVDCALDPLSETKCTLKSFTVEKGIYQTSNFRVQPTESIVRFPNITNLCPFGEVFNATRFASVYAWNRKRISNCVADYSVLYNSASFSTFKCYGVSPTKLNDLCFTNVYADSFVIRGDEVRQIAPGQTGKIADYNYKLPDDFTGCVIAWNSNNLDSKVGGNYNYLYRLFRKSNLKPFERDISTEIYQAGSTPCNGVEGFNCYFPLQSYGFQPTNGVGYQPYRVVVLSFELLHAPATVCGPKKSTNLVKNKCVNFNFNGLTGTGVLTESNKKFLPFQQFGRDIADTTDAVRDPQTLEILDITPCSFGGVSVITPGTNTSNQVAVLYQDVNCTEVPVAIHADQLTPTWRVYSTGSNVFQTRAGCLIGAEHVNNSYECDIPIGAGICASYQTQTNSPRRARSVASQSIIAYTMSLGAENSVAYSNNSIAIPTNFTISVTTEILPVSMTKTSVDCTMYICGDSTECSNLLLQYGSFCTQLNRALTGIAVEQDKNTQEVFAQVKQIYKTPPIKDFGGFNFSQILPDPSKPSKRSFIEDLLFNKVTLADAGFIKQYGDCLGDIAARDLICAQKFNGLTVLPPLLTDEMIAQYTSALLAGTITSGWTFGAGAALQIPFAMQMAYRFNGIGVTQNVLYENQKLIANQFNSAIGKIQDSLSSTASALGKLQDVVNQNAQALNTLVKQLSSNFGAISSVLNDILSRLDPPEAEVQIDRLITGRLQSLQTYVTQQLIRAAEIRASANLAATKMSECVLGQSKRVDFCGKGYQLMSFPQSAPHGVVFLNVTYVPAQEKNFTTAPAICNDGKAHFPREGVFVSNGTNWFVTQRNFYEPQIITTDNTFVSGNCDVVIGIVNNTVYDPLQPELDSFKEELDKYFKNHTSPDVDLGDIPGINASVVNIQKEIDRLNEVAKNLNESLIDLQELGKYEQYIKGGGSGGGQIYEGKLTAEGLRFGIVASRFNHALVDRLVEGAIDAIVRHGGREEDITLVRVPGSWEIPVAAGELARKEDIDAVIAIGVLIRGATPHFDYIASEVSKGLADLSLELRKPITFGVITADTLEQAIERAGTKHGNKGWEAALSAIEMANLFKSLR

SEQ ID NO: 3939 - protein, 1371 aa, Artificial Sequence
  SARS-CoV-2/USA/WA-UW261/2020__EPI_ISL_418046 spike protein (1-1211)(K986P_V987P_ H1048Q_H1064N_ H1083N_H1101N) LumSynth construct
MFVFLVLLPLVSSQCVNLTTRTQLPPAYTNSFTRGVYYPDKVFRSSVLHSTQDLFLPFFSNVTWFHAIHVSGTNGTKRFDNPVLPFNDGVYFASTEKSNIIRGWIFGTTLDSKTQSLLIVNNATNVVIKVCEFQFCNDPFLGVYYHKNNKSWMESEFRVYSSANNCTFEYVSQPFLMDLEGKQGNFKNLREFVFKNIDGYFKIYSKHTPINLVRDLPQGFSALEPLVDLPIGINITRFQTLLALHRSYLTPGDSSSGWTAGAAAYYVGYLQPRTFLLKYNENGTITDAVDCALDPLSETKCTLKSFTVEKGIYQTSNFRVQPTESIVRFPNITNLCPFGEVFNATRFTSVYAWNRKRISNCVADYSVLYNSASFSTFKCYGVSPTKLNDLCFTNVYADSFVIRGDEVRQIAPGQTGKIADYNYKLPDDFTGCVIAWNSNNLDSKVGGNYNYLYRLFRKSNLKPFERDISTEIYQAGSTPCNGVEGFNCYFPLQSYGFQPTNGVGYQPYRVVVLSFELLHAPATVCGPKKSTNLVKNKCVNFNFNGLTGTGVLTESNKKFLPFQQFGRDIADTTDAVRDPQTLEILDITPCSFGGVSVITPGTNTSNQVAVLYQDVNCTEVPVAIHADQLTPTWRVYSTGSNVFQTRAGCLIGAEHVNNSYECDIPIGAGICASYQTQTNSPRRARSVASQSIIAYTMSLGAENSVAYSNNSIAIPTNFTISVTTEILPVSMTKTSVDCTMYICGDSTECSNLLLQYGSFCTQLNRALTGIAVEQDKNTQEVFAQVKQIYKTPPIKDFGGFNFSQILPDPSKPSKRSFIEDLLFNKVTLADAGFIKQYGDCLGDIAARDLICAQKFNGLTVLPPLLTDEMIAQYTSALLAGTITSGWTFGAGAALQIPFAMQMAYRFNGIGVTQNVLYENQKLIANQFNSAIGKIQDSLSSTASALGKLQDVVNQNAQALNTLVKQLSSNFGAISSVLNDILSRLDPPEAEVQIDRLITGRLQSLQTYVTQQLIRAAEIRASANLAATKMSECVLGQSKRVDFCGKGYQLMSFPQSAPHGVVFLNVTYVPAQEKNFTTAPAICNDGKAHFPREGVFVSNGTNWFVTQRNFYEPQIITTDNTFVSGNCDVVIGIVNNTVYDPLQPELDSFKEELDKYFKNHTSPDVDLGDISGINASVVNIQKEIDRLNEVAKNLNESLIDLQELGKYEQYIKGGGSGGGQIYEGKLTAEGLRFGIVASRFNHALVDRLVEGAIDAIVRHGGREEDITLVRVPGSWEIPVAAGELARKEDIDAVIAIGVLIRGATPHFDYIASEVSKGLADLSLELRKPITFGVITADTLEQAIERAGTKHGNKGWEAALSAIEMANLFKSLR

SEQ ID NO: 3940 - protein, 1371 aa, Artificial Sequence
  SARS-CoV-2/Portugal/PT0035/2020__EPI_ISL_418020 spike protein (1-1211)(K986P_V987P_ H1048Q_H1064N_ H1083N_H1101N) LumSynth construct
MFVFLVLLPLVSSQCVNLTTRTQLPPAYTNSFTRGVYYPDKVFRSSVLHSTQDLFLPFFSNVTWFHAIHVSGTNGTKRFDNPVLPFNDGVYFASTEKSNIIRGWIFGTTLDSKTQSLLIVNNATNVVIKVCEFQFCNDPFLGVYYHKNNKSWMESEFRVYSSANNCTFEYVSQPFLMDLEGKQGNFKNLREFVFKNIDGYFKIYSKHTPINLVRDLPQGFSALEPLVDLPIGINITRFQTLLALHRSYLTPGDSSSGWTAGAAAYYVGYLQPRTFLLKYNENGTITDAVDCALDPLSETKCTLKSFTVEKGIYQTSNFRVQPTESIVRFPNITNLCPFGEVFNATRFASVYAWNRKRISNCVADYSVLYNSASFSTFKCYGVSPTKLNDLCFTNVYADSFVIRGDEVRQIAPGQTGKIADYNYKLPDDFTGCVIAWNSNNLDSKVGGNYNYLYRLFRKSNLKPFERDISTEIYQAGSTPCNGVEGFNCYFPLQSYGFQPTNGVGYQPYRVVVLSFELLHAPATVCGPKKSTNLVKNKCVNFNFNGLTGTGVLTESNKKFLPFQQFGRDIADTTDAVRDPQTLEILDITPCSFGGVSVITPGTNTSNQVAVLYQDVNCTEVPVAIHADQLTPTWRVYSTGSNVFQTRAGCLIGAEHVNNSYECDIPIGAGICASYQTQTNSPRRARSVASQSIIAYTMSLGAENSVAYSNNSIAIPTNFTISVTTEILPVSMTKTSVDCTMYICGDSTECSNLLLQYGSFCTQLNRALTGIAVEQDKNTQEVFAQVKQIYKTPPIKDFGGFNFSQILPDPSKPSKRSFIEDLLFNKVTLADAGFIKQYGDCLGDISARDLICAQKFNGLTVLPPLLTDEMIAQYTSALLAGTITSGWTFGAGAALQIPFAMQMAYRFNGIGVTQNVLYENQKLIANQFNSAIGKIQDSLSSTASALGKLQDVVNQNAQALNTLVKQLSSNFGAISSVLNDILSRLDPPEAEVQIDRLITGRLQSLQTYVTQQLIRAAEIRASANLAATKMSECVLGQSKRVDFCGKGYQLMSFPQSAPHGVVFLNVTYVPAQEKNFTTAPAICNDGKAHFPREGVFVSNGTNWFVTQRNFYEPQIITTDNTFVSGNCDVVIGIVNNTVYDPLQPELDSFKEELDKYFKNHTSPDVDLGDISGINASVVNIQKEIDRLNEVAKNLNESLIDLQELGKYEQYIKGGGSGGGQIYEGKLTAEGLRFGIVASRFNHALVDRLVEGAIDAIVRHGGREEDITLVRVPGSWEIPVAAGELARKEDIDAVIAIGVLIRGATPHFDYIASEVSKGLADLSLELRKPITFGVITADTLEQAIERAGTKHGNKGWEAALSAIEMANLFKSLR

SEQ ID NO: 3941 - protein, 1371 aa, Artificial Sequence
  SARS-CoV-2/USA/NY-NYUMC7/2020__EPI_ISL_418192 spike protein (1-1211)(K986P_V987P_ H1048Q_H1064N_ H1083N_H1101N) LumSynth construct
MFVFLVLLPLVSSQCVNLTTRTQLPPAYTNSFTRGVYYPDKVFRSSVLHSTQDLFLPFFSNVTWFHAIHVSGTNGTKRFDNPVLPFNDGVYFASTEKSNIIRGWIFGTTLDSKTQSLLIVNNATNVVIKVCEFQFCNDPFLGVYHHKNNKSWMESEFRVYSSANNCTFEYVSQPFLMDLEGKQGNFKNLREFVFKNIDGYFKIYSKHTPINLVRDLPQGFSALEPLVDLPIGINITRFQTLLALHRSYLTPGDSSSGWTAGAAAYYVGYLQPRTFLLKYNENGTITDAVDCALDPLSETKCTLKSFTVEKGIYQTSNFRVQPTESIVRFPNITNLCPFGEVFNATRFASVYAWNRKRISNCVADYSVLYNSASFSTFKCYGVSPTKLNDLCFTNVYADSFVIRGDEVRQIAPGQTGKIADYNYKLPDDFTGCVIAWNSNNLDSKVGGNYNYLYRLFRKSNLKPFERDISTEIYQAGSTPCNGVEGFNCYFPLQSYGFQPTNGVGYQPYRVVVLSFELLHAPATVCGPKKSTNLVKNKCVNFNFNGLTGTGVLTESNKKFLPFQQFGRDIADTTDAVRDPQTLEILDITPCSFGGVSVITPGTNTSNQVAVLYQGVNCTEVPVAIHADQLTPTWRVYSTGSNVFQTRAGCLIGAEHVNNSYECDIPIGAGICASYQTQTNSPRRARSVASQSIIAYTMSLGAENSVAYSNNSIAIPTNFTISVTTEILPVSMTKTSVDCTMYICGDSTECSNLLLQYGSFCTQLNRALTGIAVEQDKNTQEVFAQVKQIYKTPPIKDFGGFNFSQILPDPSKPSKRSFIEDLLFNKVTLADAGFIKQYGDCLGDIAARDLICAQKFNGLTVLPPLLTDEMIAQYTSALLAGTITSGWTFGAGAALQIPFAMQMAYRFNGIGVTQNVLYENQKLIANQFNSAIGKIQDSLSSTASALGKLQDVVNQNAQALNTLVKQLSSNFGAISSVLNDILSRLDPPEAEVQIDRLITGRLQSLQTYVTQQLIRAAEIRASANLAATKMSECVLGQSKRVDFCGKGYQLMSFPQSAPHGVVFLNVTYVPAQEKNFTTAPAICNDGKAHFPREGVFVSNGTNWFVTQRNFYEPQIITTDNTFVSGNCDVVIGIVNNTVYDPLQPELDSFKEELDKYFKNHTSPDVDLGDISGINASVVNIQKEIDRLNEVAKNLNESLIDLQELGKYEQYIKGGGSGGGQIYEGKLTAEGLRFGIVASRFNHALVDRLVEGAIDAIVRHGGREEDITLVRVPGSWEIPVAAGELARKEDIDAVIAIGVLIRGATPHFDYIASEVSKGLADLSLELRKPITFGVITADTLEQAIERAGTKHGNKGWEAALSAIEMANLFKSLR

SEQ ID NO: 3942 - protein, 1371 aa, Artificial Sequence
  SARS-CoV-2/Iceland/189/2020__EPI_ISL_417709 spike protein (1-1211)(K986P_V987P_ H1048Q_H1064N_ H1083N_H1101N) LumSynth construct
MFVFLVLLPLVSSQCVNLTTRTQLPPAYTNSFTRGVYYPDKVFRSSVLHSTQDLFLPFFSNVTWFHAIHVSGTNGTKRFDNPVLPFNDGVYFASTEKSNIIRGWIFGTTLDSKTQSLLIVNNATNVVIKVCEFQFCNDPFLGVYYHKNNKSWMESEFRVYSSANNCTFEYVSQPFLMDLEGKQGNFKNLREFVFKNIDGYFKIYSKHTPINLVRDLPQGFSALEPLVDLPIGINITRFQTLLALHRSYLTPGDSSSGWTAGAAAYYVGYLQPRTFLLKYNENGTITDAVDCALDPLSETKCTLKSFTVEKGIYQTSNFRVQPTESIVRFPNITNLCPFGEVFNATRFASVYAWNRKRISNCVADYSVLYNSASFSTFKCYGVSPTKLNDLCFTNVYADSFVIRGDEVRQIAPGQTGKIADYNYKLPDDFTGCVIAWNSNNLDSKVGGNYNYLYRLFRKSNLKPFERDISTEIYQAGSTPCNGVEGFNCYFPLQSYGFQPTNGVGYQPYRVVVLSFELLHAPATVCGPKKSTNLVKNKCVNFNFNGLTGTGVLTESNKKFLPFQQFGRDIADTTDAVRDPQTLEILDITPCSFGGVSVITPGTNTSNQVAVLYQGVNCTEVPVAIHADQLTPTWRVYSTGSNVFQTRAGCLIGAEHVNNSYECDIPIGAGICASYQTQTNSPRRARSVASQSIIAYTMSLGAENSVAYSNNSIAIPTNFTISVTTEILPVSMTKTSVDCTMYICGDSTECSNLLLQYGSFCTQLNRALTGIAVEQDKNTQEVFAQVKQIYKTPPIKDFGGFNFSQILPDPSKPSKRSFIEDLLFNKVTLADAGFTKQYGDCLGDIAARDLICAQKFNGLTVLPPLLTDEMIAQYTSALLAGTITSGWTFGAGAALQIPFAMQMAYRFNGIGVTQNVLYENQKLIANQFNSAIGKIQDSLSSTASALGKLQDVVNQNAQALNTLVKQLSSNFGAISSVLNDILSRLDPPEAEVQIDRLITGRLQSLQTYVTQQLIRAAEIRASANLAATKMSECVLGQSKRVDFCGKGYQLMSFPQSAPHGVVFLNVTYVPAQEKNFTTAPAICNDGKAHFPREGVFVSNGTNWFVTQRNFYEPQIITTDNTFVSGNCDVVIGIVNNTVYDPLQPELDSFKEELDKYFKNHTSPDVDLGDISGINASVVNIQKEIDRLNEVAKNLNESLIDLQELGKYEQYIKGGGSGGGQIYEGKLTAEGLRFGIVASRFNHALVDRLVEGAIDAIVRHGGREEDITLVRVPGSWEIPVAAGELARKEDIDAVIAIGVLIRGATPHFDYIASEVSKGLADLSLELRKPITFGVITADTLEQAIERAGTKHGNKGWEAALSAIEMANLFKSLR

SEQ ID NO: 3943 - protein, 1371 aa, Artificial Sequence
  SARS-CoV-2/Australia/NSW56/2020__EPI_ISL_417408 spike protein (1-1211)(K986P_V987P_ H1048Q_H1064N_ H1083N_H1101N) LumSynth construct
MFVFLVLLPLVSSQCVNLTTRTQLPPAYTNSFTRGVYYPDKVFRSSVLHSTQDLFLPFFSNVTWFHAIHVSGTNGTKRFDNPVLPFNDGVYFASTEKSNIIRGWIFGTTLDSKTQSLLIVNNATNVVIKVCEFQFCNDPFLGVYYHKNNKSWMESEFRVYSSANNCTFEYVSQPFLMDLEGKQGNFKNLREFVFKNIDGYFKIYSKHTPINLVRDLPQGFSALEPLVDLPIGINITRFQTLLALHRSYLTPGDSSSGWTAGAAAYYVGYLQPRTFLLKYNENGTITDAVDCALDPLSETKCTLKSFTVEKGIYQTSNFRVQPTESIVRFPNITNLCPFGEVFNATRFASVYAWNRKRISNCVADYSVLYNSASFSTFKCYGVSPTKLNDLCFTNVYADSFVIRGDEVRQIAPGQTGKIADYNYKLPDDFTGCVIAWNSNNLDSKVGGNYNYLYRLFRKSNLKPFERDISTEIYQAGSTPCNGVEGFNCYFPLQSYGFQPTNGVGYQPYRVVVLSFELLHAPATVCGPKKSTNLVKNKCVNFNFNGLTGTGVLTESNKKFLPFQQFGRDIADTTDAVRDPQTLEILDITPCSFGGVSVITPGTNTSNQVAVLYQDVNCTEVPVAIHADQLTPTWRVYSTGSNVFQTRAGCLIGAEHVNNSYECDIPIGAGICASYQTQTNSPRRARSVASQSIIAYTMSLGAENSVAYSNNSIAIPTNFTISVTTEILPVSMTKTSVDCTMYICGDSTECSNLLLQYGSFCTQLNRALTGIAVEQDKNTQEVFAQVKQIYKTPPIKDFGGFNFSQILPDSSKPSKRSFIEDLLFNKVTLADAGFIKQYGDCLGDIAARDLICAQKFNGLTVLPPLLTDEMIAQYTSALLAGTITSGWTFGAGAALQIPFAMQMAYRFNGIGVTQNVLYENQKLIANQFNSAIGKIQDSLSSTASALGKLQDVVNQNAQALNTLVKQLSSNFGAISSVLNDILSRLDPPEAEVQIDRLITGRLQSLQTYVTQQLIRAAEIRASANLAATKMSECVLGQSKRVDFCGKGYQLMSFPQSAPHGVVFLNVTYVPAQEKNFTTAPAICNDGKAHFPREGVFVSNGTNWFVTQRNFYEPQIITTDNTFVSGNCDVVIGIVNNTVYDPLQPELDSFKEELDKYFKNHTSPDVDLGDISGINASVVNIQKEIDRLNEVAKNLNESLIDLQELGKYEQYIKGGGSGGGQIYEGKLTAEGLRFGIVASRFNHALVDRLVEGAIDAIVRHGGREEDITLVRVPGSWEIPVAAGELARKEDIDAVIAIGVLIRGATPHFDYIASEVSKGLADLSLELRKPITFGVITADTLEQAIERAGTKHGNKGWEAALSAIEMANLFKSLR

SEQ ID NO: 3944 - protein, 1371 aa, Artificial Sequence
  SARS-CoV-2/Iceland/280/2020__EPI_ISL_417608 spike protein (1-1211)(K986P_V987P_ H1048Q_H1064N_ H1083N_H1101N) LumSynth construct
MFVFLVLLPLVSSQCVNLTTRTQLPPAYTNSFTRGVYYPDKVFRSSVLHSTQDLFLPFFSNVTWFHAIHVSGTNGTKRFDNPVLPFNDGVYFASTEKSNIIRGWIFGTTLDSKTQSLLIVNNATNVVIKVCEFQFCNDPFLGVYYHKNNKSWMESEFRVYSSANNCTFEYVSQPFLMDLEGKQGNFKNLREFVFKNIDGYFKIYSKHTPINLVRDLPQGFSALEPLVDLPIGINITRFQTLLALHRSYLTPGDSSSGWTAGAAAYYVGYLQPRTFLLKYNENGTITDAVDCALDPLSETKCTLKSFTVEKGIYQTSNFRVQPTESIVRFPNITNLCPFGEVFNATRFASVYAWNRKRISNCVADYSVLYNSASFSTFKCYGVSPTKLNDLCFTNVYADSFVIRGDEVRQIAPGQTGKIADYNYKLPDDFTGCVIAWNSNNLDSKVGGNYNYLYRLFRKSNLKPFERDISTEIYQAGSTPCNGVEGFNCYFPLQSYGFQPTNGVGYQPYRVVVLSFELLHAPATVCGPKKSTNLVKNKCVNFNFNGLTGTGVLTESNKKFLPFQQFGRDIADTTDAVRDPQTLEILDITPCSFGGVSVITPGTNTSNQVAVLYQGVNCTEVPVAIHADQLTPTWRVYSTGSNVFQTRAGCLIGAEHVNNSYECDIPIGAGICASYHTQTNSPRRARSVASQSIIAYTMSLGAENSVAYSNNSIAIPTNFTISVTTEILPVSMTKTSVDCTMYICGDSTECSNLLLQYGSFCTQLNRALTGIAVEQDKNTQEVFAQVKQIYKTPPIKDFGGFNFSQILPDPSKPSKRSFIEDLLFNKVTLADAGFIKQYGDCLGDIAARDLICAQKFNGLTVLPPLLTDEMIAQYTSALLAGTITSGWTFGAGAALQIPFAMQMAYRFNGIGVTQNVLYENQKLIANQFNSAIGKIQDSLSSTASALGKLQDVVNQNAQALNTLVKQLSSNFGAISSVLNDILSRLDPPEAEVQIDRLITGRLQSLQTYVTQQLIRAAEIRASANLAATKMSECVLGQSKRVDFCGKGYQLMSFPQSAPHGVVFLNVTYVPAQEKNFTTAPAICNDGKAHFPREGVFVSNGTNWFVTQRNFYEPQIITTDNTFVSGNCDVVIGIVNNTVYDPLQPELDSFKEELDKYFKNHTSPDVDLGDISGINASVVNIQKEIDRLNEVAKNLNESLIDLQELGKYEQYIKGGGSGGGQIYEGKLTAEGLRFGIVASRFNHALVDRLVEGAIDAIVRHGGREEDITLVRVPGSWEIPVAAGELARKEDIDAVIAIGVLIRGATPHFDYIASEVSKGLADLSLELRKPITFGVITADTLEQAIERAGTKHGNKGWEAALSAIEMANLFKSLR

SEQ ID NO: 3945 - protein, 1371 aa, Artificial Sequence; identical to SEQ ID NO: 3900
  SARS-CoV-2/Iceland/247/2020__EPI_ISL_417575 spike protein (1-1211)(K986P_V987P_ H1048Q_H1064N_ H1083N_H1101N) LumSynth construct

SEQ ID NO: 3946 - protein, 1371 aa, Artificial Sequence
  SARS-CoV-2/Iceland/238/2020__EPI_ISL_417566 spike protein (1-1211)(K986P_V987P_ H1048Q_H1064N_ H1083N_H1101N) LumSynth construct
MFVFLVLLPLVSSQCVNLTTRTQLPPAYTNSFTRGVYYPDKVFRSSVLHSTQDLFLPFFSNVTWFHAIHVSGTNGTKRFDNPVLPFNDGVYFASTEKSNIIRGWIFGTTLDSKTQSLLIVNNATNVVIKVCEFQFCNDPFLGVYYHKNNKSWMESEFRVYSSANNCTFEYVSQPFLMDLEGKQGNFKNLREFVFKNIDGYFKIYSKHTPINLVRDLPQGFSALEPLVDLPIGINITRFQTLLALHRSYLTPGDSSSGWTAGAAAYYVGYLQPRTFLLKYNENGTITDAVDCALDPLSETKCTLKSFTVEKGIYQTSNFRVQPTESIVRFPNITNLCPFGEVFNATRFASVYAWNRKRISNCVADYSVLYNSASFSTFKCYGVSPTKLNDLCFTNVYADSFVIRGDEVRQIAPGQTGKIADYNYKLPDDFTGCVIAWNSNNLDSKVGGNYNYLYRLFRKSNLKPFERDISTEIYQAGSTPCNGVEGFNCYFPLQSYGFQPTNGVGYQPYRVVVLSFELLHAPATVCGPKKSTNLVKNKCVNFNFNGLTGTGVLTESNKKFLPFQQFGRDIADTTDAVRDPQTLEILDITPCSFGGVSVITPGTNTSNQVAVLYQGVNCTEVPVAIHADQLTPTWRVYSTGSNVFQTRAGCLIGAEHVNNSYECDIPIGAGICASYQTQTNSPRRARSVASQSIIAYTMSLGAENSVAYSNNSIAIPTNFTISVTTEILPVSMTKTSVDCTMYICGDSTECSNLLLQYGSFCTQLNRALTGIAVEQDKNTQEVFAQVKQIYKTPPIKDFGGFNFSQILPDPSKPSKRSFIEDLLFNKVTLADVGFIKQYGDCLGDIAARDLICAQKFNGLTVLPPLLTDEMIAQYTSALLAGTITSGWTFGAGAALQIPFAMQMAYRFNGIGVTQNVLYENQKLIANQFNSAIGKIQDSLSSTASALGKLQDVVNQNAQALNTLVKQLSSNFGAISSVLNDILSRLDPPEAEVQIDRLITGRLQSLQTYVTQQLIRAAEIRASANLAATKMSECVLGQSKRVDFCGKGYQLMSFPQSAPHGVVFLNVTYVPAQEKNFTTAPAICNDGKAHFPREGVFVSNGTNWFVTQRNFYEPQIITTDNTFVSGNCDVVIGIVNNTVYDPLQPELDSFKEELDKYFKNHTSPDVDLGDISGINASVVNIQKEIDRLNEVAKNLNESLIDLQELGKYEQYIKGGGSGGGQIYEGKLTAEGLRFGIVASRFNHALVDRLVEGAIDAIVRHGGREEDITLVRVPGSWEIPVAAGELARKEDIDAVIAIGVLIRGATPHFDYIASEVSKGLADLSLELRKPITFGVITADTLEQAIERAGTKHGNKGWEAALSAIEMANLFKSLR

SEQ ID NO: 3947 - protein, 1371 aa, Artificial Sequence
  SARS-CoV-2/Greece/16/2020__EPI_ISL_418265 spike protein (1-1211)(K986P_V987P_ H1048Q_H1064N_ H1083N_H1101N) LumSynth construct
MFVFLVLLPLVSSQCVNLTTRTQLPPAYTNSFTRGVYYPDKVFRSSVLHSTQDLFLPFFSNVTWFHAIHVSGTNGTKRFDNPVLPFNDGVYFASTEKSNIIRGWIFGTTLDSKTQSLLIVNNATNVVIKVCEFQFCNDPFLGVYYHKNNKSWMESEFRVYSSANNCTFEYVSQPFLMDLEGKQGNFKNLREFVFKNVDGYFKIYSKHTPINLVRDLPQGFSALEPLVDLPIGINITRFQTLLALHRSYLTPGDSSSGWTAGAAAYYVGYLQPRTFLLKYNENGTITDAVDCALDPLSETKCTLKSFTVEKGIYQTSNFRVQPTESIVRFPNITNLCPFGEVFNATRFASVYAWNRKRISNCVADYSVLYNSASFSTFKCYGVSPTKLNDLCFTNVYADSFVIRGDEVRQIAPGQTGKIADYNYKLPDDFTGCVIAWNSNNLDSKVGGNYNYLYRLFRKSNLKPFERDISTEIYQAGSTPCNGVEGFNCYFPLQSYGFQPTNGVGYQPYRVVVLSFELLHAPATVCGPKKSTNLVKNKCVNFNFNGLTGTGVLTESNKKFLPFQQFGRDIADTTDAVRDPQTLEILDITPCSFGGVSVITPGTNTSNQVAVLYQDVNCTEVPVAIHADQLTPTWRVYSTGSNVFQTRAGCLIGAEHVNNSYECDIPIGAGICASYQTQTNSPRRARSVASQSIIAYTMSLGAENSVAYSNNSIAIPTNFTISVTTEILPVSMTKTSVDCTMYICGDSTECSNLLLQYGSFCTQLNRALTGIAVEQDKNTQEVFAQVKQIYKTPPIKDFGGFNFSQILPDPSKPSKRSFIEDLLFNKVTLADAGFIKQYGDCLGDIAARDLICAQKFNGLTVLPPLLTDEMIAQYTSALLAGTITSGWTFGAGAALQIPFAMQMAYRFNGIGVTQNVLYENQKLIANQFNSAIGKIQDSLSSTASALGKLQDVVNQNAQALNTLVKQLSSNFGAISSVLNDILSRLDPPEAEVQIDRLITGRLQSLQTYVTQQLIRAAEIRASANLAATKMSECVLGQSKRVDFCGKGYQLMSFPQSAPHGVVFLNVTYVPAQEKNFTTAPAICNDGKAHFPREGVFVSNGTNWFVTQRNFYEPQIITTDNTFVSGNCDVVIGIVNNTVYDPLQPELDSFKEELDKYFKNHTSPDVDLGDISGINASVVNIQKEIDRLNEVAKNLNESLIDLQELGKYEQYIKGGGSGGGQIYEGKLTAEGLRFGIVASRFNHALVDRLVEGAIDAIVRHGGREEDITLVRVPGSWEIPVAAGELARKEDIDAVIAIGVLIRGATPHFDYIASEVSKGLADLSLELRKPITFGVITADTLEQAIERAGTKHGNKGWEAALSAIEMANLFKSLR

SEQ ID NO: 3948 - protein, 1371 aa, Artificial Sequence
  SARS-CoV-2/Iceland/319/2020__EPI_ISL_417648 spike protein (1-1211)(K986P_V987P_ H1048Q_H1064N_ H1083N_H1101N) LumSynth construct
MFVFLVLLPLVSSQCVNLTTRTQLPPAYTNSFTRGVYYPDKVFRSSVLHSTQDLFLPFFSNVTWFHAIHVSGTNGTKRFDNPVLPFNDGVYFASTEKSNIIRGWIFGTTLDSKTQSLLIVNNATNVVIKVCEFQFCNDPFLGVYYHKNNKSWMESEFRVYSSANNCTFEYVSQPFLIDLEGKQGNFKNLREFVFKNIDGYFKIYSKHTPINLVRDLPQGFSALEPLVDLPIGINITRFQTLLALHRSYLTPGDSSSGWTAGAAAYYVGYLQPRTFLLKYNENGTITDAVDCALDPLSETKCTLKSFTVEKGIYQTSNFRVQPTESIVRFPNITNLCPFGEVFNATRFASVYAWNRKRISNCVADYSVLYNSASFSTFKCYGVSPTKLNDLCFTNVYADSFVIRGDEVRQIAPGQTGKIADYNYKLPDDFTGCVIAWNSNNLDSKVGGNYNYLYRLFRKSNLKPFERDISTEIYQAGSTPCNGVEGFNCYFPLQSYGFQPTNGVGYQPYRVVVLSFELLHAPATVCGPKKSTNLVKNKCVNFNFNGLTGTGVLTESNKKFLPFQQFGRDIADTTDAVRDPQTLEILDITPCSFGGVSVITPGTNTSNQVAVLYQGVNCTEVPVAIHADQLTPTWRVYSTGSNVFQTRAGCLIGAEHVNNSYECDIPIGAGICASYQTQTNSPRRARSVASQSIIAYTMSLGAENSVAYSNNSIAIPTNFTISVTTEILPVSMTKTSVDCTMYICGDSTECSNLLLQYGSFCTQLNRALTGIAVEQDKNTQEVFAQVKQIYKTPPIKDFGGFNFSQILPDPSKPSKRSFIEDLLFNKVTLADAGFIKQYGDCLGDIAARDLICAQKFNGLTVLPPLLTDEMIAQYTSALLAGTITSGWTFGAGAALQIPFAMQMAYRFNGIGVTQNVLYENQKLIANQFNSAIGKIQDSLSSTASALGKLQDVVNQNAQALNTLVKQLSSNFGAISSVLNDILSRLDPPEAEVQIDRLITGRLQSLQTYVTQQLIRAAEIRASANLAATKMSECVLGQSKRVDFCGKGYQLMSFPQSAPHGVVFLNVTYVPAQEKNFTTAPAICNDGKAHFPREGVFVSNGTNWFVTQRNFYEPQIITTDNTFVSGNCDVVIGIVNNTVYDPLQPELDSFKEELDKYFKNHTSPDVDLGDISGINASVVNIQKEIDRLNEVAKNLNESLIDLQELGKYEQYIKGGGSGGGQIYEGKLTAEGLRFGIVASRFNHALVDRLVEGAIDAIVRHGGREEDITLVRVPGSWEIPVAAGELARKEDIDAVIAIGVLIRGATPHFDYIASEVSKGLADLSLELRKPITFGVITADTLEQAIERAGTKHGNKGWEAALSAIEMANLFKSLR

SEQ ID NO: 3949 - protein, 1371 aa, Artificial Sequence
  SARS-CoV-2/Congo/94/2020__EPI_ISL_417947 spike protein (1-1211)(K986P_V987P_ H1048Q_H1064N_ H1083N_H1101N) LumSynth construct
MFVFLVLLPLVSSQCVNLTTRTQLPPAYTNSFTRGVYYPDKVFRSSVLHSTQDLFLPFFSNVTWFHAIHVSGTNGTKRFDNPVLPFNDGVYFASTEKSNIIRGWIFGTTLDSKTQSLLIVNNATNVVIKVCEFQFCNDPFLGVYYHKNNKSWMESEFRVYSSANNCTFEYVSQPFLMDLEGKQGNFKNLREFVFKNIDGYFKIYSKHTPINLVRDLPQGFSALEPLVDLPIGINITRFQTLLALHRSYLTPGDSSSGWTAGAAAYYVGYLQPRTFLLKYNENGTITDAVDCALDPLSETKCTLKSFTVEKGIYQTSNFRVQPTESIVRFPNITNLCPFGEVFNATRFASVYAWNRKRISNCVADYSVLYNSASFSTFKCYGVSPTKLNDLCFTNVYADSFVIRGDEVRQIAPGQTGKIADYNYKLPDDFTGCVIAWNSNNLDSKVGGNYNYLYRLFRKSNLKPFERDISTEIYQAGSTPCNGVEGFNCYFPLQSYGFQPTNGVGYQPYRVVVLSFELLHAPATVCGPKKSTNLVKNKCVNFNFNGLTGTGVLTESNKKFLPFQQFGRDIADTTDAVRDPQTLEILDITPCSFGGVSVITPGTNTSNQVAVLYQGVNCTEVPVAIHADQLTPTWRVYSTGSNVFQTRAGCLIGAEHVNNSYECDIPIGAGICASYQTQTNSPRRARSVASQSIIAYTMSLGAENSVAYSNNSIAIPTNFTISVTTEILPVSMTKTSVDCTMYICGDSTECSNLLLQYGSFCTQLNRALTGIAVEQDKNTQEVFAQVKQIYKTPPIKDFGGFNFSQILPDPSKPSKRSFIEDILFNKVTLADAGFIKQYGDCLGDIAARDLICAQKFNGLTVLPPLLTDEMIAQYTSALLAGTITSGWTFGAGAALQIPFAMQMAYRFNGIGVTQNVLYENQKLIANQFNSAIGKIQDSLSSTASALGKLQDVVNQNAQALNTLVKQLSSNFGAISSVLNDILSRLDPPEAEVQIDRLITGRLQSLQTYVTQQLIRAAEIRASANLAATKMSECVLGQSKRVDFCGKGYQLMSFPQSAPHGVVFLNVTYVPAQEKNFTTAPAICNDGKAHFPREGVFVSNGTNWFVTQRNFYEPQIITTDNTFVSGNCDVVIGIVNNTVYDPLQPELDSFKEELDKYFKNHTSPDVDLGDISGINASVVNIQKEIDRLNEVAKNLNESLIDLQELGKYEQYIKGGGSGGGQIYEGKLTAEGLRFGIVASRFNHALVDRLVEGAIDAIVRHGGREEDITLVRVPGSWEIPVAAGELARKEDIDAVIAIGVLIRGATPHFDYIASEVSKGLADLSLELRKPITFGVITADTLEQAIERAGTKHGNKGWEAALSAIEMANLFKSLR

SEQ ID NO: 3950 - protein, 1371 aa, Artificial Sequence
  SARS-CoV-2/Congo/158/2020__EPI_ISL_417950 spike protein (1-1211)(K986P_V987P_ H1048Q_H1064N_ H1083N_H1101N) LumSynth construct
MFVFLVLLPLVSSQCVNLTTRTQLPPAYTNSFTRGVYYPDKVFRSSVLHSTQDLFLPFFSNVTWFHAIHVSGTNGTKRFDNPVLPFNDGVYFASTEKSNIIRGWIFGTTLDSKTQSLLIVNNATNVVIKVCEFQFCNDPFLGVYYHKNNKSWMESEFRVYSSANNCTFEYVSQPFLMDLEGKQGNFKNLREFVFKNIDGYFKIYSKHTPINLVRDLPQGFSALEPLVDLPIGINITRFQTLLALHRSYLTPGDSSSGWTAGAAAYYVGYLQPRTFLLKYNENGTITDAVDCALDPLSETKCTLKSFTVEKGIYQTSNFRVQPTESIVRFPNITNLCPFGEVFNATRFASVYAWNRKRISNCVADYSVLYNSASFSTFKCYGVSPTKLNDLCFTNVYADSFVIRGDEVRQIAPGQTGKIADYNYKLPDDFTGCVIAWNSNNLDSKVGGNYNYLYRLFRKSNLKPFERDISTEIYQAGSTPCNGVEGFNCYFPLQSYGFQPTNGVGYQPYRVVVLSFELLHAPATVCGPKKSTNLVKNKCVNFNFNGLTGTGVLTESNKKFLPFQQFGRDIADTTDAVRDPQTLEILDITPCSFGGVSVITPGTNTSNQVAVLYQDVNCTEVPVAIHADQLTPTWRVYSTGSNVFQTRAGCLIGAEHVNNSYECDIPIGAGICASYQTQTNSPRRARSVASQSIIAYTMSLGAENSVAYSNNSIAIPTNFTISVTTEILPVSMTKTSVDCTMYICGDSTECSNLLLQYGSFCTQLNRALTGIAVEQDKNTQEVFAQVKQIYKTPPIKDFGGFNFSQILPDPSKPSKRSFIEDLLFNKVTLADAGFIKQYGDCLGDIAARDLICAQKFNGLTVLPPLLTDEMIAQYTSALLAGTITSGWTFGAGAALQIPFAMQMAYRFNGIGVTQNVLYENQKLIANQFNSAIGKIQDSLSSTASALGKLQDVVNQNAQALNTLVKQLSSNFGAISSVLNDILSRLDPPEAEVQIDRLITGRLQSLQTYVTQQLIRAAEIRASANLAATKMSECVLGQSKRVDFCGKGYQLMSFPQSAPHGVVFLNVTYVPAQEKNFTTAPAICNDGKAHFPREGVFVSNGTNWFVTQRNFYEPQIITTDNTFLSGNCDVVIGIVNNTVYDPLQPELDSFKEELDKYFKNHTSPDVDLGDISGINASVVNIQKEIDRLNEVAKNLNESLIDLQELGKYEQYIKGGGSGGGQIYEGKLTAEGLRFGIVASRFNHALVDRLVEGAIDAIVRHGGREEDITLVRVPGSWEIPVAAGELARKEDIDAVIAIGVLIRGATPHFDYIASEVSKGLADLSLELRKPITFGVITADTLEQAIERAGTKHGNKGWEAALSAIEMANLFKSLR

SEQ ID NO: 3951 - protein, 1371 aa, Artificial Sequence
  SARS-CoV-2/USA/UT-00034/2020__EPI_ISL_417977 spike protein (1-1211)(K986P_V987P_ H1048Q_H1064N_ H1083N_H1101N) LumSynth construct
MFVFLVLLPLVSSQCVNLTTRTQLPPAYTNSFTRGVYYPDKVFRSSVLHSTQDLFLPFFSNVTWFHAIHVSGTNGTKRFDNPVLPFNDGVYFASTEKSNIIRGWIFGTTLDSKTQSLLIVNNATNVVIKVCEFQFCNDPFLGVYYYKNNKSWMESEFRVYSSANNCTFEYVSQPFLMDLEGKQGNFKNLREFVFKNIDGYFKIYSKHTPINLVRDLPQGFSALEPLVDLPIGINITRFQTLLALHRSYLTPGDSSSGWTAGAAAYYVGYLQPRTFLLKYNENGTITDAVDCALDPLSETKCTLKSFTVEKGIYQTSNFRVQPTESIVRFPNITNLCPFGEVFNATRFASVYAWNRKRISNCVADYSVLYNSASFSTFKCYGVSPTKLNDLCFTNVYADSFVIRGDEVRQIAPGQTGKIADYNYKLPDDFTGCVIAWNSNNLDSKVGGNYNYLYRLFRKSNLKPFERDISTEIYQAGSTPCNGVEGFNCYFPLQSYGFQPTNGVGYQPYRVVVLSFELLHAPATVCGPKKSTNLVKNKCVNFNFNGLTGTGVLTESNKKFLPFQQFGRDIADTTDAVRDPQTLEILDITPCSFGGVSVITPGTNTSNQVAVLYQGVNCTEVPVAIHADQLTPTWRVYSTGSNVFQTRAGCLIGAEHVNNSYECDIPIGAGICASYQTQTNSPRRARSVASQSIIAYTMSLGAENSVAYSNNSIAIPTNFTISVTTEILPVSMTKTSVDCTMYICGDSTECSNLLLQYGSFCTQLNRALTGIAVEQDKNTQEVFAQVKQIYKTPPIKDFGGFNFSQILPDPSKPSKRSFIEDLLFNKVTLADAGFIKQYGDCLGDIAARDLICAQKFNGLTVLPPLLTDEMIAQYTSALLAGTITSGWTFGAGAALQIPFAMQMAYRFNGIGVTQNVLYENQKLIANQFNSAIGKIQDSLSSTASALGKLQDVVNQNAQALNTLVKQLSSNFGAISSVLNDILSRLDPPEAEVQIDRLITGRLQSLQTYVTQQLIRAAEIRASANLAATKMSECVLGQSKRVDFCGKGYQLMSFPQSAPHGVVFLNVTYVPAQEKNFTTAPAICNDGKAHFPREGVFVSNGTNWFVTQRNFYEPQIITTDNTFVSGNCDVVIGIVNNTVYDPLQPELDSFKEELDKYFKNHTSPDVDLGDISGINASVVNIQKEIDRLNEVAKNLNESLIDLQELGKYEQYIKGGGSGGGQIYEGKLTAEGLRFGIVASRFNHALVDRLVEGAIDAIVRHGGREEDITLVRVPGSWEIPVAAGELARKEDIDAVIAIGVLIRGATPHFDYIASEVSKGLADLSLELRKPITFGVITADTLEQAIERAGTKHGNKGWEAALSAIEMANLFKSLR

SEQ ID NO: 3952 - protein, 1371 aa, Artificial Sequence
  SARS-CoV-2/USA/UT-00033/2020__EPI_ISL_417976 spike protein (1-1211)(K986P_V987P_ H1048Q_H1064N_ H1083N_H1101N) LumSynth construct
MFVFLVLLPLVSSQCVNLTTRTQLPPAYTNSFTRGVYYPDKVFRSSVLHSTQDLFLPFFSNVTWFHAIHVSGTNGTKRFDNPVLPFNDGVYFASTEKSNIIRGWIFGTTLDSKTQSLLIVNNATNVVIKVCEFQFCNDPFLGVYYHKNNKSWMESEFRVYSSANNCTFEYVSQPFLMDLEGKQGNFKNLREFVFKNIDGYFKIYSKHTPINLVRDLPQGFSALEPLVDLPIGINITRFQTLLALHRSYLTPGDSSSGLTAGAAAYYVGYLQPRTFLLKYNENGTITDAVDCALDPLSETKCTLKSFTVEKGIYQTSNFRVQPTESIVRFPNITNLCPFGEVFNATRFASVYAWNRKRISNCVADYSVLYNSASFSTFKCYGVSPTKLNDLCFTNVYADSFVIRGDEVRQIAPGQTGKIADYNYKLPDDFTGCVIAWNSNNLDSKVGGNYNYLYRLFRKSNLKPFERDISTEIYQAGSTPCNGVEGFNCYFPLQSYGFQPTNGVGYQPYRVVVLSFELLHAPATVCGPKKSTNLVKNKCVNFNFNGLTGTGVLTESNKKFLPFQQFGRDIADTTDAVRDPQTLEILDITPCSFGGVSVITPGTNTSNQVAVLYQGVNCTEVPVAIHADQLTPTWRVYSTGSNVFQTRAGCLIGAEHVNNSYECDIPIGAGICASYQTQTNSPRRARSVASQSIIAYTMSLGAENSVAYSNNSIAIPTNFTISVTTEILPVSMTKTSVDCTMYICGDSTECSNLLLQYGSFCTQLNRALTGIAVEQDKNTQEVFAQVKQIYKTPPIKDFGGFNFSQILPDPSKPSKRSFIEDLLFNKVTLADAGFIKQYGDCLGDIAARDLICAQKFNGLTVLPPLLTDEMIAQYTSALLAGTITSGWTFGAGAALQIPFAMQMAYRFNGIGVTQNVLYENQKLIANQFNSAIGKIQDSLSSTASALGKLQDVVNQNAQALNTLVKQLSSNFGAISSVLNDILSRLDPPEAEVQIDRLITGRLQSLQTYVTQQLIRAAEIRASANLAATKMSECVLGQSKRVDFCGKGYQLMSFPQSAPHGVVFLNVTYVPAQEKNFTTAPAICNDGKAHFPREGVFVSNGTNWFVTQRNFYEPQIITTDNTFVSGNCDVVIGIVNNTVYDPLQPELDSFKEELDKYFKNHTSPDVDLGDISGINASVVNIQKEIDRLNEVAKNLNESLIDLQELGKYEQYIKGGGSGGGQIYEGKLTAEGLRFGIVASRFNHALVDRLVEGAIDAIVRHGGREEDITLVRVPGSWEIPVAAGELARKEDIDAVIAIGVLIRGATPHFDYIASEVSKGLADLSLELRKPITFGVITADTLEQAIERAGTKHGNKGWEAALSAIEMANLFKSLR

SEQ ID NO: 3953 - protein, 1371 aa, Artificial Sequence
  SARS-CoV-2/USA/WI-13/2020__EPI_ISL_417516 spike protein (1-1211)(K986P_V987P_ H1048Q_H1064N_ H1083N_H1101N) LumSynth construct
MFVFLVLLPLVSSQCVNLTTRTQLPPAYTNSFTRGVYYPDKVFRSSVLHSTQDLFLPFFSNVTWFHAIHVSGTNGTKRFDNPVLPFNDGVYFASTEKSNIIRGWIFGTTLDSKTQSLLIVNNATNVVIKVCEFQFCNDPFLGVYYHKNNKSWMESEFRVYSSANNCTFEYVSQPFLMDLEGKQGNFKNLREFVFKNIDGYFKIYSKHTPINLVRDLPQGFSALEPLVDLPIGINITRFQTLLALHRSYLTPGDSSSGWTAGAAAYYVGYLQPRTFLLKYNENGTITDAVDCALDPLSETKCTLKSFTVEKGIYQTSNFRVLPTESIVRFPNITNLCPFGEVFNATRFASVYAWNRKRISNCVADYSVLYNSASFSTFKCYGVSPTKLNDLCFTNVYADSFVIRGDEVRQIAPGQTGKIADYNYKLPDDFTGCVIAWNSNNLDSKVGGNYNYLYRLFRKSNLKPFERDISTEIYQAGSTPCNGVEGFNCYFPLQSYGFQPTNGVGYQPYRVVVLSFELLHAPATVCGPKKSTNLVKNKCVNFNFNGLTGTGVLTESNKKFLPFQQFGRDIADTTDAVRDPQTLEILDITPCSFGGVSVITPGTNTSNQVAVLYQGVNCTEVPVAIHADQLTPTWRVYSTGSNVFQTRAGCLIGAEHVNNSYECDIPIGAGICASYQTQTNSPRRARSVASQSIIAYTMSLGAENSVAYSNNSIAIPTNFTISVTTEILPVSMTKTSVDCTMYICGDSTECSNLLLQYGSFCTQLNRALTGIAVEQDKNTQEVFAQVKQIYKTPPIKDFGGFNFSQILPDPSKPSKRSFIEDLLFNKVTLADAGFIKQYGDCLGDIAARDLICAQKFNGLTVLPPLLTDEMIAQYTSALLAGTITSGWTFGAGAALQIPFAMQMAYRFNGIGVTQNVLYENQKLIANQFNSAIGKIQDSLSSTASALGKLQDVVNQNAQALNTLVKQLSSNFGAISSVLNDILSRLDPPEAEVQIDRLITGRLQSLQTYVTQQLIRAAEIRASANLAATKMSECVLGQSKRVDFCGKGYQLMSFPQSAPHGVVFLNVTYVPAQEKNFTTAPAICNDGKAHFPREGVFVSNGTNWFVTQRNFYEPQIITTDNTFVSGNCDVVIGIVNNTVYDPLQPELDSFKEELDKYFKNHTSPDVDLGDISGINASVVNIQKEIDRLNEVAKNLNESLIDLQELGKYEQYIKGGGSGGGQIYEGKLTAEGLRFGIVASRFNHALVDRLVEGAIDAIVRHGGREEDITLVRVPGSWEIPVAAGELARKEDIDAVIAIGVLIRGATPHFDYIASEVSKGLADLSLELRKPITFGVITADTLEQAIERAGTKHGNKGWEAALSAIEMANLFKSLR

SEQ ID NO: 3954 - protein, 1370 aa, Artificial Sequence
  SARS-CoV-2/India/1-27/2020__EPI_ISL_413522 spike protein (1-1210)(K985P_V986P_ H1047Q_H1063N_ H1082N_H1100N) LumSynth construct
MFVFLVLLPLVSSQCVNLTTRTQLPPAYTNSFTRGVYYPDKVFRSSVLHSTQDLFLPFFSNVTWFHAIHVSGTNGTKRFDNPVLPFNDGVYFASTEKSNIIRGWIFGTTLDSKTQSLLIVNNATNVVIKVCEFQFCNDPFLGVYHKNNKSWMESEFRVYSSANNCTFEYVSQPFLMDLEGKQGNFKNLREFVFKNIDGYFKIYSKHTPINLVRDLPQGFSALEPLVDLPIGINITRFQTLLALHRSYLTPGDSSSGWTAGAAAYYVGYLQPRTFLLKYNENGTITDAVDCALDPLSETKCTLKSFTVEKGIYQTSNFRVQPTESIVRFPNITNLCPFGEVFNATRFASVYAWNRKRISNCVADYSVLYNSASFSTFKCYGVSPTKLNDLCFTNVYADSFVIRGDEVIQIAPGQTGKIADYNYKLPDDFTGCVIAWNSNNLDSKVGGNYNYLYRLFRKSNLKPFERDISTEIYQAGSTPCNGVEGFNCYFPLQSYGFQPTNGVGYQPYRVVVLSFELLHAPATVCGPKKSTNLVKNKCVNFNFNGLTGTGVLTESNKKFLPFQQFGRDIADTTDAVRDPQTLEILDITPCSFGGVSVITPGTNTSNQVAVLYQDVNCTEVPVAIHADQLTPTWRVYSTGSNVFQTRAGCLIGAEHVNNSYECDIPIGAGICASYQTQTNSPRRARSVASQSIIAYTMSLGAENSVAYSNNSIAIPTNFTISVTTEILPVSMTKTSVDCTMYICGDSTECSNLLLQYGSFCTQLNRALTGIAVEQDKNTQEVFAQVKQIYKTPPIKDFGGFNFSQILPDPSKPSKRSFIEDLLFNKVTLADAGFIKQYGDCLGDIAARDLICAQKFNGLTVLPPLLTDEMIAQYTSALLAGTITSGWTFGAGAALQIPFAMQMAYRFNGIGVTQNVLYENQKLIANQFNSAIGKIQDSLSSTASALGKLQDVVNQNAQALNTLVKQLSSNFGAISSVLNDILSRLDPPEAEVQIDRLITGRLQSLQTYVTQQLIRAAEIRASANLAATKMSECVLGQSKRVDFCGKGYQLMSFPQSAPHGVVFLNVTYVPAQEKNFTTAPAICNDGKAHFPREGVFVSNGTNWFVTQRNFYEPQIITTDNTFVSGNCDVVIGIVNNTVYDPLQPELDSFKEELDKYFKNHTSPDVDLGDISGINASVVNIQKEIDRLNEVAKNLNESLIDLQELGKYEQYIKGGGSGGGQIYEGKLTAEGLRFGIVASRFNHALVDRLVEGAIDAIVRHGGREEDITLVRVPGSWEIPVAAGELARKEDIDAVIAIGVLIRGATPHFDYIASEVSKGLADLSLELRKPITFGVITADTLEQAIERAGTKHGNKGWEAALSAIEMANLFKSLR

SEQ ID NO: 3955 - protein, 1365 aa, Artificial Sequence
  SARS-CoV-2/pangolin/Guangxi/P4L/2017__EPI_ISL_410538 spike protein (1-1205)(K980P_V981P_ H1042Q_H1058N_ H1077N_H1095N) LumSynth construct
MFVFLFVLPLVSSQCVNLTTRTGIPPGYTNSSTRGVYYPDKVFRSSILHLTQDLFLPFFSNVTWFNTINYQGGFKKFDNPVLPFNDGVYFASTEKSNIIRGWIFGTTLDARTQSLLIVNNATNVVIKVCEFQFCTDPFLGVYYHNNNKTWVENEFRVYSSANNCTFEYISQPFLMDLEGKQGNFKNLREFVFKNVDGYFKIYSKHTPIDLVRDLPRGFAALEPLVDLPIGINITRFQTLLALHRSYLTPGNLESGWTTGAAAYYVGYLQQRTFLLSYNQNGTITDAVDCSLDPLSETKCTLKSLTVEKGIYQTSNFRVQPTISIVRFPNITNLCPFGEVFNASKFASVYAWNRKRISNCVADYSVLYNSTSFSTFKCYGVSPTKLNDLCFTNVYADSFVVKGDEVRQIAPGQTGVIADYNYKLPDDFTGCVIAWNSVKQDALTGGNYGYLYRLFRKSKLKPFERDISTEIYQAGSTPCNGQVGLNCYYPLERYGFHPTTGVNYQPFRVVVLSFELLNGPATVCGPKLSTTLVKDKCVNFNFNGLTGTGVLTTSKKQFLPFQQFGRDISDTTDAVRDPQTLEILDITPCSFGGVSVITPGTNTSNQVAVLYQDVNCTEVPMAIHAEQLTPAWRVYSAGANVFQTRAGCLVGAEHVNNSYECDIPVGAGICASYHSMSSLRSVNQRSIIAYTMSLGAENSVAYSNNSIAIPTNFTISVTTEILPVSMTKTSVDCTMYICGDSIECSNLLLQYGSFCTQLNRALTGIAVEQDKNTQEVFAQVKQIYKTPPIKDFGGFNFSQILPDPSKPSKRSFIEDLLFNKVTLADAGFIKQYGDCLGDIAARDLICAQKFNGLTVLPPLLTDEMIAQYTSALLAGTITSGWTFGAGAALQIPFAMQMAYRFNGIGVTQNVLYENQKLIANQFNSAIGKIQDSLSSTASALGKLQDVVNQNAQALNTLVKQLSSNFGAISSVLNDILSRLDPPEAEVQIDRLITGRLQSLQTYVTQQLIRAAEIRASANLAATKMSECVLGQSKRVDFCGKGYQLMSFPQSAPHGVVFLNVTYVPAQEKNFTTAPAICNEGKAHFPREGVFVSNGTNWFITQRNFYEPQIITTDNTFVSGSCDVVIGIVNNTVYDPLQPELDSFKEELDKYFKNHTSPDVDLGDISGINASVVNIQKEIDRLNEVAKNLNESPIDLQELGKYEQYIKGGGSGGGQIYEGKLTAEGLRFGIVASRFNHALVDRLVEGAIDAIVRHGGREEDITLVRVPGSWEIPVAAGELARKEDIDAVIAIGVLIRGATPHFDYIASEVSKGLADLSLELRKPITFGVITADTLEQAIERAGTKHGNKGWEAALSAIEMANLFKSLR

SEQ ID NO: 3956 - protein, 1365 aa, Artificial Sequence
  SARS-CoV-2/pangolin/Guangxi/P5L/2017__EPI_ISL_410540 spike protein (1-1205)(K980P_V981P_ H1042Q_H1058N_ H1077N_H1095N) LumSynth construct
MFVFLFVLPLVSSQCVNLTTRTGIPPGYTNSSTRGVYYPDKVFRSSILHLTQDLFLPFFSNVTWFNTINYQGGFKKFDNPVLPFNDGVYFASTEKSNIIRGWIFGTTLDARTQSLLIVNNATNVVIKVCEFQFCTDPFLGVYYHNNNKTWVENEFRVYSSANNCTFEYISQPFLMDLEGKQGNFKNLREFVFKNVDGYFKIYSKHTPIDLVRDLPRGFAALEPLVDLPIGINITRFQTLLALHRSYLTPGKLESGWTTGAAAYYVGYLQQRTFLLSYNQNGTITDAVDCSLDPLSETKCTLKSLTVEKGIYQTSNFRVQPTISIVRFPNITNLCPFGEVFNASKFASVYAWNRKRISNCVADYSVLYNSTSFSTFKCYGVSPTKLNDLCFTNVYADSFVVKGDEVRQIAPGQTGVIADYNYKLPDDFTGCVIAWNSVKQDALTGGNYGYLYRLFRKSKLKPFERDISTEIYQAGSTPCNGQVGLNCYYPLERYGFHPTTGVNYQPFRVVVLSFELLNGPATVCGPKLSTTLVKDKCVNFNFNGLTGTGVLTTSKKQFLPFQQFGRDISDTTDAVRDPQTLEILDITPCSFGGVSVITPGTNTSNQVAVLYQDVNCTEVPMAIHAEQLTPAWRVYSAGANVFQTRAGCLVGAEHVNNSYECDIPVGAGICASYHSMSSFRSVNQRSIIAYTMSLGAENSVAYSNNSIAIPTNFTISVTTEILPVSMTKTSVDCTMYICGDSIECSNLLLQYGSFCTQLNRALTGIAVEQDKNTQEVFAQVKQIYKTPPIKDFGGFNFSQILPDPSKPSKRSFIEDLLFNKVTLADAGFIKQYGDCLGDIAARDLICAQKFNGLTVLPPLLTDEMIAQYTSALLAGTITSGWTFGAGAALQIPFAMQMAYRFNGIGVTQNVLYENQKLIANQFNSAIGKIQDSLSSTASALGKLQDVVNQNAQALNTLVKQLSSNFGAISSVLNDILSRLDPPEAEVQIDRLITGRLQSLQTYVTQQLIRAAEIRASANLAATKMSECVLGQSKRVDFCGKGYQLMSFPQSAPHGVVFLNVTYVPAQEKNFTTAPAICNEGKAHFPREGVFVSNGTNWFITQRNFYEPQIITTDNTFVSGSCDVVIGIVNNTVYDPLQPELDSFKEELDKYFKNHTSPDVDLGDISGINASVVNIQKEIDRLNEVAKNLNESLIDLQELGKYEQYIKGGGSGGGQIYEGKLTAEGLRFGIVASRFNHALVDRLVEGAIDAIVRHGGREEDITLVRVPGSWEIPVAAGELARKEDIDAVIAIGVLIRGATPHFDYIASEVSKGLADLSLELRKPITFGVITADTLEQAIERAGTKHGNKGWEAALSAIEMANLFKSLR

SEQ ID NO: 3957 - protein, 1365 aa, Artificial Sequence
  SARS-CoV-2/pangolin/Guangxi/P5E/2017__EPI_ISL_410541 spike protein (1-1205)(K980P_V981P_ H1042Q_H1058N_ H1077N_H1095N) LumSynth construct
MFVFLFVLPLVSSQCVNLTTRTGIPPGYTNSSTRGVYYPDKVFRSSILHLTQDLFLPFFSNVTWFNTITYQGGSKKFDNPVLPFNDGVYFASTEKSNIIRGWIFGTTLDARTQSLLIVNNATNVVIKVCEFQFCTDPFLGVYYHNNNKTWVENEFRVYSSANNCTFEYISQPFLMDLEGKQGNFKNLREFVFKNVDGYFKIYSKHTPIDLVRDLPRGFAALEPLVDLPIGINITRFQTLLALHRSYLTPGKLESGWTTGAAAYYVGYLQQRTFLLSYNQNGTITDAVDCSLDPLSETKCTLKSLTVEKGIYQTSNFRVQPTISIVRFPNITNLCPFGEVFNASKFASVYAWNRKRISNCVADYSVLYNSTSFSTFKCYGVSPTKLNDLCFTNVYADSFVVKGDEVRQIAPGQTGVIADYNYKLPDDFTGCVIAWNSVKQDALTGDNYGYLYRLFRKSKLKPFERDISTEIYQAGSTPCNGQVGLNCYYPLERYGFHPTTGVNYQPFRVVVLSFELLNGPATVCGPKLSTTLVKDKCVNFNFNGLTGTGVLTTSKKQFLPFQQFGRDISDTTDAVRDPQTLEILDITPCSFGGVSVITPGTNTSNQVAVLYQDVNCTEVPMAIHAEQLTPAWRVYSAGANVFQTRAGCLVGAEHVNNSYECDIPVGAGICASYHSMSSFRSVNQRSIIAYTMSLGAENSVAYSNNSIAIPTNFTISVTTEILPVSMTKTSVDCTMYICGDSIECSNLLLQYGSFCTQLNRALTGIAVEQDKNTQEVFAQVKQIYKTPPIKDFGGFNFSQILPDPSKPSKRSFIEDLLFNKVTLADAGFIKQYGDCLGDIAARDLICAQKFNGLTVLPPLLTDEMIAQYTSALLAGTITSGWTFGAGAALQIPFAMQMAYRFNGIGVTQNVLYENQKLIANQFNSAIGKIQDSLSSTASALGKLQDVVNQNAQALNTLVKQLSSNFGAISSVLNDILSRLDPPEAEVQIDRLITGRLQSLQTYVTQQLIRAAEIRASANLAATKMSECVLGQSKRVDFCGKGYQLMSFPQSAPHGVVFLNVTYVPAQEKNFTTAPAICNEGKAHFPREGVFVSNGTNWFITQRNFYEPQIITTDNTFVSGSCDVVIGIVNNTVYDPLQPELDSFKEELDKYFKNHTSPDVDLGDISGINASVVNIQKEIDRLNEVAKNLNESLIDLQELGKYEQYIKGGGSGGGQIYEGKLTAEGLRFGIVASRFNHALVDRLVEGAIDAIVRHGGREEDITLVRVPGSWEIPVAAGELARKEDIDAVIAIGVLIRGATPHFDYIASEVSKGLADLSLELRKPITFGVITADTLEQAIERAGTKHGNKGWEAALSAIEMANLFKSLR

SEQ ID NO: 3958 - protein, 1363 aa, Artificial Sequence
  SARS-CoV-2/pangolin/Guangxi/P1E/2017__EPI_ISL_410539 spike protein (1-1203)(K978P_V979P_ H1040Q_H1056N_ H1075N_H1093N) LumSynth construct
MFVFLFVLPLVSSQCVNLTTRTGIQPGYTNSSTRGVYYPDKVFRSSILHLTQDLFLPFFSNVTWFNTINYQGGFKKFDNPVLPFNDGVYFASTEKSNIIRGWIFGTTLDARTQSLLIVNNATNVVIKVCEFQFCTDPFLGVYYHNNNKTWVENEFRVYSSANNCTFEYISQPFLMDLEGKQGNFKNLREFVFKNVDGYFKIYSKHTPIDLVRDLPRGFAALEPLVDLPIGINITRFQTLLALHRSYLTPGKLESGWTTGAAAYYVGYLQQRTFLLSYNQNGTITDAVDCSLDPLSETKCTLKSLTVEKGIYQTSNFRVQPTISIVRFPNITNLCPFGEVFNASKFASVYAWNRKRISNCVADYSVLYNSTSFSTFKCYGVSPTKLNDLCFTNVYADSFVVKGDEVRQIAPGQTGVIADYNYKLPDDFTGCVIAWNSVKQDALTGGNYLYRLFRKSKLKPFERDISTEIYQAGSTPCNGQVGLNCYYPLERYGFHPTTGVNYQPFRVVVLSFELLNGPATVCGPKLSTTLVKDKCVNFNFNGLTGTGVLTTSKKQFLPFQQFGRDISDTTDAVRDPQTLEILDITPCSFGGVSVITPGTNTSNQVAVLYQDVNCTEVPMAIHAEQLTPAWRVYSAGANVFQTRAGCLVGAEHVNNSYECDIPVGAGICASYHSMSSLRSVNQRSIIAYTMSLGAENSVAYSNNSIAIPTNFTISVTTEILPVSMTKTSVDCTMYICGDSIECSNLLLQYGSFCTQLNRALTGIAVEQDKNTQEVFAQVKQIYKTPPIKDFGGFNFSQILPDPSKPSKRSFIEDLLFNKVTLADAGFIKQYGDCLGDIAARDLICAQKFNGLTVLPPLLTDEMIAQYTSALLAGTITSGWTFGAGAALQIPFAMQMAYRFNGIGVTQNVLYENQKLIANQFNSAIGKIQDSLSSTASALGKLQDVVNQNAQALNTLVKQLSSNFGAISSVLNDILSRLDPPEAEVQIDRLITGRLQSLQTYVTQQLIRAAEIRASANLAATKMSECVLGQSKRVDFCGKGYQLMSFPQSAPHGVVFLNVTYVPAQEKNFTTAPAICNEGKAHFPREGVFVSNGTNWFITQRNFYEPQIITTDNTFVSGSCDVVIGIVNNTVYDPLQPELDSFKEELDKYFKNHTSPDVDLGDISGINASVVNIQKEIDRLNEVAKNLNESLIDLQELGKYEQYIKGGGSGGGQIYEGKLTAEGLRFGIVASRFNHALVDRLVEGAIDAIVRHGGREEDITLVRVPGSWEIPVAAGELARKEDIDAVIAIGVLIRGATPHFDYIASEVSKGLADLSLELRKPITFGVITADTLEQAIERAGTKHGNKGWEAALSAIEMANLFKSLR

SEQ ID NO: 3959 - protein, 1371 aa, Artificial Sequence
  SARS-CoV-2/Wuhan/WIV05/2019__EPI_ISL_402128 spike protein (1-1211)(I712C_T1077C) LumSynth construct
MFVFLVLLPLVSSQCVNLTTRTQLPPAYTNSFTRGVYYPDKVFRSSVLHSTQDLFLPFFSNVTWFHAIHVSGTNGTKRFDNPVLPFNDGVYFASTEKSNIIRGWIFGTTLDSKTQSLLIVNNATNVVIKVCEFQFCNDPFLGVYYHKNNKSWMESEFRVYSSANNCTFEYVSQPFLMDLEGKQGNFKNLREFVFKNIDGYFKIYSKHTPINLVRDLPQGFSALEPLVDLPIGINITRFQTLLALHRSYLTPGDSSSGWTAGAAAYYVGYLQPRTFLLKYNENGTITDAVDCALDPLSETKCTLKSFTVEKGIYQTSNFRVQPTESIVRFPNITNLCPFGEVFNATRFASVYAWNRKRISNCVADYSVLYNSASFSTFKCYGVSPTKLNDLCFTNVYADSFVIRGDEVRQIAPGQTGKIADYNYKLPDDFTGCVIAWNSNNLDSKVGGNYNYLYRLFRKSNLKPFERDISTEIYQAGSTPCNGVEGFNCYFPLQSYGFQPTNGVGYQPYRVVVLSFELLHAPATVCGPKKSTNLVKNKCVNFNFNGLTGTGVLTESNKKFLPFQQFGRDIADTTDAVRDPQTLEILDITPCSFGGVSVITPGTNTSNQVAVLYQDVNCTEVPVAIHADQLTPTWRVYSTGSNVFQTRAGCLIGAEHVNNSYECDIPIGAGICASYQTQTNSPRRARSVASQSIIAYTMSLGAENSVAYSNNSCAIPTNFTISVTTEILPVSMTKTSVDCTMYICGDSTECSNLLLQYGSFCTQLNRALTGIAVEQDKNTQEVFAQVKQIYKTPPIKDFGGFNFSQILPDPSKPSKRSFIEDLLFNKVTLADAGFIKQYGDCLGDIAARDLICAQKFNGLTVLPPLLTDEMIAQYTSALLAGTITSGWTFGAGAALQIPFAMQMAYRFNGIGVTQNVLYENQKLIANQFNSAIGKIQDSLSSTASALGKLQDVVNQNAQALNTLVKQLSSNFGAISSVLNDILSRLDKVEAEVQIDRLITGRLQSLQTYVTQQLIRAAEIRASANLAATKMSECVLGQSKRVDFCGKGYHLMSFPQSAPHGVVFLHVTYVPAQEKNFTCAPAICHDGKAHFPREGVFVSNGTHWFVTQRNFYEPQIITTDNTFVSGNCDVVIGIVNNTVYDPLQPELDSFKEELDKYFKNHTSPDVDLGDISGINASVVNIQKEIDRLNEVAKNLNESLIDLQELGKYEQYIKGGGSGGGQIYEGKLTAEGLRFGIVASRFNHALVDRLVEGAIDAIVRHGGREEDITLVRVPGSWEIPVAAGELARKEDIDAVIAIGVLIRGATPHFDYIASEVSKGLADLSLELRKPITFGVITADTLEQAIERAGTKHGNKGWEAALSAIEMANLFKSLR

SEQ ID NO: 3960 - protein, 1367 aa, Artificial Sequence
  SARS-CoV-2/bat/Yunnan/RaTG13/2013__EPI_ISL_402131 spike protein (1-1207)(I708C_T1073C) LumSynth construct
MFVFLVLLPLVSSQCVNLTTRTQLPPAYTNSSTRGVYYPDKVFRSSVLHLTQDLFLPFFSNVTWFHAIHVSGTNGIKRFDNPVLPFNDGVYFASTEKSNIIRGWIFGTTLDSKTQSLLIVNNATNVVIKVCEFQFCNDPFLGVYYHKNNKSWMESEFRVYSSANNCTFEYVSQPFLMDLEGKQGNFKNLREFVFKNIDGYFKIYSKHTPINLVRDLPPGFSALEPLVDLPIGINITRFQTLLALHRSYLTPGDSSSGWTAGAAAYYVGYLQPRTFLLKYNENGTITDAVDCALDPLSETKCTLKSFTVEKGIYQTSNFRVQPTDSIVRFPNITNLCPFGEVFNATTFASVYAWNRKRISNCVADYSVLYNSTSFSTFKCYGVSPTKLNDLCFTNVYADSFVITGDEVRQIAPGQTGKIADYNYKLPDDFTGCVIAWNSKHIDAKEGGNFNYLYRLFRKANLKPFERDISTEIYQAGSKPCNGQTGLNCYYPLYRYGFYPTDGVGHQPYRVVVLSFELLNAPATVCGPKKSTNLVKNKCVNFNFNGLTGTGVLTESNKKFLPFQQFGRDIADTTDAVRDPQTLEILDITPCSFGGVSVITPGTNASNQVAVLYQDVNCTEVPVAIHADQLTPTWRVYSTGSNVFQTRAGCLIGAEHVNNSYECDIPIGAGICASYQTQTNSRSVASQSIIAYTMSLGAENSVAYSNNSCAIPTNFTISVTTEILPVSMTKTSVDCTMYICGDSTECSNLLLQYGSFCTQLNRALTGIAVEQDKNTQEVFAQVKQIYKTPPIKDFGGFNFSQILPDPSKPSKRSFIEDLLFNKVTLADAGFIKQYGDCLGDIAARDLICAQKFNGLTVLPPLLTDEMIAQYTSALLAGTITSGWTFGAGAALQIPFAMQMAYRFNGIGVTQNVLYENQKLIANQFNSAIGKIQDSLSSTASALGKLQDVVNQNAQALNTLVKQLSSNFGAISSVLNDILSRLDKVEAEVQIDRLITGRLQSLQTYVTQQLIRAAEIRASANLAATKMSECVLGQSKRVDFCGKGYHLMSFPQSAPHGVVFLHVTYVPAQEKNFTCAPAICHDGKAHFPREGVFVSNGTHWFVTQRNFYEPQIITTDNTFVSGSCDVVIGIVNNTVYDPLQPELDSFKEELDKYFKNHTSPDVDLGDISGINASVVNIQKEIDRLNEVAKNLNESLIDLQELGKYEQYIKGGGSGGGQIYEGKLTAEGLRFGIVASRFNHALVDRLVEGAIDAIVRHGGREEDITLVRVPGSWEIPVAAGELARKEDIDAVIAIGVLIRGATPHFDYIASEVSKGLADLSLELRKPITFGVITADTLEQAIERAGTKHGNKGWEAALSAIEMANLFKSLR

SEQ ID NO: 3961 - protein, 1371 aa, Artificial Sequence
  SARS-CoV-2/Wuhan/HBCDC-HB-01/2019__EPI_ISL_402132 spike protein (1-1211)(I712C_T1077C) LumSynth construct
MFVFLVLLPLVSSQCVNLTTRTQLPPAYTNSITRGVYYPDKVFRSSVLHSTQDLFLPFFSNVTWFHAIHVSGTNGTKRFDNPVLPFNDGVYFASTEKSNIIRGWIFGTTLDSKTQSLLIVNNATNVVIKVCEFQFCNDPFLGVYYHKNNKSWMESEFRVYSSANNCTFEYVSQPFLMDLEGKQGNFKNLREFVFKNIDGYFKIYSKHTPINLVRDLPQGFSALEPLVDLPIGINITRFQTLLALHRSYLTPGDSSSGWTAGAAAYYVGYLQPRTFLLKYNENGTITDAVDCALDPLSETKCTLKSFTVEKGIYQTSNFRVQPTESIVRFPNITNLCPFGEVFNATRFASVYAWNRKRISNCVADYSVLYNSASFSTFKCYGVSPTKLNDLCFTNVYADSFVIRGDEVRQIAPGQTGKIADYNYKLPDDFTGCVIAWNSNNLDSKVGGNYNYLYRLFRKSNLKPFERDISTEIYQAGSTPCNGVEGFNCYFPLQSYGFQPTNGVGYQPYRVVVLSFELLHAPATVCGPKKSTNLVKNKCVNFNFNGLTGTGVLTESNKKFLPFQQFGRDIADTTDAVRDPQTLEILDITPCSFGGVSVITPGTNTSNQVAVLYQDVNCTEVPVAIHADQLTPTWRVYSTGSNVFQTRAGCLIGAEHVNNSYECDIPIGAGICASYQTQTNSPRRARSVASQSIIAYTMSLGAENSVAYSNNSCAIPTNFTISVTTEILPVSMTKTSVDCTMYICGDSTECSNLLLQYGSFCTQLNRALTGIAVEQDKNTQEVFAQVKQIYKTPPIKDFGGFNFSQILPDPSKPSKRSFIEDLLFNKVTLADAGFIKQYGDCLGDIAARDLICAQKFNGLTVLPPLLTDEMIAQYTSALLAGTITSGWTFGAGAALQIPFAMQMAYRFNGIGVTQNVLYENQKLIANQFNSAIGKIQDSLSSTASALGKLQDVVNQNAQALNTLVKQLSSNFGAISSVLNDILSRLDKVEAEVQIDRLITGRLQSLQTYVTQQLIRAAEIRASANLAATKMSECVLGQSKRVDFCGKGYHLMSFPQSAPHGVVFLHVTYVPAQEKNFTCAPAICHDGKAHFPREGVFVSNGTHWFVTQRNFYEPQIITTDNTFVSGNCDVVIGIVNNTVYDPLQPELDSFKEELDKYFKNHTSPDVDLGDISGINASVVNIQKEIDRLNEVAKNLNESLIDLQELGKYEQYIKGGGSGGGQIYEGKLTAEGLRFGIVASRFNHALVDRLVEGAIDAIVRHGGREEDITLVRVPGSWEIPVAAGELARKEDIDAVIAIGVLIRGATPHFDYIASEVSKGLADLSLELRKPITFGVITADTLEQAIERAGTKHGNKGWEAALSAIEMANLFKSLR

SEQ ID NO: 3962 - protein, 1371 aa, Artificial Sequence
  SARS-CoV-2/Guangdong/20SF028/2020__EPI_ISL_403936 spike protein (1-1211)(I712C_T1077C) LumSynth construct
MFVFLVLLPLVSSQCVNLTTRTQLPPAYTNSFTRGVYYPDKVFRSSVLYSTQDLFLPFFSNVTWFHAIHVSGTNGTKRFDNPVLPFNDGVYFASTEKSNIIRGWIFGTTLDSKTQSLLIVNNATNVVIKVCEFQFCNDPFLGVYYHKNNKSWMESEFRVYSSANNCTFEYVSQPFLMDLEGKQGNFKNLREFVFKNIDGYFKIYSKHTPINLVRDLPQGFSALEPLVDLPIGINITRFQTLLALHRSYLTPGDSSSGWTAGAAAYYVGYLQPRTFLLKYNENGTITDAVDCALDPLSETKCTLKSFTVEKGIYQTSNFRVQPTESIVRFPNITNLCPFGEVFNATRFASVYAWNRKRISNCVADYSVLYNSASFSTFKCYGVSPTKLNDLCFTNVYADSFVIRGDEVRQIAPGQTGKIADYNYKLPDDFTGCVIAWNSNNLDSKVGGNYNYLYRLFRKSNLKPFERDISTEIYQAGSTPCNGVEGFNCYFPLQSYGFQPTNGVGYQPYRVVVLSFELLHAPATVCGPKKSTNLVKNKCVNFNFNGLTGTGVLTESNKKFLPFQQFGRDIADTTDAVRDPQTLEILDITPCSFGGVSVITPGTNTSNQVAVLYQDVNCTEVPVAIHADQLTPTWRVYSTGSNVFQTRAGCLIGAEHVNNSYECDIPIGAGICASYQTQTNSPRRARSVASQSIIAYTMSLGAENSVAYSNNSCAIPTNFTISVTTEILPVSMTKTSVDCTMYICGDSTECSNLLLQYGSFCTQLNRALTGIAVEQDKNTQEVFAQVKQIYKTPPIKDFGGFNFSQILPDPSKPSKRSFIEDLLFNKVTLADAGFIKQYGDCLGDIAARDLICAQKFNGLTVLPPLLTDEMIAQYTSALLAGTITSGWTFGAGAALQIPFAMQMAYRFNGIGVTQNVLYENQKLIANQFNSAIGKIQDSLSSTASALGKLQDVVNQNAQALNTLVKQLSSNFGAISSVLNDILSRLDKVEAEVQIDRLITGRLQSLQTYVTQQLIRAAEIRASANLAATKMSECVLGQSKRVDFCGKGYHLMSFPQSAPHGVVFLHVTYVPAQEKNFTCAPAICHDGKAHFPREGVFVSNGTHWFVTQRNFYEPQIITTDNTFVSGNCDVVIGIVNNTVYDPLQPELDSFKEELDKYFKNHTSPDVDLGDISGINASVVNIQKEIDRLNEVAKNLNESLIDLQELGKYEQYIKGGGSGGGQIYEGKLTAEGLRFGIVASRFNHALVDRLVEGAIDAIVRHGGREEDITLVRVPGSWEIPVAAGELARKEDIDAVIAIGVLIRGATPHFDYIASEVSKGLADLSLELRKPITFGVITADTLEQAIERAGTKHGNKGWEAALSAIEMANLFKSLR

SEQ ID NO: 3963 - protein, 1371 aa, Artificial Sequence
  SARS-CoV-2/Shenzhen/SZTH-001/2020__EPI_ISL_406592 spike protein (1-1211)(I712C_T1077C) LumSynth construct
MFVFLVLLPLVSSQCVNLTTRTQLPPAYTNSFTRGVYYPDKVFRSSVLHSTQDLFLPFFSNVTWFHAIHVSGTNGTKRFDNPVLPFNDGVYFASTEKSNIIRGWIFGTTLDSKTQSLLIVNNATNVVIKVCEFQFCNDPFLGVYYHKNNKSWMESEFRVYSSANNCTFEYVSQPFLMDLEGKQGNFKNLREFVFKNIDGYFKIYSKHTPINLVRDLPQGFSALEPLVDLPIGINITRFQTLLALHRSYLTPGDSSSGWTAGAAAYYVGYLQPRTFLLKYNENGTITDAVDCALDPLSETKCTLKSFTVEKGIYQTSNFRVQPTESIVRFPNITNLCPFGEVFNATRFASVYAWNRKRISNCVADYSVLYNSASFSTFKCYGVSPTKLNDLCFTNVYADSFVIRGDEVRQIAPGQTGKIADYNYKLPDDFTGCVIAWNSNNLDSKVGGNYNYLYRLFRKSNLKPFERDISTEIYQAGSTPCNGVEGFNCYFPLQSYGFQPTNGVGYQPYRVVVLSFELLHAPATVCGPKKSTNLVKNKCVNFNFNGLTGTGVLTESNKKFLPFQQFGRDIADTTDAVRDPQTLEILDITPCSFGGVSVITPGTNTSNQVAVLYQDVNCTEVPVAIHADQLTPTWRVYSTGSNVFQTRAGCLIGAEHVNNSYECDIPIGAGICASYQTQTNSPRRARSVASQSIIAYTMSLGAENSVAYSNNSCAIPTNFTISVTTEILPVSMTKTSVDCTMYICGDSTECSNLLLQYGSFCTQLNRALTGIAVEQDKNTQEVFAQVKQIYKTPPIKDFGGFNFSQILPDPSKPSKRSFIEDLLFNKVTLADAGFIKQYGDCLGDIAARDLICAQKFNGLTVLPPLLTDEMIAQYTSALLAGTITSGWTFGAGAALQIPFAMQMAYRFNGIGVTQNVLYENQKLIANQFNSAIGKIQDSLSSTASALGKLQDVVNQNAQALNTLVKQLSSNFGAISSVLNDILSRLDKVEAEVQIDRLITGRLQSLQTYVTQQLIRAAEIRASANLAATKMSECVLGQSKRVDFCGKGYHLMSFPQSAPHGVVFLHVTYVPAQEKNFTCAPAICHDGKAHFPREGVFVSNGTHWFVTQRNFYEPQIITTDNTFVSGNCDVLIGIVNNTVYDPLQPELDSFKEELDKYFKNHTSPDVDLGDISGINASVVNIQKEIDRLNEVAKNLNESLIDLQELGKYEQYIKGGGSGGGQIYEGKLTAEGLRFGIVASRFNHALVDRLVEGAIDAIVRHGGREEDITLVRVPGSWEIPVAAGELARKEDIDAVIAIGVLIRGATPHFDYIASEVSKGLADLSLELRKPITFGVITADTLEQAIERAGTKHGNKGWEAALSAIEMANLFKSLR

SEQ ID NO: 3964 - protein, 1371 aa, Artificial Sequence
  SARS-CoV-2/Shenzhen/SZTH-004/2020__EPI_ISL_406595 spike protein (1-1211)(I712C_T1077C) LumSynth construct
MFVFLVLLPLVSSQCVNLTTRTQLPPAYTNSFTRGVYYPDKVFRSSVLHSTQDLFLPFFSNVTWFHAIHVSGTNGTKRFDNPVLPFNDGVYFASTEKSNIIRGWIFGTTLDSKTQSLLIVNNATNVVIKVCEFQFCNDPFLGVYYHKNNKSWMESEFRVYSSANNCTFEYVSQPFLMDLEGKQGNFKNLREFVFKNIDGYFKIYSKHTPINLVRDLPQGFSALEPLVDLPIGINITRFQTLLALHRSYLTPGDSSSGWTAGAAAYYVGYLQPRTFLLKYNENGTITDAVDCALDPLSETKCTLKSFTVEKGIYQTSNFRVQPTESIVRFPNITNLCPFGEVFNATRFASVYAWDRKRISNCVAYYSVLYNSASFSTFKCYGVSPTKLNDLCFTNVYADSFVIRGDEVRQIAPGQTGKIADYNYKLPDDFTGCVIAWNSNNLDSKVGGNYNYLYRLFRKSNLKPFERDISTEIYQAGSTPCNGVEGFNCYFPLQSYGFQPTNGVGYQPYRVVVLSFELLHAPATVCGPKKSTNLVKNKCVNFNFNGLTGTGVLTESNKKFLPFQQFGRDIADTTDAVRDPQTLEILDITPCSFGGVSVITPGTNTSNQVAVLYQDVNCTEVPVAIHADQLTPTWRVYSTGSNVFQTRAGCLIGAEHVNNSYECDIPIGAGICASYQTQTNSPRRARSVASQSIIAYTMSLGAENSVAYSNNSCAIPTNFTISVTTEILPVSMTKTSVDCTMYICGDSTECSNLLLQYGSFCTQLNRALTGIAVEQDKNTQEVFAQVKQIYKTPPIKDFGGFNFSQILPDPSKPSKRSFIEDLLFNKVTLADAGFIKQYGDCLGDIAARDLICAQKFNGLTVLPPLLTDEMIAQYTSALLAGTITSGWTFGAGAALQIPFAMQMAYRFNGIGVTQNVLYENQKLIANQFNSAIGKIQDSLSSTASALGKLQDVVNQNAQALNTLVKQLSSNFGAISSVLNDILSRLDKVEAEVQIDRLITGRLQSLQTYVTQQLIRAAEIRASANLAATKMSECVLGQSKRVDFCGKGYHLMSFPQSAPHGVVFLHVTYVPAQEKNFTCAPAICHDGKAHFPREGVFVSNGTHWFVTQRNFYEPQIITTDNTFVSGNCDVVIGIVNNTVYDPLQPELDSFKEELDKYFKNHTSPDVDLGDISGINASVVNIQKEIDRLNEVAKNLNESLIDLQELGKYEQYIKGGGSGGGQIYEGKLTAEGLRFGIVASRFNHALVDRLVEGAIDAIVRHGGREEDITLVRVPGSWEIPVAAGELARKEDIDAVIAIGVLIRGATPHFDYIASEVSKGLADLSLELRKPITFGVITADTLEQAIERAGTKHGNKGWEAALSAIEMANLFKSLR

SEQ ID NO: 3965 - protein, 1371 aa, Artificial Sequence
  SARS-CoV-2/France/IDF0372/2020__EPI_ISL_406596 spike protein (1-1211)(I712C_T1077C) LumSynth construct
MFVFLVLLPLVSSQCVNLTTRTQLPPAYTNSFTRGVYYPDKVFRSSVLHSTQDLFLPFFSNVTWFHAIHVSGTNGTKRFDNPVLPFNDGVYFASTEKSNIIRGWIFGTTLDSKTQSLLIVNNATNVVIKVCEFQFCNDPFLGVYYHKNNKSWMESEFRVYSSANNCTFEYVSQPFLMDLEGKQGNFKNLREFVFKNIDGYFKIYSKHTPINLVRDLPQGFSALEPLVDLPIGINITRFQTLLALHRSYLTPGDSSSGWTAGAAAYYVGYLQPRTFLLKYNENGTITDAVDCALDPLSETKCTLKSFTVEKGIYQTSNFRVQPTESIVRFPNITNLCPFGEVFNATRFASVYAWNRKRISNCVADYSFLYNSASFSTFKCYGVSPTKLNDLCFTNVYADSFVIRGDEVRQIAPGQTGKIADYNYKLPDDFTGCVIAWNSNNLDSKVGGNYNYLYRLFRKSNLKPFERDISTEIYQAGSTPCNGVEGFNCYFPLQSYGFQPTNGVGYQPYRVVVLSFELLHAPATVCGPKKSTNLVKNKCVNFNFNGLTGTGVLTESNKKFLPFQQFGRDIADTTDAVRDPQTLEILDITPCSFGGVSVITPGTNTSNQVAVLYQDVNCTEVPVAIHADQLTPTWRVYSTGSNVFQTRAGCLIGAEHVNNSYECDIPIGAGICASYQTQTNSPRRARSVASQSIIAYTMSLGAENSVAYSNNSCAIPTNFTISVTTEILPVSMTKTSVDCTMYICGDSTECSNLLLQYGSFCTQLNRALTGIAVEQDKNTQEVFAQVKQIYKTPPIKDFGGFNFSQILPDPSKPSKRSFIEDLLFNKVTLADAGFIKQYGDCLGDIAARDLICAQKFNGLTVLPPLLTDEMIAQYTSALLAGTITSGWTFGAGAALQIPFAMQMAYRFNGIGVTQNVLYENQKLIANQFNSAIGKIQDSLSSTASALGKLQDVVNQNAQALNTLVKQLSSNFGAISSVLNDILSRLDKVEAEVQIDRLITGRLQSLQTYVTQQLIRAAEIRASANLAATKMSECVLGQSKRVDFCGKGYHLMSFPQSAPHGVVFLHVTYVPAQEKNFTCAPAICHDGKAHFPREGVFVSNGTHWFVTQRNFYEPQIITTDNTFVSGNCDVVIGIVNNTVYDPLQPELDSFKEELDKYFKNHTSPDVDLGDISGINASVVNIQKEIDRLNEVAKNLNESLIDLQELGKYEQYIKGGGSGGGQIYEGKLTAEGLRFGIVASRFNHALVDRLVEGAIDAIVRHGGREEDITLVRVPGSWEIPVAAGELARKEDIDAVIAIGVLIRGATPHFDYIASEVSKGLADLSLELRKPITFGVITADTLEQAIERAGTKHGNKGWEAALSAIEMANLFKSLR

SEQ ID NO: 3966 - protein, 1371 aa, Artificial Sequence
  SARS-CoV-2/Australia/VIC01/2020__EPI_ISL_406844 spike protein (1-1211)(I712C_T1077C) LumSynth construct
MFVFLVLLPLVSSQCVNLTTRTQLPPAYTNSFTRGVYYPDKVFRSSVLHSTQDLFLPFFSNVTWFHAIHVSGTNGTKRFDNPVLPFNDGVYFASTEKSNIIRGWIFGTTLDSKTQSLLIVNNATNVVIKVCEFQFCNDPFLGVYYHKNNKSWMESEFRVYSSANNCTFEYVSQPFLMDLEGKQGNFKNLREFVFKNIDGYFKIYSKHTPINLVRDLPQGFSALEPLVDLPIGINITRFQTLLALHRRYLTPGDSSSGWTAGAAAYYVGYLQPRTFLLKYNENGTITDAVDCALDPLSETKCTLKSFTVEKGIYQTSNFRVQPTESIVRFPNITNLCPFGEVFNATRFASVYAWNRKRISNCVADYSVLYNSASFSTFKCYGVSPTKLNDLCFTNVYADSFVIRGDEVRQIAPGQTGKIADYNYKLPDDFTGCVIAWNSNNLDSKVGGNYNYLYRLFRKSNLKPFERDISTEIYQAGSTPCNGVEGFNCYFPLQSYGFQPTNGVGYQPYRVVVLSFELLHAPATVCGPKKSTNLVKNKCVNFNFNGLTGTGVLTESNKKFLPFQQFGRDIADTTDAVRDPQTLEILDITPCSFGGVSVITPGTNTSNQVAVLYQDVNCTEVPVAIHADQLTPTWRVYSTGSNVFQTRAGCLIGAEHVNNSYECDIPIGAGICASYQTQTNSPRRARSVASQSIIAYTMSLGAENSVAYSNNSCAIPTNFTISVTTEILPVSMTKTSVDCTMYICGDSTECSNLLLQYGSFCTQLNRALTGIAVEQDKNTQEVFAQVKQIYKTPPIKDFGGFNFSQILPDPSKPSKRSFIEDLLFNKVTLADAGFIKQYGDCLGDIAARDLICAQKFNGLTVLPPLLTDEMIAQYTSALLAGTITSGWTFGAGAALQIPFAMQMAYRFNGIGVTQNVLYENQKLIANQFNSAIGKIQDSLSSTASALGKLQDVVNQNAQALNTLVKQLSSNFGAISSVLNDILSRLDKVEAEVQIDRLITGRLQSLQTYVTQQLIRAAEIRASANLAATKMSECVLGQSKRVDFCGKGYHLMSFPQSAPHGVVFLHVTYVPAQEKNFTCAPAICHDGKAHFPREGVFVSNGTHWFVTQRNFYEPQIITTDNTFVSGNCDVVIGIVNNTVYDPLQPELDSFKEELDKYFKNHTSPDVDLGDISGINASVVNIQKEIDRLNEVAKNLNESLIDLQELGKYEQYIKGGGSGGGQIYEGKLTAEGLRFGIVASRFNHALVDRLVEGAIDAIVRHGGREEDITLVRVPGSWEIPVAAGELARKEDIDAVIAIGVLIRGATPHFDYIASEVSKGLADLSLELRKPITFGVITADTLEQAIERAGTKHGNKGWEAALSAIEMANLFKSLR

SEQ ID NO: 3967 - protein, 1371 aa, Artificial Sequence
  SARS-CoV-2/Germany/BavPat1/2020__EPI_ISL_406862 spike protein (1-1211)(I712C_T1077C) LumSynth construct
MFVFLVLLPLVSSQCVNLTTRTQLPPAYTNSFTRGVYYPDKVFRSSVLHSTQDLFLPFFSNVTWFHAIHVSGTNGTKRFDNPVLPFNDGVYFASTEKSNIIRGWIFGTTLDSKTQSLLIVNNATNVVIKVCEFQFCNDPFLGVYYHKNNKSWMESEFRVYSSANNCTFEYVSQPFLMDLEGKQGNFKNLREFVFKNIDGYFKIYSKHTPINLVRDLPQGFSALEPLVDLPIGINITRFQTLLALHRSYLTPGDSSSGWTAGAAAYYVGYLQPRTFLLKYNENGTITDAVDCALDPLSETKCTLKSFTVEKGIYQTSNFRVQPTESIVRFPNITNLCPFGEVFNATRFASVYAWNRKRISNCVADYSVLYNSASFSTFKCYGVSPTKLNDLCFTNVYADSFVIRGDEVRQIAPGQTGKIADYNYKLPDDFTGCVIAWNSNNLDSKVGGNYNYLYRLFRKSNLKPFERDISTEIYQAGSTPCNGVEGFNCYFPLQSYGFQPTNGVGYQPYRVVVLSFELLHAPATVCGPKKSTNLVKNKCVNFNFNGLTGTGVLTESNKKFLPFQQFGRDIADTTDAVRDPQTLEILDITPCSFGGVSVITPGTNTSNQVAVLYQGVNCTEVPVAIHADQLTPTWRVYSTGSNVFQTRAGCLIGAEHVNNSYECDIPIGAGICASYQTQTNSPRRARSVASQSIIAYTMSLGAENSVAYSNNSCAIPTNFTISVTTEILPVSMTKTSVDCTMYICGDSTECSNLLLQYGSFCTQLNRALTGIAVEQDKNTQEVFAQVKQIYKTPPIKDFGGFNFSQILPDPSKPSKRSFIEDLLFNKVTLADAGFIKQYGDCLGDIAARDLICAQKFNGLTVLPPLLTDEMIAQYTSALLAGTITSGWTFGAGAALQIPFAMQMAYRFNGIGVTQNVLYENQKLIANQFNSAIGKIQDSLSSTASALGKLQDVVNQNAQALNTLVKQLSSNFGAISSVLNDILSRLDKVEAEVQIDRLITGRLQSLQTYVTQQLIRAAEIRASANLAATKMSECVLGQSKRVDFCGKGYHLMSFPQSAPHGVVFLHVTYVPAQEKNFTCAPAICHDGKAHFPREGVFVSNGTHWFVTQRNFYEPQIITTDNTFVSGNCDVVIGIVNNTVYDPLQPELDSFKEELDKYFKNHTSPDVDLGDISGINASVVNIQKEIDRLNEVAKNLNESLIDLQELGKYEQYIKGGGSGGGQIYEGKLTAEGLRFGIVASRFNHALVDRLVEGAIDAIVRHGGREEDITLVRVPGSWEIPVAAGELARKEDIDAVIAIGVLIRGATPHFDYIASEVSKGLADLSLELRKPITFGVITADTLEQAIERAGTKHGNKGWEAALSAIEMANLFKSLR

SEQ ID NO: 3968 - protein, 1371 aa, Artificial Sequence
  SARS-CoV-2/Wuhan/HBCDC-HB-02/2020__EPI_ISL_412978 spike protein (1-1211)(I712C_T1077C) LumSynth construct
MFVFLVLLPLVSSQCVNLTTRTQLPPAYTNSFTRGVYYPDKVFRSSVLHSTQDLFLPFFSNVTWFHAIHVSGTNGTKRFDNPVLPFNDGVYFASTEKSNIIRGWIFGTTLDSKTQSLLIVNNATNVVIKVCEFQFCNDPFLGVYYHKNNKSWMESEFRVYSSANNCTFEYVSQPFLMDLEGKQGNFKNLREFVFKNIDGYFKIYSKHTPINLVRDLPQGFSALEPLVDLPIGINITRFQTLLALHRSYLTPGDSSSGWTAGAAAYYVGYLQPRTFLLKYNENGTITDAVDCALDPLSETKCTLKSFTVEKGIYQTSNFRVQPTESIVRFPNITNLCPFGEVFNATRFASVYAWNRKRISNCVADYSVLYNSASFSTFKCYGVSPTKLNDLCFTNVYADSFVIRGDEVRQIAPGQTGKIADYNYKLPDDFTGCVIAWNSNNLDSKVGGNYNYLYRLFRKSNLKPFERDISTEIYQAGSTPCNGVEGFNCYFPLQSYGFQPTNGVGYQPYRVVVLSFELLHAPATVCGPKKSTNLVKNKCVNFNFNGLTGTGVLTESNKKFLPFQQFGRDIADTTDAVRDPQTLEILDITPCSFGGVSVITPGTNTSNQVAVLYQDVNCTEVPVAIHADQLTPTWRVYSTGSNVFQTRAGCLIGAEHVNNSYECDIPIGAGICASYQTQTNSPRRARSVASQSIIAYTMSLGAENSVAYSNNSCAIPTNFTISVTTEILPVSMTKTSVDCTMYICGDSTECSNFLLQYGSFCTQLNRALTGIAVEQDKNTQEVFAQVKQIYKTPPIKDFGGFNFSQILPDPSKPSKRSFIEDLLFNKVTLADAGFIKQYGDCLGDIAARDLICAQKFNGLTVLPPLLTDEMIAQYTSALLAGTITSGWTFGAGAALQIPFAMQMAYRFNGIGVTQNVLYENQKLIANQFNSAIGKIQDSLSSTASALGKLQDVVNQNAQALNTLVKQLSSNFGAISSVLNDILSRLDKVEAEVQIDRLITGRLQSLQTYVTQQLIRAAEIRASANLAATKMSECVLGQSKRVDFCGKGYHLMSFPQSAPHGVVFLHVTYVPAQEKNFTCAPAICHDGKAHFPREGVFVSNGTHWFVTQRNFYEPQIITTDNTFVSGNCDVVIGIVNNTVYDPLQPELDSFKEELDKYFKNHTSPDVDLGDISGINASVVNIQKEIDRLNEVAKNLNESLIDLQELGKYEQYIKGGGSGGGQIYEGKLTAEGLRFGIVASRFNHALVDRLVEGAIDAIVRHGGREEDITLVRVPGSWEIPVAAGELARKEDIDAVIAIGVLIRGATPHFDYIASEVSKGLADLSLELRKPITFGVITADTLEQAIERAGTKHGNKGWEAALSAIEMANLFKSLR

SEQ ID NO: 3969 - protein, 1371 aa, Artificial Sequence
  SARS-CoV-2/Australia/QLD02/2020__EPI_ISL_407896 spike protein (1-1211)(I712C_T1077C) LumSynth construct
MFVFLVLLPLVSSQCVNLTTRTQLPPAYTNSFTRGVYYPDKVFRSSVLHSTQDLFLPFFSNVTWFHAIHVSGTNGTKRFDNPVLPFNDGVYFASTEKSNIIRGWIFGTTLDSKTQSLLIVNNATNVVIKVCEFQFCNDPFLGVYYHKNNKSWMESEFRVYSSANNCTFEYVSQPFLMDLEGKQGNFKNLREFVFKNIDGYFKIYSKHTPINLVRDLPQGFSALEPLVDLPIGINITRFQTLLALHRSYLTPGDSSSGWTAGAAAYYVGYLQPRTFLLKYNENGTITDAVDCALDPLSETKCTLKSFTVEKGIYQTSNFRVQPTESIVRFPNITNLCPFGEVFNATRFASVYAWNRKRISNCVADYSVLYNSASFSTFKCYGVSPTKLNDLCFTNVYADSFVIRGDEVRQIAPGQTGKIADYNYKLPDDFTGCVIAWNSNNLDSKVGGNYNYLYRLFRKSNLKPFERDISTEIYQAGSTPCNGVEGFNCYFPLQSYGFQPTNGVGYQPYRVVVLSFELLHAPATVCGPKKSTNLVKNKCVNFNFNGLTGTGVLTESNKKFLPFQQFGRDIADTTDAVRDPQTLEILDITPCSFGGVSVITPGTNTSNQVAVLYQDVNCTEVPVAIHADQLTPTWRVYSTGSNVFQTRAGCLIGAEHVNNSYECDIPIGAGICASYQTQTNSPRRARSVASQSIIAYTMSLGAENSVAYSNNSCAIPTNFTISVTTEILPVSMTKTSVDCTMYICGDSTECSNLLLQYGSFCTQLNRALTGIAVEQDKNTQEVFAQVKQIYKTPPIKDFGGFNFSQILPDPSKPSKRSFIEDLLFNKVTLADAGFIKQYGDCLGDIAARDLICAQKFNGLTVLPPLLTDEMIAQYTSALLAGTITSGWTFGAGAALQIPFAMQMAYRFNGIGVTQNVLYENQKLIANQFNSAIGKIQDSLSSTASALGKLQDVVNQNAQALNTLVKQLSSNFGAISSVLNDILSRLDKVEAEVQIDRLITGRLQSLQTYVTQQLIRAAEIRASANLAATKMSECVLGQSKRVDFCGKGYHLMSFPQSAPHGVVFLHVTYVPAQEKNFTCAPAICHDGKAHFPREGVFVSNGTHWFVTQRNFYEPQIITTDNTFVSGNCDVVIGIVNNTVYDPLQLELDSFKEELDKYFKNHTSPDVDLGDISGINASVVNIQKEIDRLNEVAKNLNESLIDLQELGKYEQYIKGGGSGGGQIYEGKLTAEGLRFGIVASRFNHALVDRLVEGAIDAIVRHGGREEDITLVRVPGSWEIPVAAGELARKEDIDAVIAIGVLIRGATPHFDYIASEVSKGLADLSLELRKPITFGVITADTLEQAIERAGTKHGNKGWEAALSAIEMANLFKSLR

SEQ ID NO: 3970 - protein, 1371 aa, Artificial Sequence
  SARS-CoV-2/India/1-31/2020__EPI_ISL_413523 spike protein (1-1211)(I712C_T1077C) LumSynth construct
MFVFLVLLPLVSSQCVNLTTRTQLPPAYTNSFTRGVYYPDKVFRSSVLHSTQDLFLPFFSNVTWFHAIHVSGTNGTKRFDNPVLPFNDGVYFASTEKSNIIRGWIFGTTLDSKTQSLLIVNNATNVVIKVCEFQFCNDPFLGVYYHKNNKSWMESEFRVYSSANNCTFEYVSQPFLMDLEGKQGNFKNLREFVFKNIDGYFKIYSKHTPINLVRDLPQGFSALEPLVDLPIGINITRFQTLLALHRSYLTPGDSSSGWTAGAAAYYVGYLQPRTFLLKYNENGTITDAVDCALDPLSETKCTLKSFTVEKGIYQTSNFRVQPTESIVRFPNITNLCPFGEVFNATRFASVYAWNRKRISNCVADYSVLYNSASFSTFKCYGVSPTKLNDLCFTNVYADSFVIRGDEVRQIAPGQTGKIADYNYKLPDDFTGCVIAWNSNNLDSKVGGNYNYLYRLFRKSNLKPFERDISTEIYQAGSTPCNGVEGFNCYFPLQSYGFQPTNGVGYQPYRVVVLSFELLHAPATVCGPKKSTNLVKNKCVNFNFNGLTGTGVLTESNKKFLPFQQFGRDIADTTDAVRDPQTLEILDITPCSFGGVSVITPGTNTSNQVAVLYQDVNCTEVPVAIHADQLTPTWRVYSTGSNVFQTRAGCLIGAEHVNNSYECDIPIGAGICASYQTQTNSPRRARSVASQSIIAYTMSLGAENSVAYSNNSCAIPTNFTISVTTEILPVSMTKTSVDCTMYICGDSTECSNLLLQYGSFCTQLNRALTGIAVEQDKNTQEVFAQVKQIYKTPPIKDFGGFNFSQILPDPSKPSKRSFIEDLLFNKVTLADAGFIKQYGDCLGDIAARDLICAQKFNGLTVLPPLLTDEMIAQYTSALLAGTITSGWTFGAGAALQIPFAMQMAYRFNGIGVTQNVLYENQKLIANQFNSVIGKIQDSLSSTASALGKLQDVVNQNAQALNTLVKQLSSNFGAISSVLNDILSRLDKVEAEVQIDRLITGRLQSLQTYVTQQLIRAAEIRASANLAATKMSECVLGQSKRVDFCGKGYHLMSFPQSAPHGVVFLHVTYVPAQEKNFTCAPAICHDGKAHFPREGVFVSNGTHWFVTQRNFYEPQIITTDNTFVSGNCDVVIGIVNNTVYDPLQPELDSFKEELDKYFKNHTSPDVDLGDISGINASVVNIQKEIDRLNEVAKNLNESLIDLQELGKYEQYIKGGGSGGGQIYEGKLTAEGLRFGIVASRFNHALVDRLVEGAIDAIVRHGGREEDITLVRVPGSWEIPVAAGELARKEDIDAVIAIGVLIRGATPHFDYIASEVSKGLADLSLELRKPITFGVITADTLEQAIERAGTKHGNKGWEAALSAIEMANLFKSLR

SEQ ID NO: 3971 - protein, 1371 aa, Artificial Sequence
  SARS-CoV-2/Guangdong/GD2020087-P0008/2020__EPI_ISL_413863 spike protein (1-1211)(I712C_T1077C) LumSynth construct
MFVFLVLLPLVSSQCVNLTTRTQLPPAYTNSFTRGVYYPDKVFRSSVLHSTQDLFLPFFSNVTWFHAIHVSGTNGTKRFDNPVLPFNDGVYFASTEKSNIIRGWIFGTTLDSKTQSLLIVNNATNVVIKVCEFQFCNDPFLGVYYHKNNKSWMESEFRVYSSANNCTFEYVSQPFLMDLEGKQGNFKNLREFVFKNIDGYFKIYSKHTPINLVRDLPQGFSALEPLVDLPIGINITRFQTLLALHRSYLTPGDSSSGWTAGAAAYYVGYLQPRTFLLKYNENGTITDAVDCALDPLSETKCTLKSFTVEKGIYQTSNFRVQPTESIVRFPNITNLCPFGEVFNATRFASVYAWNRKRISNCVADYSVLYNSASFSTFKCYGVSPTKLNDLCFTNVYADSFVIRGDEVREIAPGQTGKIADYNYKLPDDFTGCVIAWNSNNLDSKVGGNYNYLYRLFRKSNLKPFERDISTEIYQAGSTPCNGVEGFNCYFPLQSYGFQPTNGVGYQPYRVVVLSFELLHAPATVCGPKKSTNLVKNKCVNFNFNGLTGTGVLTESNKKFLPFQQFGRDIADTTDAVRDPQTLEILDITPCSFGGVSVITPGTNTSNQVAVLYQDVNCTEVPVAIHADQLTPTWRVYSTGSNVFQTRAGCLIGAEHVNNSYECDIPIGAGICASYQTQTNSPRRARSVASQSIIAYTMSLGAENSVAYSNNSCAIPTNFTISVTTEILPVSMTKTSVDCTMYICGDSTECSNLLLQYGSFCTQLNRALTGIAVEQDKNTQEVFAQVKQIYKTPPIKDFGGFNFSQILPDPSKPSKRSFIEDLLFNKVTLADAGFIKQYGDCLGDIAARDLICAQKFNGLTVLPPLLTDEMIAQYTSALLAGTITSGWTFGAGAALQIPFAMQMAYRFNGIGVTQNVLYENQKLIANQFNSAIGKIQDSLSSTASALGKLQDVVNQNAQALNTLVKQLSSNFGAISSVLNDILSRLDKVEAEVQIDRLITGRLQSLQTYVTQQLIRAAEIRASANLAATKMSECVLGQSKRVDFCGKGYHLMSFPQSAPHGVVFLHVTYVPAQEKNFTCAPAICHDGKAHFPREGVFVSNGTHWFVTQRNFYEPQIITTDNTFVSGNCDVVIGIVNNTVYDPLQPELDSFKEELDKYFKNHTSPDVDLGDISGINASVVNIQKEIDRLNEVAKNLNESLIDLQELGKYEQYIKGGGSGGGQIYEGKLTAEGLRFGIVASRFNHALVDRLVEGAIDAIVRHGGREEDITLVRVPGSWEIPVAAGELARKEDIDAVIAIGVLIRGATPHFDYIASEVSKGLADLSLELRKPITFGVITADTLEQAIERAGTKHGNKGWEAALSAIEMANLFKSLR

SEQ ID NO: 3972 - protein, 1371 aa, Artificial Sequence
  SARS-CoV-2/Sweden/01/2020__EPI_ISL_411951 spike protein (1-1211)(I712C_T1077C) LumSynth construct
MFVFLVLLPLVSSQCVNLTTRTQLPPAYTNSFTRGVYYPDKVFRSSVLHSTQDLFLPFFSNVTWFHAIHVSGTNGTKRFDNPVLPFNDGVYFASTEKSNIIRGWIFGTTLDSKTQSLLIVNNATNVVIKVCEFQFCNDPFLGVYYHKNNKSWMESEFRVYSSANNCTFEYVSQPFLMDLEGKQGNFKNLREFVFKNIDGYFKIYSKHTPINLVRDLPQGFSALEPLVDLPIGINITRFQTLLALHRSYLTPGDSSSGWTAGAAAYYVGYLQPRTFLLKYNENGTITDAVDCALDPLSETKCTLKSFTVEKGIYQTSNFRVQPTESIVRFPNITNLCPFGEVFNATRFASVYAWNRKRISNCVADYSVLYNSASFSTFKCYGVSPTKLNDLCFTNVYADSFVIRGDEVRQIAPGQTGKIADYNYKLPDDFTGCVIAWNSNNLDSKVGGNYNYLYRLFRKSNLKPFERDISTEIYQAGSTPCNGVEGFNCYFPLQSYGFQPTNGVGYQPYRVVVLSFELLHAPATVCGPKKSTNLVKNKCVNFNFNGLTGTGVLTESNKKFLPFQQFGRDIADTTDAVRDPQTLEILDITPCSFGGVSVITPGTNTSNQVAVLYQDVNCTEVPVAIHADQLTPTWRVYSTGSNVFQTRAGCLIGAEHVNNSYECDIPIGAGICASYQTQTNSPRRARSVASQSIIAYTMSLGAENSVAYSNNSCAIPTNFTISVTTEILPVSMTKTSVDCTMYICGDSTECSNLLLQYGSFCTQLNRALTGIAVEQDKNTQEVFAQVKQIYKTPPIKDCGGFNFSQILPDPSKPSKRSFIEDLLFNKVTLADAGFIKQYGDCLGDIAARDLICAQKFNGLTVLPPLLTDEMIAQYTSALLAGTITSGWTFGAGAALQIPFAMQMAYRFNGIGVTQNVLYENQKLIANQFNSAIGKIQDSLSSTASALGKLQDVVNQNAQALNTLVKQLSSNFGAISSVLNDILSRLDKVEAEVQIDRLITGRLQSLQTYVTQQLIRAAEIRASANLAATKMSECVLGQSKRVDFCGKGYHLMSFPQSAPHGVVFLHVTYVPAQEKNFTCAPAICHDGKAHFPREGVFVSNGTHWFVTQRNFYEPQIITTDNTFVSGNCDVVIGIVNNTVYDPLQPELDSFKEELDKYFKNHTSPDVDLGDISGINASVVNIQKEIDRLNEVAKNLNESLIDLQELGKYEQYIKGGGSGGGQIYEGKLTAEGLRFGIVASRFNHALVDRLVEGAIDAIVRHGGREEDITLVRVPGSWEIPVAAGELARKEDIDAVIAIGVLIRGATPHFDYIASEVSKGLADLSLELRKPITFGVITADTLEQAIERAGTKHGNKGWEAALSAIEMANLFKSLR

SEQ ID NO: 3973 - protein, 1371 aa, Artificial Sequence
  SARS-CoV-2/Tianmen/HBCDC-HB-07/2020__EPI_ISL_412983 spike protein (1-1211)(I712C_T1077C) LumSynth construct
MFVFLVLLPLVSSQCVNLTTRTQLPPAYTNSFTRGVYYPDKVFRSSVLHSTQDLFLPFFSNVTWFHAIHVSGTNGTKRFDNPVLPFNDGVYFASTEKSNIIRGWIFGTTLDSKTQSLLIVNNATNVVIKVCEFQFCNDPFLGVYYHKNNKSWMESEFRVYSSANNCTFEYVSQPFLMDLEGKQGNFKNLREFVFKNIDGYFKIYSKHTPINLVRDLPQGFSALEPLVDLPIGINITRFQTLLALHRSYLTPGDSSSGWTAGAAAYYVGYLQPRTFLLKYNENGTITDAVDCALDPLSETKCTLKSFTVEKGIYQTSNFRVQPTESIVRFPNITNLCPFGEVFNATRFASVYAWNRKRISNCVADYSVLYNSASFSTFKCYGVSPTKLNDLCFTNVYADSFVIRGDEVRQIAPGQTGKIADYNYKLPDDFTGCVIAWNSNNLDSKVGGNYNYLYRLFRKSNLKPFERDISTEIYQAGSTPCNGVEGFNCYFPLQSYGFQPTNGVGYQPYRVVVLSFELLHAPATVCGPKKSTNLVKNKCVNFNFNGLTGTGVLTESNKKFLPFQQFGRDIADTTDAVRDPQTLEILDITPCSFGGVSVITPGTNTSNQVAVLYQDLNCTEVPVAIHADQLTPTWRVYSTGSNVFQTRAGCLIGAEHVNNSYECDIPIGAGICASYQTQTNSPRRARSVASQSIIAYTMSLGAENSVAYSNNSCAIPTNFTISVTTEILPVSMTKTSVDCTMYICGDSTECSNLLLQYGSFCTQLNRALTGIAVEQDKNTQEVFAQVKQIYKTPPIKDFGGFNFSQILPDPSKPSKRSFIEDLLFNKVTLADAGFIKQYGDCLGDIAARDLICAQKFNGLTVLPPLLTDEMIAQYTSALLAGTITSGWTFGAGAALQIPFAMQMAYRFNGIGVTQNVLYENQKLIANQFNSAIGKIQDSLSSTASALGKLQDVVNQNAQALNTLVKQLSSNFGAISSVLNDILSRLDKVEAEVQIDRLITGRLQSLQTYVTQQLIRAAEIRASANLAATKMSECVLGQSKRVDFCGKGYHLMSFPQSAPHGVVFLHVTYVPAQEKNFTCAPAICHDGKAHFPREGVFVSNGTHWFVTQRNFYEPQIITTDNTFVSGNCDVVIGIVNNTVYDPLQPELDSFKEELDKYFKNHTSPDVDLGDISGINASVVNIQKEIDRLNEVAKNLNESLIDLQELGKYEQYIKGGGSGGGQIYEGKLTAEGLRFGIVASRFNHALVDRLVEGAIDAIVRHGGREEDITLVRVPGSWEIPVAAGELARKEDIDAVIAIGVLIRGATPHFDYIASEVSKGLADLSLELRKPITFGVITADTLEQAIERAGTKHGNKGWEAALSAIEMANLFKSLR

SEQ ID NO: 3974 - protein, 1371 aa, Artificial Sequence
  SARS-CoV-2/Hong Kong/case42_VM20002493/2020__EPI_ISL_414527 spike protein (1-1211)(I712C_T1077C) LumSynth construct
MFVFLVLLPLVSSQCVNLTTRTQLPPAYTNSFTRGVYYPDKVFRSSVLHSTQDLFLPFFSNVTWFHAIHVSGTNGTKRFDNPVLPFNDGVYFASTEKSNIIRGWIFGTTLDSKTQSLLIVNNATNVVIKVCEFQFCNDPFLGVYYHKNNKSWMESEFRVYSSANNCTFEYVSQPFLMDLEGKQGNFKNLREFVFKNIDGYFKIYSKHTPINLVRDLPQGFSALEPLVDLPIGINITRFQTLLALHRSYLTPGDSSSGWTAGAAAYYVGYLQPRTFLLKYNENGTITDAVDCALDPLSETKCTLKSFTVEKGIYQTSNFRVQPTESIVRFPNITNLCPFGEVFNATRFASVYAWNRKRISNCVADYSVLYNSASFSTFKCYGVSPTKLNDLCFTNVYADSFVIRGDEVRQIAPGQTGKIADYNYKLPDDFTGCVIAWNSNNLDSKVGGNYNYLYRLFRKSNLKPFERDISTEIYQAGSTPCNGVEGFNCYFPLQSYGFQPTNGVGYQPYRVVVLSFELLHAPATVCGPKKSTNLVKNKCVNFNFNGLTGTGVLTESNKKFLPFQQFGRDIADTTDAVRDPQTLEILDITPCSFGGVSVITPGTNTSNQVAVLYQDVNCTEVPVAIHADQLTPTWRVYSTGSNVFQTRAGCLIGAEHVNNSYECDIPIGAGICASYQTQTNSPRRARSVASQSIIAYTMSLGAENSVAYSNNSCAIPTNFAISVTTEILPVSMTKTSVDCTMYICGDSTECSNLLLQYGSFCTQLNRALTGIAVEQDKNTQEVFAQVKQIYKTPPIKDFGGFNFSQILPDPSKPSKRSFIEDLLFNKVTLADAGFIKQYGDCLGDIAARDLICAQKFNGLTVLPPLLTDEMIAQYTSALLAGTITSGWTFGAGAALQIPFAMQMAYRFNGIGVTQNVLYENQKLIANQFNSAIGKIQDSLSSTASALGKLQDVVNQNAQALNTLVKQLSSNFGAISSVLNDILSRLDKVEAEVQIDRLITGRLQSLQTYVTQQLIRAAEIRASANLAATKMSECVLGQSKRVDFCGKGYHLMSFPQSAPHGVVFLHVTYVPAQEKNFTCAPAICHDGKAHFPREGVFVSNGTHWFVTQRNFYEPQIITTDNTFVSGNCDVVIGIVNNTVYDPLQPELDSFKEELDKYFKNHTSPDVDLGDISGINASVVNIQKEIDRLNEVAKNLNESLIDLQELGKYEQYIKGGGSGGGQIYEGKLTAEGLRFGIVASRFNHALVDRLVEGAIDAIVRHGGREEDITLVRVPGSWEIPVAAGELARKEDIDAVIAIGVLIRGATPHFDYIASEVSKGLADLSLELRKPITFGVITADTLEQAIERAGTKHGNKGWEAALSAIEMANLFKSLR

SEQ ID NO: 3975 - protein, 1371 aa, Artificial Sequence
  SARS-CoV-2/USA/CruiseA-23/2020__EPI_ISL_414482 spike protein (1-1211)(I712C_T1077C) LumSynth construct
MFVFLVLLPLVSSQCVNLTTRTQLPPAYTNSFTRGVYYPDKVFRSSVLHSTQDLFLPFFSNVTWFHAIHVSGTNGTKRFDNPVLPFNDGVYFASTEKSNIIRGWIFGTTLDSKTQSLLIVNNATNVVIKVCEFQFCNDPFLGVYYHKNNKSWMESEFRVYSSANNCTFEYVSQPFLMDLEVKQGNFKNLREFVFKNIDGYFKIYSKHTPINLVRDLPQGFSALEPLVDLPIGINITRFQTLLALHRSYLTPGDSSSGWTAGAAAYYVGYLQPRTFLLKYNENGTITDAVDCALDPLSETKCTLKSFTVEKGIYQTSNFRVQPTESIVRFPNITNLCPFGEVFNATRFASVYAWNRKRISNCVADYSVLYNSASFSTFKCYGVSPTKLNDLCFTNVYADSFVIRGDEVRQIAPGQTGKIADYNYKLPDDFTGCVIAWNSNNLDSKVGGNYNYLYRLFRKSNLKPFERDISTEIYQAGSTPCNGVEGFNCYFPLQSYGFQPTNGVGYQPYRVVVLSFELLHAPATVCGPKKSTNLVKNKCVNFNFNGLTGTGVLTESNKKFLPFQQFGRDIADTTDAVRDPQTLEILDITPCSFGGVSVITPGTNTSNQVAVLYQDVNCTEVPVAIHADQLTPTWRVYSTGSNVFQTRAGCLIGAEHVNNSYECDIPIGAGICASYQTQTNSPRRARSVASQSIIAYTMSLGAENSVAYSNNSCAIPTNFTISVTTEILPVSMTKTSVDCTMYICGDSTECSNLLLQYGSFCTQLNRALTGIAVEQDKNTQEVFAQVKQIYKTPPIKDFGGFNFSQILPDPSKPSKRSFIEDLLFNKVTLADAGFIKQYGDCLGDIAARDLICAQKFNGLTVLPPLLTDEMIAQYTSALLAGTITSGWTFGAGAALQIPFAMQMAYRFNGIGVTQNVLYENQKLIANQFNSAIGKIQDSLSSTASALGKLQDVVNQNAQALNTLVKQLSSNFGAISSVLNDILSRLDKVEAEVQIDRLITGRLQSLQTYVTQQLIRAAEIRASANLAATKMSECVLGQSKRVDFCGKGYHLMSFPQSAPHGVVFLHVTYVPAQEKNFTCAPAICHDGKAHFPREGVFVSNGTHWFVTQRNFYEPQIITTDNTFVSGNCDVVIGIVNNTVYDPLQPELDSFKEELDKYFKNHTSPDVDLGDISGINASVVNIQKEIDRLNEVAKNLNESLIDLQELGKYEQYIKGGGSGGGQIYEGKLTAEGLRFGIVASRFNHALVDRLVEGAIDAIVRHGGREEDITLVRVPGSWEIPVAAGELARKEDIDAVIAIGVLIRGATPHFDYIASEVSKGLADLSLELRKPITFGVITADTLEQAIERAGTKHGNKGWEAALSAIEMANLFKSLR

SEQ ID NO: 3976 - protein, 1371 aa, Artificial Sequence
  SARS-CoV-2/Hong Kong/case85_VM20002868/2020__EPI_ISL_414519 spike protein (1-1211)(I712C_T1077C) LumSynth construct
MFVFLVLVPLVSSQCVNLTTRTQLPPAYTNSFTRGVYYPDKVFRSSVLHSTQDLFLPFFSNVTWFHAIHVSGTNGTKRFDNPVLPFNDGVYFASTEKSNIIRGWIFGTTLDSKTQSLLIVNNATNVVIKVCEFQFCNDPFLGVYYHKNNKSWMESEFRVYSSANNCTFEYVSQPFLMDLEGKQGNFKNLREFVFKNIDGYFKIYSKHTPINLVRDLPQGFSALEPLVDLPIGINITRFQTLLALHRSYLTPGDSSSGWTAGAAAYYVGYLQPRTFLLKYNENGTITDAVDCALDPLSETKCTLKSFTVEKGIYQTSNFRVQPTESIVRFPNITNLCPFGEVFNATRFASVYAWNRKRISNCVADYSVLYNSASFSTFKCYGVSPTKLNDLCFTNVYADSFVIRGDEVRQIAPGQTGKIADYNYKLPDDFTGCVIAWNSNNLDSKVGGNYNYLYRLFRKSNLKPFERDISTEIYQAGSTPCNGVEGFNCYFPLQSYGFQPTNGVGYQPYRVVVLSFELLHAPATVCGPKKSTNLVKNKCVNFNFNGLTGTGVLTESNKKFLPFQQFGRDIADTTDAVRDPQTLEILDITPCSFGGVSVITPGTNTSNQVAVLYQDVNCTEVPVAIHADQLTPTWRVYSTGSNVFQTRAGCLIGAEHVNNSYECDIPIGAGICASYQTQTNSPRRARSVASQSIIAYTMSLGAENSVAYSNNSCAIPTNFTISVTTEILPVSMTKTSVDCTMYICGDSTECSNLLLQYGSFCTQLNRALTGIAVEQDKNTQEVFAQVKQIYKTPPIKDFGGFNFSQILPDPSKPSKRSFIEDLLFNKVTLADAGFIKQYGDCLGDIAARDLICAQKFNGLTVLPPLLTDEMIAQYTSALLAGTITSGWTFGAGAALQIPFAMQMAYRFNGIGVTQNVLYENQKLIANQFNSAIGKIQDSLSSTASALGKLQDVVNQNAQALNTLVKQLSSNFGAISSVLNDILSRLDKVEAEVQIDRLITGRLQSLQTYVTQQLIRAAEIRASANLAATKMSECVLGQSKRVDFCGKGYHLMSFPQSAPHGVVFLHVTYVPAQEKNFTCAPAICHDGKAHFPREGVFVSNGTHWFVTQRNFYEPQIITTDNTFVSGNCDVVIGIVNNTVYDPLQPELDSFKEELDKYFKNHTSPDVDLGDISGINASVVNIQKEIDRLNEVAKNLNESLIDLQELGKYEQYIKGGGSGGGQIYEGKLTAEGLRFGIVASRFNHALVDRLVEGAIDAIVRHGGREEDITLVRVPGSWEIPVAAGELARKEDIDAVIAIGVLIRGATPHFDYIASEVSKGLADLSLELRKPITFGVITADTLEQAIERAGTKHGNKGWEAALSAIEMANLFKSLR

SEQ ID NO: 3977 - protein, 1371 aa, Artificial Sequence; identical to SEQ ID NO: 3967
  SARS-CoV-2/England/200990660/2020__EPI_ISL_414523 spike protein (1-1211)(I712C_T1077C) LumSynth construct

SEQ ID NO: 3978 - protein, 1371 aa, Artificial Sequence
  SARS-CoV-2/Australia/NSW09/2020__EPI_ISL_413595 spike protein (1-1211)(I712C_T1077C) LumSynth construct
MFVFLVLLPLVSSQCVNLTTRTQLPPAYTNSFTRGVYYPDKVFRSSVLHSTQDLFLPFFSNVTWFHAIHVSGTNGTKRFDNPVLPFNDGVYFASTEKSNIIRGWIFGTTLDSKTQSLLIVNNATNVVIKVCEFQFCNDPFLGVYYHKNNKSWMESEFRVYSSANNCTFEYVSQPFLMDLEGKQGNFKNLREFVFKNIDGYFKIYSKHTPINLVRDLPQGFSALEPLVDLPIGINITRFQTLLALHRSYLTPGDSSSGWTAGAAAYYVGYLQPRTFLLKYNENGTITDAVDCALDPLSETKCTLKSFTVEKGIYQTSNFRVQPTESIVRFPNITNLCPFGEVFNATRFASVYAWNRKRISNCVADYSVLYNSASFSTFKCYGVSPTKLNDLCFTNVYADSFVIRGDEVRQIAPGQTGKIADYNYKLPDDFTGCVIAWNSNNLDSKVGGNYNYLYRLFRKSNLKPFERDISTEIYQAGSTPCNGVEGFNCYFPLQSYGFQPTNGVGYQPYRVVVLSFELLHAPATVCGPKKSTNLVKNKCVNFNFNGLTGTGVLTESNKKFLPFQQFGRDIADTTDAVRDPQTLEILDITPCSFGGVSVITPGTNTSNQVAVLYQDVNCTEVPVAIHADQLTPTWRVYSTGSNVFQTRAGCLIGAEHVNNSYECDIPIGAGICASYQTQTNSPRRARSVASQSIIAYTMSLGAENSVAYSNNSCAIPTNFTISVTTEILPVSMTKTSVDCTMYICGDSTECSNLLLQYGSFCTQLNRALTGIAVEQDKNTQEVFAQVKQIYKTPPIKDFGGFNFSQILPDPSKPSKRSFIEDLLFNKVTLADAGFIKQYGDCLGDIAARDLICAQKFNGLTVLPPLLTDEMIAQYTSALLAGTITSGWTFGAGAALQIPFAMQMAYRFNGIGVTQNVLYENQKLIANQFNSAIGKIQDSLSFTASALGKLQDVVNQNAQALNTLVKQLSSNFGAISSVLNDILSRLDKVEAEVQIDRLITGRLQSLQTYVTQQLIRAAEIRASANLAATKMSECVLGQSKRVDFCGKGYHLMSFPQSAPHGVVFLHVTYVPAQEKNFTCAPAICHDGKAHFPREGVFVSNGTHWFVTQRNFYEPQIITTDNTFVSGNCDVVIGIVNNTVYDPLQPELDSFKEELDKYFKNHTSPDVDLGDISGINASVVNIQKEIDRLNEVAKNLNESLIDLQELGKYEQYIKGGGSGGGQIYEGKLTAEGLRFGIVASRFNHALVDRLVEGAIDAIVRHGGREEDITLVRVPGSWEIPVAAGELARKEDIDAVIAIGVLIRGATPHFDYIASEVSKGLADLSLELRKPITFGVITADTLEQAIERAGTKHGNKGWEAALSAIEMANLFKSLR

SEQ ID NO: 3979 - protein, 1371 aa, Artificial Sequence; identical to SEQ ID NO: 3959
  SARS-CoV-2/Australia/NSW10/2020__EPI_ISL_413596 spike protein (1-1211)(I712C_T1077C) LumSynth construct

SEQ ID NO: 3980 - protein, 1371 aa, Artificial Sequence
  SARS-CoV-2/Switzerland/1000477797/2020__EPI_ISL_413023 spike protein (1-1211)(I712C_T1077C) LumSynth construct
MFVFLVLLPLVSSQCVNLTTRTQLPPAYTNSFTRGVYYPDKVFRSSVLHSTQDLFLPFFSNVTWFHAIHVSGTNGTKRFDNPVLPFNDGVYFASTEKSNIIRGWIFGTTLDSKTQSLLIVNNATNVVIKVCEFQFCNDPFLGVYYHKNNKSWMESEFRVYSSANNCTFEYVSQPFLMDLEGKQGNFKNLREFVFKNIDGYFNIYSKHTPINLVRDLPQGFSALEPLVDLPIGINITRFQTLLALHRSYLTPGDSSSGWTAGAAAYYVGYLQPRTFLLKYNENGTITDAVDCALDPLSETKCTLKSFTVEKGIYQTSNFRVQPTESIVRFPNITNLCPFGEVFNATRFASVYAWNRKRISNCVADYSVLYNSASFSTFKCYGVSPTKLNDLCFTNVYADSFVIRGDEVRQIAPGQTGKIADYNYKLPDDFTGCVIAWNSNNLDSKVGGNYNYLYRLFRKSNLKPFERDISTEIYQAGSTPCNGVEGFNCYFPLQSYGFQPTNGVGYQPYRVVVLSFELLHAPATVCGPKKSTNLVKNKCVNFNFNGLTGTGVLTESNKKFLPFQQFGRDIADTTDAVRDPQTLEILDITPCSFGGVSVITPGTNTSNQVAVLYQGVNCTEVPVAIHADQLTPTWRVYSTGSNVFQTRAGCLIGAEHVNNSYECDIPIGAGICASYQTQTNSPRRARSVASQSIIAYTMSLGAENSVAYSNNSCAIPTNFTISVTTEILPVSMTKTSVDCTMYICGDSTECSNLLLQYGSFCTQLNRALTGIAVEQDKNTQEVFAQVKQIYKTPPIKDFGGFNFSQILPDPSKPSKRSFIEDLLFNKVTLADAGFIKQYGDCLGDIAARDLICAQKFNGLTVLPPLLTDEMIAQYTSALLAGTITSGWTFGAGAALQIPFAMQMAYRFNGIGVTQNVLYENQKLIANQFNSAIGKIQDSLSSTASALGKLQDVVNQNAQALNTLVKQLSSNFGAISSVLNDILSRLDKVEAEVQIDRLITGRLQSLQTYVTQQLIRAAEIRASANLAATKMSECVLGQSKRVDFCGKGYHLMSFPQSAPHGVVFLHVTYVPAQEKNFTCAPAICHDGKAHFPREGVFVSNGTHWFVTQRNFYEPQIITTDNTFVSGNCDVVIGIVNNTVYDPLQPELDSFKEELDKYFKNHTSPDVDLGDISGINASVVNIQKEIDRLNEVAKNLNESLIDLQELGKYEQYIKGGGSGGGQIYEGKLTAEGLRFGIVASRFNHALVDRLVEGAIDAIVRHGGREEDITLVRVPGSWEIPVAAGELARKEDIDAVIAIGVLIRGATPHFDYIASEVSKGLADLSLELRKPITFGVITADTLEQAIERAGTKHGNKGWEAALSAIEMANLFKSLR

SEQ ID NO: 3981 - protein, 1371 aa, Artificial Sequence
  SARS-CoV-2/Belgium/BA-02291/2020__EPI_ISL_415159 spike protein (1-1211)(I712C_T1077C) LumSynth construct
MFVFLVLLPLVSSQCVNLTTRTQLPPAYTNSFTRGVYYPDKVFRSSVLHSTQDLFLPFFSNVTWFHAIHVSGTNGTKRFDNPVLPFNDGVYFASTEKSNIIRGWIFGTTLDSKTQSLLIVNNATNVVIKVCEFQFCNDPFLGVYYHKNNKSWMESEFRVYSSANNCTFEYVSQPFLMDLEGKQGNFKNLREFVFKNIDGYFKIYSKHTPINLVRDLPQGFSALEPLVDLPIGINITRFQTLLALHRSYLTPGDSSSGWTAGAAAYYVGYLQPRTFLLKYNENGTITDAVDCALDPLSETKCTLKSFTVEKGIYQTSNFRVQPTESIVRFPNITNLCPFGEVFNATRFASVYAWNRKRISNCVADYSVLYNSASFSTFKCYGVSPTKLNDLCFTNVYADSFVIRGDEVRQIAPGQTGKIADYNYKLPDDFTGCVIAWNSNNLDSKVGGNYNYLYRLFRRSNLKPFERDISTEIYQAGSTPCNGVEGFNCYFPLQSYGFQPTNGVGYQPYRVVVLSFELLPAPATVCGPKKSTNLVKNKCVNFNFNGLTGTGVLTESNKKFLPFQQFGRDIADTTDAVRDPQTLEILDITPCSFGGVSVITPGTNTSNQVAVLYQGVNCTEVPVAIHADQLTPTWRVYSTGSNVFQTRAGCLIGAEHVNNSYECDIPIGAGICASYQTQTNSPRRARSVASQSIIAYTMSLGAENSVAYSNNSCAIPTNFTISVTTEILPVSMTKTSVDCTMYICGDSTECSNLLLQYGSFCTQLNRALTGIAVEQDKNTQEVFAQVKQIYKTPPIKDFGGFNFSQILPDPSKPSKRSFIEDLLFNKVTLADAGFIKQYGDCLGDIAARDLICAQKFNGLTVLPPLLTDEMIAQYTSALLAGTITSGWTFGAGAALQIPFAMQMAYRFNGIGVTQNVLYENQKLIANQFNSAIGKIQDSLSSAAPALGKLQDVVNQNAQALNTLVKQLSSNFGAISSVLNDILSRLDKVEAEVQIDRLITGRLQSLQTYVTQQLIRAAEIRASANLAATKMSECVLGQSKRVDFCGKGYHLMSFPQSAPHGVVFLHVTYVPAQEKNFTCAPAICHDGKAHFPREGVFVSNGTHWFVTQRNFYEPQIITTDNTFVSGNCDVVIGIVNNTVYDPLQPELDSFKEELDKYFKNHTSPDVDLGDISGINASVVNIQKEIDRLNEVAKNLNESLIDLQELGKYEQYIKGGGSGGGQIYEGKLTAEGLRFGIVASRFNHALVDRLVEGAIDAIVRHGGREEDITLVRVPGSWEIPVAAGELARKEDIDAVIAIGVLIRGATPHFDYIASEVSKGLADLSLELRKPITFGVITADTLEQAIERAGTKHGNKGWEAALSAIEMANLFKSLR

SEQ ID NO: 3982 - protein, 1371 aa, Artificial Sequence
  SARS-CoV-2/USA/WA8-UW5/2020__EPI_ISL_413486 spike protein (1-1211)(I712C_T1077C) LumSynth construct
MFVFLVLLPLVSSQCVNLTTRTQLPPAYTNSFTRGVYYPDKVFRSSVLHSTQDLFLPFFSNVTWFHAIHVSGTNGTKRFDNPVLPFNDGVYFASTEKSNIIRGWIFGTTLDSKTQSLLIVNNATNVVIKVCEFQFCNDPFLGVYYHKNNKSWMESEFRVYSSANNCTFEYVSQPFLMDLEGKQGNFKNLREFVFKNIDGYFKIYSKHTPINLVRDLPQGFSALEPLVDLPIGINITRFQTLLALHRSYLTPGDSSSGWTAGAAAYYVGYLQPRTFLLKYNENGTITDAVDCALDPLSETKCTLKSFTVEKGIYQTSNFRVQPTESIVRFPNITNLCPFGEVFNATRFASVYAWNRKRISNCVADYSVLYNSASFSTFKCYGVSPTKLNDLCFTNVYADSFVIRGDEVRQIAPGQTGKIADYNYKLPDDFTGCVIAWNSNNLDSKVGGNYNYLYRLFRKSNLKPFERDISTEIYQAGSTPCNGVEGFNCYFPLQSYGFQPTNGVGYQPYRVVVLSFELLHAPATVCGPKKSTNLVKNKCVNFNFNGLTGTGVLTESNKKFLPFQQFGRDIADTTDAVRDPQTLEILDITPCSFGGVSVITPGTNTSNQVAVLYQDVNCTEVPVAIHADQLTPTWRVYSTGSNVFQTRAGCLIGAEYVNNSYECDIPIGAGICASYQTQTNSPRRARSVASQSIIAYTMSLGAENSVAYSNNSCAIPTNFTISVTTEILPVSMTKTSVDCTMYICGDSTECSNLLLQYGSFCTQLNRALTGIAVEQDKNTQEVFAQVKQIYKTPPIKDFGGFNFSQILPDPSKPSKRSFIEDLLFNKVTLADAGFIKQYGDCLGDIAARDLICAQKFNGLTVLPPLLTDEMIAQYTSALLAGTITSGWTFGAGAALQIPFAMQMAYRFNGIGVTQNVLYENQKLIANQFNSAIGKIQDSLSSTASALGKLQDVVNQNAQALNTLVKQLSSNFGAISSVLNDILSRLDKVEAEVQIDRLITGRLQSLQTYVTQQLIRAAEIRASANLAATKMSECVLGQSKRVDFCGKGYHLMSFPQSAPHGVVFLHVTYVPAQEKNFTCAPAICHDGKAHFPREGVFVSNGTHWFVTQRNFYEPQIITTDNTFVSGNCDVVIGIVNNTVYDPLQPELDSFKEELDKYFKNHTSPDVDLGDISGINASVVNIQKEIDRLNEVAKNLNESLIDLQELGKYEQYIKGGGSGGGQIYEGKLTAEGLRFGIVASRFNHALVDRLVEGAIDAIVRHGGREEDITLVRVPGSWEIPVAAGELARKEDIDAVIAIGVLIRGATPHFDYIASEVSKGLADLSLELRKPITFGVITADTLEQAIERAGTKHGNKGWEAALSAIEMANLFKSLR

SEQ ID NO: 3983 - protein, 1371 aa, Artificial Sequence
  SARS-CoV-2/England/20102000506/2020__EPI_ISL_415147 spike protein (1-1211)(I712C_T1077C) LumSynth construct
MFVFLVLLPLVSSQCVNLTTRTQLPPAYTNSFTRGVYYPDKVFRSSVLHSTQDLFLPFFSNVTWFHAIHVSGTNGTKRFDNPVLPFNDGVYFASTEKSNIIRGWIFGTTLDSKTQSLLIVNNATNVVIKVCEFQFCNDPFLGVYYHKNNKSWMESEFRVYSSANNCTFEYVSQPFLMDLEGKQGNFKNLREFVFKNIDGYFKIYSKHTPINLVRDLPQGFSALEPLVDLPIGINITRFQTLLALHRSYLTPGDSSSGWTAGAAAYYVGYLQPRTFLLKYNENGTITDAVDCALDPLSETKCTLKSFTVEKGIYQTSNFRVQPTESIVRFPNITNLCPFGEVFNATRFASVYAWNRKRISNCVADYSVLYNSASFSTFKCYGVSPTKLNDLCFTNVYADSFVIRGDEVRQIAPGQTGKIADYNYKLPDDFTGCVIAWNSNNLDSKVGGNYNYLYRLFRKSNLKPFERDISTEIYQAGSTPCNGVEGFNCYFPLQSYGFQPTNGVGYQPYRVVVLSFELLHAPATVCGPKKSTNLVKNKCVNFNFNGLTGTGVLTESNKKFLPFQQFGRDIADTTDAVRDPQTLEILDITPCSFGGVSVITPGTNTSNQVAVLYQGVNCTEVPVAIHADQLTPTWRVYSTGSNVFQTRAGCLIGAEHVNNSYECDIPIGAGICASYQTQTNSPRRARSVASQSIIAYTMSLGAENSVAYSNNSCAIPTNFTISVTTEILPVSMTKTSVDCTMYICGDSTECSNLLLQYGSFCTQLNRALTGIAVEQDKNTQEVFAQVKQIYKTPPIKDFGGFNFSQILPDPSKPSKRSFIEDLLFNKVTLADAGFIKQYGYCLGDIAARDLICAQKFNGLTVLPPLLTDEMIAQYTSALLAGTITSGWTFGAGAALQIPFAMQMAYRFNGIGVTQNVLYENQKLIANQFNSAIGKIQDSLSSTASALGKLQDVVNQNAQALNTLVKQLSSNFGAISSVLNDILSRLDKVEAEVQIDRLITGRLQSLQTYVTQQLIRAAEIRASANLAATKMSECVLGQSKRVDFCGKGYHLMSFPQSAPHGVVFLHVTYVPAQEKNFTCAPAICHDGKAHFPREGVFVSNGTHWFVTQRNFYEPQIITTDNTFVSGNCDVVIGIVNNTVYDPLQPELDSFKEELDKYFKNHTSPDVDLGDISGINASVVNIQKEIDRLNEVAKNLNESLIDLQELGKYEQYIKGGGSGGGQIYEGKLTAEGLRFGIVASRFNHALVDRLVEGAIDAIVRHGGREEDITLVRVPGSWEIPVAAGELARKEDIDAVIAIGVLIRGATPHFDYIASEVSKGLADLSLELRKPITFGVITADTLEQAIERAGTKHGNKGWEAALSAIEMANLFKSLR

SEQ ID NO: 3984 - protein, 1371 aa, Artificial Sequence
  SARS-CoV-2/Belgium/VAG-03013/2020__EPI_ISL_415155 spike protein (1-1211)(I712C_T1077C) LumSynth construct
MFVFLVLLPLVSSQCVNLTTRTQLPPAYTNSFTRGVYYPDKVFRSSVLHSTQDLFLPFFSNVTWFHAIHVSGTNGTKRFDNPVLPFNDGVYFASTEKSNIIRGWIFGTTLDSKTQSLLIVNNATNVVIKVCEFQFCNDPFLGVYYHKNNKSWMESEFRVYSSANNCTFEYVSQPFLMDLEGKQGNFKNLREFVFKNIDGYFKIYSKHTPINLVRDLPQGFSALEPLVDLPIGINITRFQTLLALHRSYLTPGDSSSGWTAGAAAYYVGYLQPRTFLLKYNENGTITDAVDCALDPLSETKCTLKSFTVEKGIYQTSNFRVQPTESIVRFPNITNLCPFGEVFNATRFASVYAWNRKRISNCVADYSVLYNSASFSTFKCYGVSPTKLNDLCFTNVYADSFVIRGDEVRQIAPGQTGKIADYNYKLPDDFTGCVIAWNSNNLDSKVGGNYNYLYRLFRKSNLKPFERDISTEIYQAGSTPCNGVEGFNCYFPLQSYGFQPTNGVGYQPYRVVVLSFELLHAPATVCGPKKSTNLVKNKCVNFNFNGLTGTGVLTESNKKFLPFQQFGRDIADTTDAVRDPQTLEILDITPCSFGGVSVITPGTNTSNQVAVLYQGVNCTEVPVAIHADQLTPTWRVYSTGSNVFQTRAGCLIGAEHVNNSYECDIPIGAGICASYQTQTNSPRRARSVASQSIIAYTMSLGAENSVAYSNNSCAIPTNFTISVTTEILPVSMTKTSVDCTMYICGDSTECSNLLLQYGSFCTQLNRALTGIAVEQDKNTQEVFAQVKQIYKTPPIKDFGGFNFSQILPDPSKPSKRSFIEDLLFNKVTLADAGFIKQYGDCLGDIAARDLICAQKFNGLTVLPPLLTDEMIAQYTSALLAGTITSGWTFGAGAALQIPFAMQMAYRFNGIGVTQNVLYENQKLIANQFNSAIGKIQDSLSSTATALGKLQDVVNQNAQALNTLVKQLSSNFGAISSVLNDILSRLDKVEAEVQIDRLITGRLQSLQTYVTQQLIRAAEIRASANLAATKMSECVLGQSKRVDFCGKGYHLMSFPQSAPHGVVFLHVTYVPAQEKNFTCAPAICHDGKAHFPREGVFVSNGTHWFVTQRNFYEPQIITTDNTFVSGNCDVVIGIVNNTVYDPLQPELDSFKEELDKYFKNHTSPDVDLGDISGINASVVNIQKEIDRLNEVAKNLNESLIDLQELGKYEQYIKGGGSGGGQIYEGKLTAEGLRFGIVASRFNHALVDRLVEGAIDAIVRHGGREEDITLVRVPGSWEIPVAAGELARKEDIDAVIAIGVLIRGATPHFDYIASEVSKGLADLSLELRKPITFGVITADTLEQAIERAGTKHGNKGWEAALSAIEMANLFKSLR

SEQ ID NO: 3985 - protein, 1371 aa, Artificial Sequence
  SARS-CoV-2/Belgium/BC-03016/2020__EPI_ISL_415157 spike protein (1-1211)(I712C_T1077C) LumSynth construct
MFVFLVLLPLVSSQCVNLTTRTQLPPAYTNSFTRGVYYPDKVFRSSVLHSTQDLFLPFFSNVTWFHAIHVSGTNGTKRFDNPVLPFNDGVYFASTEKSNIIRGWIFGTTLDSKTQSLLIVNNATNVVIKVCEFQFCNDPFLGVYYHKNNKSWMESEFRVYSSANNCTFEYVSQPFLMDLEGKQGNFKNLREFVFKNIDGYFKIYSKHTPINLVRDLPQGFSALEPLVDLPIGINITRFQTLLALHRSYLTPGDSSSGWTAGAAAYYVGYLQPRTFLLKYNENGTITDAVDCALDPLSETKCTLKSFTVEKGIYQTSNFRVQPTESIVRFPNITNLCPFGEVFNATRFASVYAWNRKRISNCVADYSVLYNSASFSTFKCYGVSPTKLNDLCFTNVYADSFVIRGDEVRQIAPGQTGKIADYNYKLPDDFTGCVIAWNSNNLDSKVGGNYNYLYRLFRKSNLKPFERDISTEIYQAGSTPCNGVEGFNCYFPLQSYGFQPTNGVGYQPYRVVVLSFELLHAPATVCGPKKSTNLVKNKCVNFNFNGLTGTGVLTESNKKFLPFQQFGRDIADTTDAVRDPQTLEILDITPCSFGGVSVITPGTNTSNQVAVLYQGVNCTEVPVAIHADQLTPTWRVYSTGSNVFQTRAGCLIGAEHVNNSYECDIPIGAGICASYQTQTNSPRRARSVASQSIIAYTMSLGAENSVAYSNNSCAIPTNFTISVTTEILPVSMTKTSVDCTMYICGDSTECSNLLLQYGSFCTQLNRALTGIAVEQDKNTQEVFAQVKQIYKTPPIKDFGGFNFSQILPDPSKPSKRSFIEDLLFNKVTLADAGFIKQYGDCLGDIAARDLICAQKFNGLTVLPPLLTDEMIAQYTSALLAGTITSGWTFGAGAALQIPFAMQMAYRFNGIGVTQNVLYENQKLIANQFNSAIGKIQDSLSSTAPALGKLQDVVNQNAQALNTLVKQLSSNFGAISSVLNDILSRLDKVEAEVQIDRLITGRLQSLQTYVTQQLIRAAEIRASANLAATKMSECVLGQSKRVDFCGKGYHLMSFPQSAPHGVVFLHVTYVPAQEKNFTCAPAICHDGKAHFPREGVFVSNGTHWFVTQRNFYEPQIITTDNTFVSGNCDVVIGIVNNTVYDPLQPELDSFKEELDKYFKNHTSPDVDLGDISGINASVVNIQKEIDRLNEVAKNLNESLIDLQELGKYEQYIKGGGSGGGQIYEGKLTAEGLRFGIVASRFNHALVDRLVEGAIDAIVRHGGREEDITLVRVPGSWEIPVAAGELARKEDIDAVIAIGVLIRGATPHFDYIASEVSKGLADLSLELRKPITFGVITADTLEQAIERAGTKHGNKGWEAALSAIEMANLFKSLR

SEQ ID NO: 3986 - protein, 1371 aa, Artificial Sequence
  SARS-CoV-2/Germany/BavPat3/2020__EPI_ISL_414521 spike protein (1-1211)(I712C_T1077C) LumSynth construct
MFVFLVLLPLVSSQCVNLTTRTQLPPAYTNSFTRGVYYPDKVFRSSVLHSTQDLFLPFFSNVTWFHAIHVSGTNGTKRFDNPVLPFNDGVYFASTEKSNIIRGWIFGTTLDSKTQSLLIVNNATNVVIKVCEFQFCNDPFLGVYYHKNNKSWMESEFRVYSSANNCTFEYVSQPFLMDLEGKQGNFKNLREFVFKNIDGYFKIYSKHTPINLVRDLPQGFSALEPLVDLPIGINITRFQTLLALHRSYLTPGDSSSGWTAGAAAYYVGYLQPRTFLLKYNENGTITDAVDCALDPLSETKCTLKSFTVEKGIYQTSNFRVQPTESIVRFPNITNLCPFGEVFNATRFASVYAWNRKRISNCVADYSVLYNSASFSTFKCYGVSPTKLNDLCFTNVYADSFVIRGDEVRQIAPGQTGKIADYNYKLPDDFTGCVIAWNSNNLDSKVGGNYNYLYRLFRKSNLKPFERDISTEIYQAGSTPCNGVEGFNCYFPLQSYGFQPTNGVGYQPYRVVVLSFELLHAPATVCGPKKSTNLVKNKCVNFNFNGLTGTGVLTESNKKFLPFQQFGRDIADTTDAVRDPQTLEILDITPCSFGGVSVITPGTNTSNQVAVLYQDVNCTEVPVAIHADQLTPTWRVYSTGSNVFQTRAGCLIGAEHVNNSYECDIPIGAGICASYQTQTNSPRRARSVASQSIIAYTMSLGAENSVAYSNNSCAIPTNFTISVTTEILPVSMTKTSVDCTMYICGDSTECSNLLLQYGSFCTQLNRALTGIAVEQDKNTQQVFAQVKQIYKTPPIKDFGGFNFSQILPDPSKPSKRSFIEDLLFNKVTLADAGFIKQYGDCLGDIAARDLICAQKFNGLTVLPPLLTDEMIAQYTSALLAGTITSGWTFGAGAALQIPFAMQMAYRFNGIGVTQNVLYENQKLIANQFNSAIGKIQDSLSSTASALGKLQDVVNQNAQALNTLVKQLSSNFGAISSVLNDILSRLDKVEAEVQIDRLITGRLQSLQTYVTQQLIRAAEIRASANLAATKMSECVLGQSKRVDFCGKGYHLMSFPQSAPHGVVFLHVTYVPAQEKNFTCAPAICHDGKAHFPREGVFVSNGTHWFVTQRNFYEPQIITTDNTFVSGNCDVVIGIVNNTVYDPLQPELDSFKEELDKYFKNHTSPDVDLGDISGINASVVNIQKEIDRLNEVAKNLNESLIDLQELGKYEQYIKGGGSGGGQIYEGKLTAEGLRFGIVASRFNHALVDRLVEGAIDAIVRHGGREEDITLVRVPGSWEIPVAAGELARKEDIDAVIAIGVLIRGATPHFDYIASEVSKGLADLSLELRKPITFGVITADTLEQAIERAGTKHGNKGWEAALSAIEMANLFKSLR

SEQ ID NO: 3987 - protein, 1371 aa, Artificial Sequence
  SARS-CoV-2/France/HF1805/2020__EPI_ISL_414628 spike protein (1-1211)(I712C_T1077C) LumSynth construct
MFVFLVLLPLVSSQCVNLTTRTQLPPAYTNSFTRGVYYPDKVFRSSVLHSTQDLFLPFFSNVTWFHAIHVSGTNGTKRFDNPVLPFNDGVYFASTEKSNIIRGWIFGTTLDSKTQSLLIVNNATNVVIKVCEFQFCNDPFLGVYYHKNNKSWMESEFRVYSSANNCTFEYVSQPFLMDLEGKQGNFKNLREFVFKNIDGYFKIYSKHTPINLVRDLPQGFSALEPLVDLPIGINITRFQTLLALHRSYLTPGDSSSGWTAGAAAYYVGYLQPRTFLLKYNENGTITDAVDCALDPLSETKCTLKSFTVEKGIYQTSNFRVQPTESIVRFPNITNLCPFGEVFNATRFASVYAWNRKRISNCVADYSVLYNSASFSTFKCYGVSPTKLNDLCFTNVYADSFVIRGDEVRQIAPGQTGKIADYNYKLPDDFTGCVIAWNSNNLDSKVGGNYNYLYRLFRKSNLKPFERDISTEIYQAGSTPCNGVEGFNCYFPLQSYGFQPTNGVGYQPYRVVVLSFELLHAPATVCGPKKSTNLVKNKCVNFNFNGLTGTGVLTESNKKFLPFQQFGRDIADTTDAVRDPQTLEILDITPCSFGGVSVITPGTNTSNQVAVLYQGVNCTEVPVAIHADQLTPTWRVYSTGSNVFQTRAGCLIGAEHVNNSYECDIPIGAGICASYQTQTNSPRRARSVASQSIIAYTMSLGAENSVAYSNNSCAIPTNFTISVTTEILPVSMTKTSVDCTMYICGDSTECSNLLLQYGSFCTQLNRALTGIAVEQDKNTQEVFAQVKQIYKTPPIKDFGGFNFSQILPDPSKPSKRSFIEDLLFNKVTLADAGFIKQYGDCLGDIAARDLICAQKFNGLTVLPPLLTDEMIAQYTSALLAGTITSGWTFGAGAALQIPFAMQMAYRFNGIGVTQNVLYENQKLIANQFNSAIGKIQDSLSSTASALGKLQDVVNQNAQALNTLVKQLSSNFGAISSVLNDILSRLDKVEAEVQIDRLITGRLQSLQTYVTQQLIRAAEIRASANLAATKMSECVLGQSKRVDFCGKGYHLMSFPQSAPHGVVFLHVTYVPAQEKNFTCAPAICHDGKAHFPREGVFVSNGTHWFVTQRNFYEPQIITTDNTFVSGNCDVVIGVVNNTVYDPLQPELDSFKEELDKYFKNHTSPDVDLGDISGINASVVNIQKEIDRLNEVAKNLNESLIDLQELGKYEQYIKGGGSGGGQIYEGKLTAEGLRFGIVASRFNHALVDRLVEGAIDAIVRHGGREEDITLVRVPGSWEIPVAAGELARKEDIDAVIAIGVLIRGATPHFDYIASEVSKGLADLSLELRKPITFGVITADTLEQAIERAGTKHGNKGWEAALSAIEMANLFKSLR

SEQ ID NO: 3988 - protein, 1371 aa, Artificial Sequence
  SARS-CoV-2/Netherlands/ZuidHolland_9/2020__EPI_ISL_414445 spike protein (1-1211)(I712C_T1077C) LumSynth construct
MFVFLVLLPLVSSQCVNLTTRTQLPPAYTNSFTRGVYYPDKVFRSSVLHSTQDLFLPFFSNVTWFHAIHVSGTNGTKRFDNPVLPFNDGVYFASTEKSNIIRGWIFGTTLDSKTQSLLIVNNATNVVIKVCEFQFCNDPFLGVYYHKNNKSWMESEFRVYSSANNCTFEYVSQPFLMDLEGKQGNFKNLREFVFKNIDGYFKIYSKHTPINLVRDLPQGFSALEPLVDLPIGINITRFQTLLALHRSYLTPGDSSSGWTAGAAAYYVGYLQPRTFLLKYNENGTITDAVDCALDPLSETKCTLKSFTVEKGIYQTSNFRVQPTESIVRFPNITNLCPFGEVFNATRFASVYAWNRKRISNCVADYSVLYNSASFSTFKCYGVSPTKLNDLCFTNVYADSFVIRGDEVRQIAPGQTGKIADYNYKLPDDFTGCVIAWNSNNLDSKVGGNYNYLYRLFRKSNLKPFERDISTEIYQAGSTPCNGVEGFNCYFPLQSYGFQPTNGVGYQPYRVVVLSFELLHAPATVCGPKKSTNLVKNKCVNFNFNGLTGTGVLTESNKKFLPFQQFGRDIADTTDAVRDPQTLEILDITPCSFGGVSVITPGTNTSNQVAVLYQGVNCTEVPVAIHADQLTPTWRVYSTGSNVFQTRAGCLIGAEHVNNSYECDIPIGAGICASYQTQTNSPRRARSVASQSIIAYTMSLGAENSVAYSNNSCAIPTNFTISVTTEILPVSMTKTSVDCTMYICGDSTECSNLLLQYGSFCTQLNRALTGIAVEQDKNTQEVFAQVKQIYKTPPIKDFGGFNFSQILPDPSKPSKRSFIEDLLFNKVTLADAGFIKQYGDCLGDIAARDLICVQKFNGLTVLPPLLTDEMIAQYTSALLAGTITSGWTFGAGAALQIPFAMQMAYRFNGIGVTQNVLYENQKLIANQFNSAIGKIQDSLSSTASALGKLQDVVNQNAQALNTLVKQLSSNFGAISSVLNDILSRLDKVEAEVQIDRLITGRLQSLQTYVTQQLIRAAEIRASANLAATKMSECVLGQSKRVDFCGKGYHLMSFPQSAPHGVVFLHVTYVPAQEKNFTCAPAICHDGKAHFPREGVFVSNGTHWFVTQRNFYEPQIITTDNTFVSGNCDVVIGIVNNTVYDPLQPELDSFKEELDKYFKNHTSPDVDLGDISGINASVVNIQKEIDRLNEVAKNLNESLIDLQELGKYEQYIKGGGSGGGQIYEGKLTAEGLRFGIVASRFNHALVDRLVEGAIDAIVRHGGREEDITLVRVPGSWEIPVAAGELARKEDIDAVIAIGVLIRGATPHFDYIASEVSKGLADLSLELRKPITFGVITADTLEQAIERAGTKHGNKGWEAALSAIEMANLFKSLR

SEQ ID NO: 3989 - protein, 1371 aa, Artificial Sequence
  SARS-CoV-2/Finland/FIN03032020A/2020__EPI_ISL_413602 spike protein (1-1211)(I712C_T1077C) LumSynth construct
MFVFLVLLPLVSSQCVNLTTRTQLPPAYTNSFTRGVYYPDKVFRSSVLHSTQDLFLPFFSNVTWFHAIHVSGTNGTKRFDNPVLPFNDGVYFASTEKSNIIRGWIFGTTLDSKTQSLLIVNNATNVVIKVCEFQFCNDPFLGVYYHKNNKSWMESEFRVYSSANNCTFEYVSQPFLMDLEGKQGNFKNLREFVFKNIDGYFKIYSKHTPINLVRDLPQGFSALEPLVDLPIGINITRFQTLLALHRSYLTPGDSSSGWTAGAAAYYVGYLQPRTFLLKYNENGTITDAVDCALDPLSETKCTLKSFTVEKGIYQTSNFRVQPTESIVRFPNITNLCPFGEVFNATRFASVYAWNRKRISNCVADYSVLYNSASFSTFKCYGVSPTKLNDLCFTNVYADSFVIRGDEVRQIAPGQTGKIADYNYKLPDDFTGCVISWNSNNLDSKVGGNYNYLYRLFRKSNLKPFERDISTEIYQAGSTPCNGVEGFNCYFPLQSYGFQPTNGVGYQPYRVVVLSFELLHAPATVCGPKKSTNLVKNKCVNFNFNGLTGTGVLTESNKKFLPFQQFGRDIADTTDAVRDPQTLEILDITPCSFGGVSVITPGTNTSNQVAVLYQGVNCTEVPVAIHADQLTPTWRVYSTGSNVFQTRAGCLIGAEHVNNSYECDIPIGAGICASYQTQTNSPRRARSVASQSIIAYTMSLGAENSVAYSNNSCAIPTNFTISVTTEILPVSMTKTSVDCTMYICGDSTECSNLLLQYGSFCTQLNRALTGIAVEQDKNTQEVFAQVKQIYKTPPIKDFGGFNFSQILPDPSKPSKRSFIEDLLFNKVTLADAGFIKQYGDCLGDIAARDLICAQKFNGLTVLPPLLTDEMIAQYTSALLAGTITSGWTFGAGAALQIPFAMQMAYRFNGIGVTQNVLYENQKLIANQFNSAIGKIQDSLSSTASALGKLQDVVNQNAQALNTLVKQLSSNFGAISSVLNDILSRLDKVEAEVQIDRLITGRLQSLQTYVTQQLIRAAEIRASANLAATKMSECVLGQSKRVDFCGKGYHLMSFPQSAPHGVVFLHVTYVPAQEKNFTCAPAICHDGKAHFPREGVFVSNGTHWFVTQRNFYEPQIITTDNTFVSGNCDVVIGIVNNTVYDPLQPELDSFKEELDKYFKNHTSPDVDLGDISGINASVVNIQKEIDRLNEVAKNLNESLIDLQELGKYEQYIKGGGSGGGQIYEGKLTAEGLRFGIVASRFNHALVDRLVEGAIDAIVRHGGREEDITLVRVPGSWEIPVAAGELARKEDIDAVIAIGVLIRGATPHFDYIASEVSKGLADLSLELRKPITFGVITADTLEQAIERAGTKHGNKGWEAALSAIEMANLFKSLR

SEQ ID NO: 3990 - protein, 1371 aa, Artificial Sequence
  SARS-CoV-2/France/GE1977/2020__EPI_ISL_414632 spike protein (1-1211)(I712C_T1077C) LumSynth construct
MFVFLVLLPLVSSQCVNLTTRTQLPPAYTNSFTRGVYYPDKVFRSSVLHSTQDLFLPFFSNVTWFHAIHVSGTNGTKRFDNPVLPFNDGVYFASTEKSNIIRGWIFGTTLDSKTQSLLIVNNATNVVIKVCEFQFCNDPFLGVYYHKNNKSWMESEFRVYSSANNCTFEYVSQPFLMDLEGKQGNFKNLREFVFKNIDGYFKIYSKHTPINLVRDLPQGFSALEPLVDLPIGINITRFQTLLALHRSYLTPGDSSSGWTAGAAAYYVGYLQPRTFLLKYNENGTITDAVDCALDPLSETKCTLKSFTVEKGIYQTSNFRVQPTESIVRFPNITNLCPFGEVFNATRFASVYAWNRKRISNCVADYSVLYNSASFSTFKCYGVSPTKLNDLCFTNVYADSFVIRGDEVRQIAPGQTGKIADYNYKLPDDFTGCVIAWNSNNLDSKVGGNYNYLYRLFRKSNLKPFERDISTEIYQAGSTPCNGVEGFNCYFPLQSYGFQPTNGVGYQPYRVVVLSFELLHAPATVCGPKKSTNLVKNKCVNFNFNGLTGTGVLTESNKKFLPFQQFGRDIADTTDAVRDPQTLEILDITPCSFGGVSVITPGTNTSNQVAVLYQGVNCTEVPVAIHADQLTPTWRVYSTGSNVFQTRAGCLIGAEHVNNSYECDIPIGAGICASYQTQTNSPRRARSVASQSIIAYTMSLGAENSVAYSNNSCAIPTNFTISVTTEILPVSMTKTSVDCTMYICGDSTECSNLLLQYGSFCTQLNRALTGIAVEQDKNTQEVFAQVKQIYKTPPIKDFGGFNFSQILPDPSKPSKRSFIEDLLFNKVTLADAGFIKQYGDCLGDIAARDLICAQKFNGLTVLPPLLTDEMIAQYTSALLAGTITSGWTFGAGAALQIPFAMQMAYRFNGIGVTQNVLYENQKLIANQFNSAIGKIQDSLFSTASALGKLQDVVNQNAQALNTLVKQLSSNFGAISSVLNDILSRLDKVEAEVQIDRLITGRLQSLQTYVTQQLIRAAEIRASANLAATKMSECVLGQSKRVDFCGKGYHLMSFPQSAPHGVVFLHVTYVPAQEKNFTCAPAICHDGKAHFPREGVFVSNGTHWFVTQRNFYEPQIITTDNTFVSGNCDVVIGIVNNTVYDPLQPELDSFKEELDKYFKNHTSPDVDLGDISGINASVVNIQKEIDRLNEVAKNLNESLIDLQELGKYEQYIKGGGSGGGQIYEGKLTAEGLRFGIVASRFNHALVDRLVEGAIDAIVRHGGREEDITLVRVPGSWEIPVAAGELARKEDIDAVIAIGVLIRGATPHFDYIASEVSKGLADLSLELRKPITFGVITADTLEQAIERAGTKHGNKGWEAALSAIEMANLFKSLR

SEQ ID NO: 3991 - protein, 1371 aa, Artificial Sequence
  SARS-CoV-2/Finland/FIN-313/2020__EPI_ISL_414641 spike protein (1-1211)(I712C_T1077C) LumSynth construct
MFVFLVLLPLVSSQCVNLTTRTQLPPAYTNSFTRGVYYPDKVFRSSVLHSTQDLFLPFFSNVTWFHAIHVSGTNGTKRFDNPVLPFNDGVYFASTEKSNIIRGWIFGTTLDSKTQSLLIVNNATNVVIKVCEFQFCNDPFLGVYYHKNNKSWMESEFRVYSSANNCTFEYVSQPFLMDLEGKQGNFKNLREFVFKNIDGYFKIYSKHTPINLVRDLPQGFSALEPLVDLPIGINITRFKTLLALHRSYLTPGDSSSGWTAGAAAYYVGYLQPRTFLLKYNENGTITDAVDCALDPLSETKCTLKSFTVEKGIYQTSNFRVQPTESIVRFPNITNLCPFGEVFNATRFASVYAWNRKRISNCVADYSVLYNSASFSTFKCYGVSPTKLNDLCFTNVYADSFVIRGDEVRQIAPGQTGKIADYNYKLPDDFTGCVIAWNSNNLDSKVGGNYNYLYRLFRKSNLKPFERDISTEIYQAGSTPCNGVEGFNCYFPLQSYGFQPTNGVGYQPYRVVVLSFELLHAPATVCGPKKSTNLVKNKCVNFNFNGLTGTGVLTESNKKFLPFQQFGRDIADTTDAVRDPQTLEILDITPCSFGGVSVITPGTNTSNQVAVLYQGVNCTEVPVAIHADQLTPTWRVYSTGSNVFQTRAGCLIGAEHVNNSYECDIPIGAGICASYQTQTNSPRRARSVASQSIIAYTMSLGAENSVAYSNNSCAIPTNFTISVTTEILPVSMTKTSVDCTMYICGDSTECSNLLLQYGSFCTQLNRALTGIAVEQDKNTQEVFAQVKQIYKTPPIKDFGGFNFSQILPDPSKPSKRSFIEDLLFNKVTLADAGFIKQYGDCLGDIAARDLICAQKFNGLTVLPPLLTDEMIAQYTSALLAGTITSGWTFGAGAALQIPFAMQMAYRFNGIGVTQNVLYENQKLIANQFNSAIGKIQDSLSSTASALGKLQDVVNQNAQALNTLVKQLSSNFGAISSVLNDILSRLDKVEAEVQIDRLITGRLQSLQTYVTQQLIRAAEIRASANLAATKMSECVLGQSKRVDFCGKGYHLMSFPQSAPHGVVFLHVTYVPAQEKNFTCAPAICHDGKAHFPREGVFVSNGTHWFVTQRNFYEPQIITTDNTFVSGNCDVVIGIVNNTVYDPLQPELDSFKEELDKYFKNHTSPDVDLGDISGINASVVNIQKEIDRLNEVAKNLNESLIDLQELGKYEQYIKGGGSGGGQIYEGKLTAEGLRFGIVASRFNHALVDRLVEGAIDAIVRHGGREEDITLVRVPGSWEIPVAAGELARKEDIDAVIAIGVLIRGATPHFDYIASEVSKGLADLSLELRKPITFGVITADTLEQAIERAGTKHGNKGWEAALSAIEMANLFKSLR

SEQ ID NO: 3992 - protein, 1371 aa, Artificial Sequence
  SARS-CoV-2/Netherlands/ZuidHolland_2/2020__EPI_ISL_414556 spike protein (1-1211)(I712C_T1077C) LumSynth construct
MFVFLVLLPLVSSQCVNLTTRTQLPPAYTNSFTRGVYYPDKVFRSSVLHSTQDLFLPFFSNVTWFHAIHVSGTNGTKRFDNPVLPFNDGVYFASTEKSNIIRGWIFGTTLDSKTQSLLIVNNATNVVIKVCEFQFCNDPFLGVYYHKNNKSWMESEFRVYSSANNCTFEYVSQPFLMDLEGKQGNFKNLREFVFKNIDGYFKIYSKHTPINLVRDLPQGFSALEPLVDLPIGINITRFQTLLALHRSYLTPGDSSSGWTAGAAAYYVGYLQPRTFLLKYNENGTITDAVDCALDPLSETKCTLKSFTVEKGIYQTSNFRVQPTESIVRFPNITNLCPFGEVFNATRFASVYAWNRKRISNCVADYSVLYNSASFSTFKCYGVSPTKLNDLCFTNVYADSFVIRGDEVRQIAPGQTGKIADYNYKLPDDFTGCVIAWNSNNLDSKVGGNYNYLYRLFRKSNLKPFERDISTEIYQAGSTPCNGVEGFNCYFPLQSYGFQPTNGVGYQPYRVVVLSFELLHAPATVCGPKKSTNLVKNKCVNFNFNGLTGTGVLTESNKKFLPFQQFGRDIADTTDAVRDPQTLEILDITPCSFGGVSVITPGTNTSNQVAVLYQGVNCTEVPVAIHADQLTPTWRVYSTGSNVFQTRAGCLIGAEHVNNSYECDIPIGAGICASYQTQTNSPRRARSVASQSIIAYTMSLGAENSVAYSNNSCAIPTNFTISVTTEILPVSMTKTSVDCTMYICGDSTECSNLLLQYGSFCTQLNRALTGIALEQDKNTQEVFAQVKQIYKTPPIKDFGGFNFSQILPDPSKPSKRSFIEDLLFNKVTLADAGFIKQYGDCLGDIAARDLICAQKFNGLTVLPPLLTDEMIAQYTSALLAGTITSGWTFGAGAALQIPFAMQMAYRFNGIGVTQNVLYENQKLIANQFNSAIGKIQDSLSSTASALGKLQDVVNQNAQALNTLVKQLSSNFGAISSVLNDILSRLDKVEAEVQIDRLITGRLQSLQTYVTQQLIRAAEIRASANLAATKMSECVLGQSKRVDFCGKGYHLMSFPQSAPHGVVFLHVTYVPAQEKNFTCAPAICHDGKAHFPREGVFVSNGTHWFVTQRNFYEPQIITTDNTFVSGNCDVVIGIVNNTVYDPLQPELDSFKEELDKYFKNHTSPDVDLGDISGINASVVNIQKEIDRLNEVAKNLNESLIDLQELGKYEQYIKGGGSGGGQIYEGKLTAEGLRFGIVASRFNHALVDRLVEGAIDAIVRHGGREEDITLVRVPGSWEIPVAAGELARKEDIDAVIAIGVLIRGATPHFDYIASEVSKGLADLSLELRKPITFGVITADTLEQAIERAGTKHGNKGWEAALSAIEMANLFKSLR

SEQ ID NO: 3993 - protein, 1371 aa, Artificial Sequence
  SARS-CoV-2/USA/WA-UW31/2020__EPI_ISL_414618 spike protein (1-1211)(I712C_T1077C) LumSynth construct
MFVFLVLLPLVSSQCVNLTTRTQLPPAYTNSFTRGVYYPDKVFRSSVLHSTQDLFLPFFSNVTWFHAIHVSGTNGTKRFDNPVLPFNDGVYFASTEKSNIIRGWIFGTTLDSKTQSLLIVNNATNVVIKVCEFQFCNDPFLGVYYHKNNKSWMESEFRVYSSANNCTFEYVSQPFLMDLEGKQGNFKNLREFVFKNIDGYFKIYSKHTPINLVRDLPQGFSALEPLVDLPIGINITRFQTLLALHRSYLTPGDSSSGWTAGAAAYYVGYLQPRTFLLKYNENGTITDAVDCALDPLSETKCTLKSFTVEKGIYQTSNFRVQPTESIVRFPNITNLCPFGEVFNATRFASVYAWNRKRISNCVADYSVLYNSASFSTFKCYGVSPTKLNDLCFTNVYADSFVIRGDEVRQIAPGQTGKIADYNYKLPDDFTGCVIAWNSNNLDSKVGGNYNYLYRLFRKSNLKPFERDISTEIYQAGSTPCNGAEGFNCYFPLQSYGFQPTNGVGYQPYRVVVLSFELLHAPATVCGPKKSTNLVKNKCVNFNFNGLTGTGVLTESNKKFLPFQQFGRDIADTTDAVRDPQTLEILDITPCSFGGVSVITPGTNTSNQVAVLYQDVNCTEVPVAIHADQLTPTWRVYSTGSNVFQTRAGCLIGAEHVNNSYECDIPIGAGICASYQTQTNSPRRARSVASQSIIAYTMSLGAENSVAYSNNSCAIPTNFTISVTTEILPVSMTKTSVDCTMYICGDSTECSNLLLQYGSFCTQLNRALTGIAVEQDKNTQEVFAQVKQIYKTPPIKDFGGFNFSQILPDPSKPSKRSFIEDLLFNKVTLADAGFIKQYGDCLGDIAARDLICAQKFNGLTVLPPLLTDEMIAQYTSALLAGTITSGWTFGAGAALQIPFAMQMAYRFNGIGVTQNVLYENQKLIANQFNSAIGKIQDSLSSTASALGKLQDVVNQNAQALNTLVKQLSSNFGAISSVLNDILSRLDKVEAEVQIDRLITGRLQSLQTYVTQQLIRAAEIRASANLAATKMSECVLGQSKRVDFCGKGYHLMSFPQSAPHGVVFLHVTYVPAQEKNFTCAPAICHDGKAHFPREGVFVSNGTHWFVTQRNFYEPQIITTDNTFVSGNCDVVIGIVNNTVYDPLQPELDSFKEELDKYFKNHTSPDVDLGDISGINASVVNIQKEIDRLNEVAKNLNESLIDLQELGKYEQYIKGGGSGGGQIYEGKLTAEGLRFGIVASRFNHALVDRLVEGAIDAIVRHGGREEDITLVRVPGSWEIPVAAGELARKEDIDAVIAIGVLIRGATPHFDYIASEVSKGLADLSLELRKPITFGVITADTLEQAIERAGTKHGNKGWEAALSAIEMANLFKSLR

SEQ ID NO: 3994 - protein, 1371 aa, Artificial Sequence
  SARS-CoV-2/South Korea/SNU01/2020__EPI_ISL_411929 spike protein (1-1211)(I712C_T1077C) LumSynth construct
MFVFLVLLPLVSSQCVNLTTRTQLPPAYTNSFTRGVYYPDKVFRSSVLHSTQDLFLPFFSNVTWFHAIHVSGTNGTKRFDNPVLPFNDGVYFASTEKSNIIRGWIFGTTLDSKTQSLLIVNNATNVVIKVCEFQFCNDPFLGVYYHKNNKSWMESEFRVYSSANNCTFEYVSQPFLMDLEGKQGNFKNLREFVFKNIDGYFKIYSKHTPINLVRDLPQGFWALEPLVDLPIGINITRFQTLLALHRSYLTPGDSSSGWTAGAAAYYVGYLQPRTFLLKYNENGTITDAVDCALDPLSETKCTLKSFTVEKGIYQTSNFRVQPTESIVRFPNITNLCPFGEVFNATRFASVYAWNRKRISNCVADYSVLYNSASFSTFKCYGVSPTKLNDLCFTNVYADSFVIRGDEVRQIAPGQTGKIADYNYKLPDDFTGCVIAWNSNNLDSKVGGNYNYLYRLFRKSNLKPFERDISTEIYQAGSTPCNGVEGFNCYFPLQSYGFQPTNGVGYQPYRVVVLSFELLHAPATVCGPKKSTNLVKNKCVNFNFNGLTGTGVLTESNKKFLPFQQFGRDIADTTDAVRDPQTLEILDITPCSFGGVSVITPGTNTSNQVAVLYQDVNCTEVPVAIHADQLTPTWRVYSTGSNVFQTRAGCLIGAEHVNNSYECDIPIGAGICASYQTQTNSPRRARSVASQSIIAYTMSLGAENSVAYSNNSCAIPTNFTISVTTEILPVSMTKTSVDCTMYICGDSTECSNLLLQYGSFCTQLNRALTGIAVEQDKNTQEVFAQVKQIYKTPPIKDFGGFNFSQILPDPSKPSKRSFIEDLLFNKVTLADAGFIKQYGDCLGDIAARDLICAQKFNGLTVLPPLLTDEMIAQYTSALLAGTITSGWTFGAGAALQIPFAMQMAYRFNGIGVTQNVLYENQKLIANQFNSAIGKIQDSLSSTASALGKLQDVVNQNAQALNTLVKQLSSNFGAISSVLNDILSRLDKVEAEVQIDRLITGRLQSLQTYVTQQLIRAAEIRASANLAATKMSECVLGQSKRVDFCGKGYHLMSFPQSAPHGVVFLHVTYVPAQEKNFTCAPAICHDGKAHFPREGVFVSNGTHWFVTQRNFYEPQIITTDNTFVSGNCDVVIGIVNNTVYDPLQPELDSFKEELDKYFKNHTSPDVDLGDISGINASVVNIQKEIDRLNEVAKNLNESLIDLQELGKYEQYIKGGGSGGGQIYEGKLTAEGLRFGIVASRFNHALVDRLVEGAIDAIVRHGGREEDITLVRVPGSWEIPVAAGELARKEDIDAVIAIGVLIRGATPHFDYIASEVSKGLADLSLELRKPITFGVITADTLEQAIERAGTKHGNKGWEAALSAIEMANLFKSLR

SEQ ID NO: 3995 - protein, 1371 aa, Artificial Sequence
  SARS-CoV-2/China/WF0004/2020__EPI_ISL_413694 spike protein (1-1211)(I712C_T1077C) LumSynth construct
MFVFLVLLPLVSSQCVNLTTRTQLPPAYTNSFTRGVYYPDKVFRSSVLHSTQDLFLPFFSNVTWFHAIHVSGTNGTKRFDNPVLPFNDGVYFASTEKSNIIRGWIFGTTLDSKTQSLLIVNNATNVVIKVCEFQFCNDPFLGVYYHKNNKSWTESEFRVYSSANNCTFEYVSQPFLMDLEGKQGNFKNLREFVFKNIDGYFKIYSKHTPINLVRDLPQGFSALEPLVDLPIGINITRFQTLLALHRSYLTPGDSSSGWTAGAAAYYVGYLQPRTFLLKYNENGTITDAVDCALDPLSETKCTLKSFTVEKGIYQTSNFRVQPTESIVRFPNITNLCPFGEVFNATRFASVYAWNRKRISNCVADYSVLYNSASFSTFKCYGVSPTKLNDLCFTNVYADSFVIRGDEVRQIAPGQTGKIADYNYKLPDDFTGCVIAWNSNNLDSKVGGNYNYLYRLFRKSNLKPFERDISTEIYQAGSTPCNGVEGFNCYFPLQSYGFQPTNGVGYQPYRVVVLSFELLHAPATVCGPKKSTNLVKNKCVNFNFNGLTGTGVLTESNKKFLPFQQFGRDIADTTDAVRDPQTLEILDITPCSFGGVSVITPGTNTSNQVAVLYQDVNCTEVPVAIHADQLTPTWRVYSTGSNVFQTRAGCLIGAEHVNNSYECDIPIGAGICASYQTQTNSPRRARSVASQSIIAYTMSLGAENSVAYSNNSCAIPTNFTISVTTEILPVSMTKTSVDCTMYICGDSTECSNLLLQYGSFCTQLNRALTGIAVEQDKNTQEVFAQVKQIYKTPPIKDFGGFNFSQILPDPSKPSKRSFIEDLLFNKVTLADAGFIKQYGDCLGDIAARDLICAQKFNGLTVLPPLLTDEMIAQYTSALLAGTITSGWTFGAGAALQIPFAMQMAYRFNGIGVTQNVLYENQKLIANQFNSAIGKIQDSLSSTASALGKLQDVVNQNAQALNTLVKQLSSNFGAISSVLNDILSRLDKVEAEVQIDRLITGRLQSLQTYVTQQLIRAAEIRASANLAATKMSECVLGQSKRFDFCGKGYHLMSFPQSAPHGVVFLHVTYVPAQEKNFTCAPAICHDGKAHFPREGVFVSNGTHWFVTQRNFYEPQIITTDNTFVSGNCDVVIGIVNNTVYDPLQPELDSFKEELDKYFKNHTSPDVDLGDISGINASVVNIQKEIDRLNEVAKNLNESLIDLQELGKYEQYIKGGGSGGGQIYEGKLTAEGLRFGIVASRFNHALVDRLVEGAIDAIVRHGGREEDITLVRVPGSWEIPVAAGELARKEDIDAVIAIGVLIRGATPHFDYIASEVSKGLADLSLELRKPITFGVITADTLEQAIERAGTKHGNKGWEAALSAIEMANLFKSLR

SEQ ID NO: 3996 - protein, 1371 aa, Artificial Sequence
  SARS-CoV-2/China/WF0028/2020__EPI_ISL_413791 spike protein (1-1211)(I712C_T1077C) LumSynth construct
MFVFLVLLPLVSSQCVNLTTRTQLPPAYTNSFTRGVYYPDKVFRSSVLHSTQDLFLPFFSNVTWFHAIHVSGTNGTKRFDNPVLPFNDGVYFASTEKSNIIRGWIFGTTLDSKTQSLLIVNNATNVVIKVCEFQFCNDPFLGVYYHKNNKSWMESEFRVYSSANNCTFEYVSQPFLMDLEGKQGNFKNLREFVFKNIDGYFKIYSKHTPINLVRDLPQGFSALEPLVDLPIGINITRFQTLLALHRSYLTPGDSSSGWTAGAAAYYVGYLQPRTFLLKYNENGTITDAVDCALDPLSETKCTLKSFTVEKGIYQTSNFRVQPTESIVRFPNITNLCPFGEVFNATRFASVYAWNRKRISNCVADYSVLYNSASFSTFKCYGVSPTKLNDLCFTNVYADSFVIRGDEVRQIAPGQTGKIADYNYKLPDDFTGCVIAWNSNNLDSKVGGNYNYLYRLFRKSNLKPFERDISTEIYQAGSTPCNGVEGFNCYFPLQSYGFQPTNGVGYQPYRVVVLSFELLHAPATVCGPKKSTNLVKNKCVNFNFNGLTGTGVLTESNKKFLPFQQFGRDIADTTDAVRDPQTLEILDITPCSFGGVSVITPGTNTSNQVAVLYQDVNCTEVPVAIHADQLTPTWRVYSTGSNVFQTRAGCLIGAEHVNNSYECDIPIGAGICASYQTQTNSPRRARSVASQSIIAYTMSLGAENSVAYSNNSCAIPTNFTISVTTEILPVSMTKTSVDCTMYICGDSTECSNLLLQYGSFCTQLNRALTGIAVEQDKNTQEVFAQVKQIYKTPPIKDFGGFNFSQILPDPSKPSKRSFIEDLLFNKVTLADAGFIKQYGDCLGDIAARDLICAQKFNGLTVLPPLLTDEMIAQYTSALLAGTITSGWTFGAGAALQIPFAMQMAYRFNGIGVTQNVLYENQKLIANQFNSAIGKIQDSLSSTASALGKLQDVVNQNAQALNTLVKQLSSNFGAISSVLNDILSRLDKVEAEVQIDRLITGRLQSLQTYVTQQLIRAAEIRASANLAATKMSECVLGQSKRVDFCGKGYHLMSFPQSAPHGVVFLHVTYVPAQEKNFTCAPAICHDGKAHFPREGVFVSNGTHWFVTQRNFYEPQIITTDNTFVSGNCDVVIGIVNNTVYDPLQPELESFKEELDKYFKNHTSPDVDLGDISGINASVVNIQKEIDRLNEVAKNLNESLIDLQELGKYEQYIKGGGSGGGQIYEGKLTAEGLRFGIVASRFNHALVDRLVEGAIDAIVRHGGREEDITLVRVPGSWEIPVAAGELARKEDIDAVIAIGVLIRGATPHFDYIASEVSKGLADLSLELRKPITFGVITADTLEQAIERAGTKHGNKGWEAALSAIEMANLFKSLR

SEQ ID NO: 3997 - protein, 1371 aa, Artificial Sequence
  SARS-CoV-2/2019-nCoV/USA-CruiseA-18/2020__MT159716.1 spike protein (1-1211)(I712C_T1077C) LumSynth construct
MFVFLVLLPLVSSQCVNLTTRTQLPPAYTNSFTRGVYYPDKVFRSSVLHSTQDLFLPFFSNVTWFHAIHVSGTNGTKRFDNPVLPFNDGVYFASTEKSNIIRGWIFGTTLDSKTQSLLIVNNATNVVIKVCEFQFCNDPFLGVYYHKNNKSWMESELRVYSSANNCTFEYVSQPFLMDLEGKQGNFKNLREFVFKNIDGYFKIYSKHTPINLVRDLPQGFSALEPLVDLPIGINITRFQTLLALHRSYLTPGDSSSGWTAGAAAYYVGYLQPRTFLLKYNENGTITDAVDCALDPLSETKCTLKSFTVEKGIYQTSNFRVQPTESIVRFPNITNLCPFGEVFNATRFASVYAWNRKRISNCVADYSVLYNSASFSTFKCYGVSPTKLNDLCFTNVYADSFVIRGDEVRQIAPGQTGKIADYNYKLPDDFTGCVIAWNSNNLDSKVGGNYNYLYRLFRKSNLKPFERDISTEIYQAGSTPCNGVEGFNCYFPLQSYGFQPTNGVGYQPYRVVVLSFELLHAPATVCGPKKSTNLVKNKCVNFNFNGLTGTGVLTESNKKFLPFQQFGRDIADTTDAVRDPQTLEILDITPCSFGGVSVITPGTNTSNQVAVLYQDVNCTEVPVAIHADQLTPTWRVYSTGSNVFQTRAGCLIGAEHVNNSYECDIPIGAGICASYQTQTNSPRRARSVASQSIIAYTMSLGAENSVAYSNNSCAIPTNFTISVTTEILPVSMTKTSVDCTMYICGDSTECSNLLLQYGSFCTQLNRALTGIAVEQDKNTQEVFAQVKQIYKTPPIKDFGGFNFSQILPDPSKPSKRSFIEDLLFNKVTLADAGFIKQYGDCLGDIAARDLICAQKFNGLTVLPPLLTDEMIAQYTSALLAGTITSGWTFGAGAALQIPFAMQMAYRFNGIGVTQNVLYENQKLIANQFNSAIGKIQDSLSSTASALGKLQDVVNQNAQALNTLVKQLSSNFGAISSVLNDILSRLDKVEAEVQIDRLITGRLQSLQTYVTQQLIRAAEIRASANLAATKMSECVLGQSKRVDFCGKGYHLMSFPQSAPHGVVFLHVTYVPAQEKNFTCAPAICHDGKAHFPREGVFVSNGTHWFVTQRNFYEPQIITTDNTFVSGNCDVVIGIVNNTVYDPLQPELDSFKEELDKYFKNHTSPDVDLGDISGINASVVNIQKEIDRLNEVAKNLNESLIDLQELGKYEQYIKGGGSGGGQIYEGKLTAEGLRFGIVASRFNHALVDRLVEGAIDAIVRHGGREEDITLVRVPGSWEIPVAAGELARKEDIDAVIAIGVLIRGATPHFDYIASEVSKGLADLSLELRKPITFGVITADTLEQAIERAGTKHGNKGWEAALSAIEMANLFKSLR

SEQ ID NO: 3998 - protein, 1371 aa, Artificial Sequence
  SARS-CoV-2/SARS-CoV-2/Yunnan-01/human/2020/CHN__MT049951.1 spike protein (1-1211)(I712C_T1077C) LumSynth construct
MFVFLVLLPLVSSQCVNLTTRTQLPPANTNSFTRGVYYPDKVFRSSVLHSTQDLFLPFFSNVTWFHAIHVSGTNGTKRFDNPVLPFNDGVYFASTEKSNIIRGWIFGTTLDSKTQSLLIVNNATNVVIKVCEFQFCNDPFLGVYYHKNNKSWMESEFRVYSSANNCTFEYVSQPFLMDLEGKQGNFKNLREFVFKNIDGYFKIYSKHTPINLVRDLPQGFSALEPLVDLPIGINITRFQTLLALHRSYLTPGDSSSGWTAGAAAYYVGYLQPRTFLLKYNENGTITDAVDCALDPLSETKCTLKSFTVEKGIYQTSNFRVQPTESIVRFPNITNLCPFGEVFNATRFASVYAWNRKRISNCVADYSVLYNSASFSTFKCYGVSPTKLNDLCFTNVYADSFVIRGDEVRQIAPGQTGKIADYNYKLPDDFTGCVIAWNSNNLDSKVGGNYNYLYRLFRKSNLKPFERDISTEIYQAGSTPCNGVEGFNCYFPLQSYGFQPTNGVGYQPYRVVVLSFELLHAPATVCGPKKSTNLVKNKCVNFNFNGLTGTGVLTESNKKFLPFQQFGRDIADTTDAVRDPQTLEILDITPCSFGGVSVITPGTNTSNQVAVLYQDVNCTEVPVAIHADQLTPTWRVYSTGSNVFQTRAGCLIGAEHVNNSYECDIPIGAGICASYQTQTNSPRRARSVASQSIIAYTMSLGAENSVAYSNNSCAIPTNFTISVTTEILPVSMTKTSVDCTMYICGDSTECSNLLLQYGSFCTQLNRALTGIAVEQDKNTQEVFAQVKQIYKTPPIKDFGGFNFSQILPDPSKPSKRSFIEDLLFNKVTLADAGFIKQYGDCLGDIAARDLICAQKFNGLTVLPPLLTDEMIAQYTSALLAGTITSGWTFGAGAALQIPFAMQMAYRFNGIGVTQNVLYENQKLIANQFNSAIGKIQDSLSSTASALGKLQDVVNQNAQALNTLVKQLSSNFGAISSVLNDILSRLDKVEAEVQIDRLITGRLQSLQTYVTQQLIRAAEIRASANLAATKMSECVLGQSKRVDFCGKGYHLMSFPQSAPHGVVFLHVTYVPAQEKNFTCAPAICHDGKAHFPREGVFVSNGTHWFVTQRNFYEPQIITTDNTFVSGNCDVVIGIVNNTVYDPLQPELDSFKEELDKYFKNHTSPDVDLGDISGINASVVNIQKEIDRLNEVAKNLNESLIDLQELGKYEQYIKGGGSGGGQIYEGKLTAEGLRFGIVASRFNHALVDRLVEGAIDAIVRHGGREEDITLVRVPGSWEIPVAAGELARKEDIDAVIAIGVLIRGATPHFDYIASEVSKGLADLSLELRKPITFGVITADTLEQAIERAGTKHGNKGWEAALSAIEMANLFKSLR

SEQ ID NO: 3999 - protein, 1371 aa, Artificial Sequence
  SARS-CoV-2/USA/WA-UW292/2020__EPI_ISL_418077 spike protein (1-1211)(I712C_T1077C) LumSynth construct
MFVFLVLLPLVSSQCVNLTTRTQLPPAYTNSFTRGVYYPDKVFRSSVLHSTQDLFLPFFSNVTWFHAIHVSGTNGTKRFDNPVLPFNDGVYFASTEKSNIIRGWIFGTTLDSKTQSLLIVNNATNVVIKVCEFQFCNDPFLGVYYHKNNKSWMESEFRVYSSANNCTFEYVSQPFLMDLEGKQGNFKNLREFVFKNIDGYFKIYSKHTPINLVRDLPQGFSALEPLVDLPIGINITRFQTLLALHRSYLTPGDSSSGWTAGAAAYYVGYLQPRTFLLKYNENGTITDAVDCALDPLSETKCTLKSFTVEKGIYQTSNFRVQPTESIVRFPNITNLCPFGEVFNATRFASVYAWNRKRISNCVADYSVLYNSASFSTFKCYGVSPTKLNDLCFTNVYADSFVIRGDEVRQIAPGQTGKIADYNYKLPDDFTGCVIAWNSNNLDSKVGGNYNYLYRLFRKSNLKPFERDISTEIYQASSTPCNGVEGFNCYFPLQSYGFQPTNGVGYQPYRVVVLSFELLHAPATVCGPKKSTNLVKNKCVNFNFNGLTGTGVLTESNKKFLPFQQFGRDIADTTDAVRDPQTLEILDITPCSFGGVSVITPGTNTSNQVAVLYQDVNCTEVPVAIHADQLTPTWRVYSTGSNVFQTRAGCLIGAEHVNNSYECDIPIGAGICASYQTQTNSPRRARSVASQSIIAYTMSLGAENSVAYSNNSCAIPTNFTISVTTEILPVSMTKTSVDCTMYICGDSTECSNLLLQYGSFCTQLNRALTGIAVEQDKNTQEVFAQVKQIYKTPPIKDFGGFNFSQILPDPSKPSKRSFIEDLLFNKVTLADAGFIKQYGDCLGDIAARDLICAQKFNGLTVLPPLLTDEMIAQYTSALLAGTITSGWTFGAGAALQIPFAMQMAYRFNGIGVTQNVLYENQKLIANQFNSAIGKIQDSLSSTASALGKLQDVVNQNAQALNTLVKQLSSNFGAISSVLNDILSRLDKVEAEVQIDRLITGRLQSLQTYVTQQLIRAAEIRASANLAATKMSECVLGQSKRVDFCGKGYHLMSFPQSAPHGVVFLHVTYVPAQEKNFTCAPAICHDGKAHFPREGVFVSNGTHWFVTQRNFYEPQIITTDNTFVSGNCDVVIGIVNNTVYDPLQPELDSFKEELDKYFKNHTSPDVDLGDISGINASVVNIQKEIDRLNEVAKNLNESLIDLQELGKYEQYIKGGGSGGGQIYEGKLTAEGLRFGIVASRFNHALVDRLVEGAIDAIVRHGGREEDITLVRVPGSWEIPVAAGELARKEDIDAVIAIGVLIRGATPHFDYIASEVSKGLADLSLELRKPITFGVITADTLEQAIERAGTKHGNKGWEAALSAIEMANLFKSLR

SEQ ID NO: 4000 - protein, 1371 aa, Artificial Sequence
  SARS-CoV-2/Iceland/192/2020__EPI_ISL_417819 spike protein (1-1211)(I712C_T1077C) LumSynth construct
MFVFFVLLPLVSSQCVNLTTRTQLPPAYTNSFTRGVYYPDKVFRSSVLHSTQDLFLPFFSNVTWFHAIHVSGTNGTKRFDNPVLPFNDGVYFASTEKSNIIRGWIFGTTLDSKTQSLLIVNNATNVVIKVCEFQFCNDPFLGVYYHKNNKSWMESEFRVYSSANNCTFEYVSQPFLMDLEGKQGNFKNLREFVFKNIDGYFKIYSKHTPINLVRDLPQGFSALEPLVDLPIGINITRFQTLLALHRSYLTPGDSSSGWTAGAAAYYVGYLQPRTFLLKYNENGTITDAVDCALDPLSETKCTLKSFTVEKGIYQTSNFRVQPTESIVRFPNITNLCPFGEVFNATRFASVYAWNRKRISNCVADYSVLYNSASFSTFKCYGVSPTKLNDLCFTNVYADSFVIRGDEVRQIAPGQTGKIADYNYKLPDDFTGCVIAWNSNNLDSKVGGNYNYLYRLFRKSNLKPFERDISTEIYQAGSTPCNGVEGFNCYFPLQSYGFQPTNGVGYQPYRVVVLSFELLHAPATVCGPKKSTNLVKNKCVNFNFNGLTGTGVLTESNKKFLPFQQFGRDIADTTDAVRDPQTLEILDITPCSFGGVSVITPGTNTSNQVAVLYQGVNCTEVPVAIHADQLTPTWRVYSTGSNVFQTRAGCLIGAEHVNNSYECDIPIGAGICASYQTQTNSPRRARSVASQSIIAYTMSLGAENSVAYSNNSCAIPTNFTISVTTEILPVSMTKTSVDCTMYICGDSTECSNLLLQYGSFCTQLNRALTGIAVEQDKNTQEVFAQVKQIYKTPPIKDFGGFNFSQILPDPSKPSKRSFIEDLLFNKVTLADAGFIKQYGDCLGDIAARDLICAQKFNGLTVLPPLLTDEMIAQYTSALLAGTITSGWTFGAGAALQIPFAMQMAYRFNGIGVTQNVLYENQKLIANQFNSAIGKIQDSLSSTASALGKLQDVVNQNAQALNTLVKQLSSNFGAISSVLNDILSRLDKVEAEVQIDRLITGRLQSLQTYVTQQLIRAAEIRASANLAATKMSECVLGQSKRVDFCGKGYHLMSFPQSAPHGVVFLHVTYVPAQEKNFTCAPAICHDGKAHFPREGVFVSNGTHWFVTQRNFYEPQIITTDNTFVSGNCDVVIGIVNNTVYDPLQPELDSFKEELDKYFKNHTSPDVDLGDISGINASVVNIQKEIDRLNEVAKNLNESLIDLQELGKYEQYIKGGGSGGGQIYEGKLTAEGLRFGIVASRFNHALVDRLVEGAIDAIVRHGGREEDITLVRVPGSWEIPVAAGELARKEDIDAVIAIGVLIRGATPHFDYIASEVSKGLADLSLELRKPITFGVITADTLEQAIERAGTKHGNKGWEAALSAIEMANLFKSLR

SEQ ID NO: 4001 - protein, 1371 aa, Artificial Sequence
  SARS-CoV-2/Belgium/ULG-6939/2020__EPI_ISL_417020 spike protein (1-1211)(I712C_T1077C) LumSynth construct
MFVFLVLLPLVSSQCVNLTTRTQLPPAYTNSFTRGVYYPDKVFRSSVLHSTQDLFLPFFSNVTWFHAIHVSGTNGTKRFDNPVLPFNDGVYFASTEKSNIIRGWIFGTTLDSKTQSLLIVNNATNVVIKVCEFQFCNDPFLGVYYHKNNKSWMESEFRVYSSANNCTFEYVSQPFLMDLEGKQGNFKNLREFVFKNIDGYFKIYSKHTPINLVRDLPQGFSALEPLVDLPIGINITRFQTLLALHRSYLTPGDSSSGWTAGAAAYYVGYLQPRTFLLKYNENGTITDAVDCALDPLSETKCTLKSFTVEKGIYQTSNFRVQPTESIVRFPNITNLCPFGEVFNATRFASVYAWNRKRISNCVADYSVLYNSASFSTFKCYGVSPTKLNDLCFTNVYADSFVIRGDEVRQIAPGQTGKIADYNYKLPDDFTGCVIAWNSNNLDSKVGGNYNYLYRLFRKSNLKPFERDISTEIYQAGSTPCNGVEGFNCYFPLQSYGFQPTNGVGYQPYRVVVLSFELLHAPATVCGPKKSTNLVKNKCVNFNFNGLTGTGVLTESNKKFLPFQQFGRDIADTTDAVRDPQTLEILDITPCSFGGVSVITPGTNTSNQVAVLYQGVNCTEVPVAIHADQLTPTWRVYSTGSNVFQTRAGCLIGAEHVNNSYECDIPIGAGICASYQTQTNSPRRARSVASQSIIAYTMSLGAENSVVYSNNSCAIPTNFTISVTTEILPVSMTKTSVDCTMYICGDSTECSNLLLQYGSFCTQLNRALTGIAVEQDKNTQEVFAQVKQIYKTPPIKDFGGFNFSQILPDPSKPSKRSFIEDLLFNKVTLADAGFIKQYGDCLGDIAARDLICAQKFNGLTVLPPLLTDEMIAQYTSALLAGTITSGWTFGAGAALQIPFAMQMAYRFNGIGVTQNVLYENQKLIANQFNSAIGKIQDSLSSTASALGKLQDVVNQNAQALNTLVKQLSSNFGAISSVLNDILSRLDKVEAEVQIDRLITGRLQSLQTYVTQQLIRAAEIRASANLAATKMSECVLGQSKRVDFCGKGYHLMSFPQSAPHGVVFLHVTYVPAQEKNFTCAPAICHDGKAHFPREGVFVSNGTHWFVTQRNFYEPQIITTDNTFVSGNCDVVIGIVNNTVYDPLQPELDSFKEELDKYFKNHTSPDVDLGDISGINASVVNIQKEIDRLNEVAKNLNESLIDLQELGKYEQYIKGGGSGGGQIYEGKLTAEGLRFGIVASRFNHALVDRLVEGAIDAIVRHGGREEDITLVRVPGSWEIPVAAGELARKEDIDAVIAIGVLIRGATPHFDYIASEVSKGLADLSLELRKPITFGVITADTLEQAIERAGTKHGNKGWEAALSAIEMANLFKSLR

SEQ ID NO: 4002 - protein, 1371 aa, Artificial Sequence
  SARS-CoV-2/France/HF2496/2020__EPI_ISL_418231 spike protein (1-1211)(I712C_T1077C) LumSynth construct
MFVFLVLLPLVSSQCVNLTTRTQLPPAYTNSFTRGVYYPDKVFRSSVLHSTQDLFLPFFSNVTWFHAIHVSGTNGTKRFDNPVLPFNDGVYFASTEKSNIIRGWIFGTTLDSKTQSLLIVNNATNVVIKVCEFQFCNDPFLGVYYHKNNKSWMESEFRVYSSANNCTFEYVSQPFLMDLEGKQGNFKNLREFVFKNIDGYFKIYSKHTPINLVRDLPQGFSALEPLVDLPIGINITRFQTLLALHRSYLTPGDSSSGWTAGAAAYYVGYLQPRTFLLKYNENGTITDAVDCALDPLSETKCTLKSFTVEKGIYQTSNFRVQPTESIVRFPNITNLCPFGEVFNATRFASVYAWNRKRISNCVADYSVLYNSASFSTFKCYGVSPTKLNDLCFTNVYADSFVIRGDEVRQIAPGQTGKIADYNYKLPDDFTGCVIAWNSNNLDSKVGGNYNYLYRLFRKSNLKPFERDISTEIYQAGSTPCNGVEGFNCYFPLQSYGFQPTNGVGYQPYRVVVLSFELLHAPATVCGPKKSTNLVKNKCVNFNFNGLTGTGVLTESNKKFLPFQQFGRDIADTTDAVRDPQTLEILDITPCSFGGVSVITPGTNTSNQVAVLYQGVNCTEVPVAIHADQLTPTWRVYSTGSNVFQTRAGCLIGAEHVNNSYECDIPIGAGICASYQTQTNSPRRARSVASQSIIAYTMSLGAENSVAYSNNSCAIPTNFTISVTTEILPVSMTKTSVDCTMYICGDSTECSNLLLQYGSFCTQLNRALTGIAVEQDKNTQEVFAQVKQIYKTPPIKDFGGFNFSQILPDPSKPSKRSFIEDLLFNKVTLADAGFIKQYGDCLGDIVARDLICAQKFNGLTVLPPLLTDEMIAQYTSALLAGTITSGWTFGAGAALQIPFAMQMAYRFNGIGVTQNVLYENQKLIANQFNSAIGKIQDSLSSTASALGKLQDVVNQNAQALNTLVKQLSSNFGAISSVLNDILSRLDKVEAEVQIDRLITGRLQSLQTYVTQQLIRAAEIRASANLAATKMSECVLGQSKRVDFCGKGYHLMSFPQSAPHGVVFLHVTYVPAQEKNFTCAPAICHDGKAHFPREGVFVSNGTHWFVTQRNFYEPQIITTDNTFVSGNCDVVIGIVNNTVYDPLQPELDSFKEELDKYFKNHTSPDVDLGDISGINASVVNIQKEIDRLNEVAKNLNESLIDLQELGKYEQYIKGGGSGGGQIYEGKLTAEGLRFGIVASRFNHALVDRLVEGAIDAIVRHGGREEDITLVRVPGSWEIPVAAGELARKEDIDAVIAIGVLIRGATPHFDYIASEVSKGLADLSLELRKPITFGVITADTLEQAIERAGTKHGNKGWEAALSAIEMANLFKSLR

SEQ ID NO: 4003 - protein, 1371 aa, Artificial Sequence
  SARS-CoV-2/USA/WA-UW291/2020__EPI_ISL_418076 spike protein (1-1211)(I712C_T1077C) LumSynth construct
MFVFLVLLPLVSSQCVNLTTRTQLPPAYTNSFTRGVYYPDKVFRSSVLHSTQDLFLPFFSNVTWFHAIHVSGTNGTKRFDNPVLPFNDGVYFASTEKSNIIRGWIFGTTLDSKTQSLLIVNNATNVVIKVCEFQFCNDPFLGVYYHKNNKSWMESEFRVYSSANNCTFEYVSQPFLMDLEGKQGNFKNLREFVFKNIDGYFKIYSKHTPINLVRDLPQGFSALEPLVDLPIGINITRFQTLLALHRSYLTPGDSSSGWTAGAAAYYVGYLQPRTFLLKYNENGTITDAVDCALDPLSETKCTLKSFTVEKGIYQTSNFRVQPTESIVRFPNITNLCPFGEVFNATRFASVYAWNRKRISNCVADYSVLYNSASFSTFKCYGVSPTKLNDLCFTNVYADSFVIRGDEVRQIAPGQTGKIADYNYKLPDDFTGCVIAWNSNNLDSKVGGNYNYLYRLFRKSNLKPFERDISTEIYQAGSTPCNGVEGFNCYFPLQSYGFQPTNGVGYQPYRVVVLSFELLHAPATVCGPKKSTNLVKNKCVNFNFNGLTGTGVLTESNKKFLPFQQFGRDIADTTDAVRDPQTLEILDITPCSFGGVSVITPGTNTSNQVAVLYQGVNCTEVPVAIHADQLTPTWRVYSTGSNVFQTRAGCLIGAEHVNNSYECDIPIGAGICASYQTQTNSPRRARSVASQSIIAYTMSLGAENSVAYSNNSCAIPTNFTISVTTEILPVSMTKTSVDCTMYICGDSTECSNLLLQYGSFCTQLNRALTGIAVEQDKNTQEVFAQVKQIYKTPPIKDFGGFNFSQILPDPSKPSKRSFIEDLLFNKVTLADAGFIKQYGDCLGDIAARDLICAQKFNGLTVLPPLLTDEMIAQYTSALLAGTITSGWTFGAGAALQIPFAMQMAYRFNGIGVTQNVLYENQKLIANQFNSAIGKIQYSLSSTASALGKLQDVVNQNAQALNTLVKQLSSNFGAISSVLNDILSRLDKVEAEVQIDRLITGRLQSLQTYVTQQLIRAAEIRASANLAATKMSECVLGQSKRVDFCGKGYHLMSFPQSAPHGVVFLHVTYVPAQEKNFTCAPAICHDGKAHFPREGVFVSNGTHWFVTQRNFYEPQIITTDNTFVSGNCDVVIGIVNNTVYDPLQPELDSFKEELDKYFKNHTSPDVDLGDISGINASVVNIQKEIDRLNEVAKNLNESLIDLQELGKYEQYIKGGGSGGGQIYEGKLTAEGLRFGIVASRFNHALVDRLVEGAIDAIVRHGGREEDITLVRVPGSWEIPVAAGELARKEDIDAVIAIGVLIRGATPHFDYIASEVSKGLADLSLELRKPITFGVITADTLEQAIERAGTKHGNKGWEAALSAIEMANLFKSLR

SEQ ID NO: 4004 - protein, 1371 aa, Artificial Sequence; identical to SEQ ID NO: 3967
  SARS-CoV-2/Portugal/PT0034/2020__EPI_ISL_418019 spike protein (1-1211)(I712C_T1077C) LumSynth construct

SEQ ID NO: 4005 - protein, 1371 aa, Artificial Sequence
  SARS-CoV-2/Iceland/202/2020__EPI_ISL_417750 spike protein (1-1211)(I712C_T1077C) LumSynth construct
MFVFLVLLPLVSSQCVNLTTRTQLPPAYTNSFTRGVYYPDKVFRSSVLHSTQDLFLPFFSNVTWFHAIHVSGTNGTKRFDNPVLPFNDGVYFASTEKSNIIRGWIFGTTLDSKTQSLLIVNNATNVVIKVCEFQFCNDPFLGVYYHKNNKSWMESEFRVYSSANNCTFEYVSQPFLMDLEGKQGNFKNLREFVFKNIDGYFKIYSKHTPINLVRDLPQGFSALEPLVDLPIGINITRFQTLLALHRSYLTPGDSSSGWTAGAAAYYVGYLQPRTFLLKYNENGTITDAVDCALDPLSETKCTLKSFTVEKGIYQTSNFRVQPTESIVRFPNITNLCPFGEVFNATRFASVYAWNRKRISNCVADYSVLYNSASFSTFKCYGVSPTKLNDLCFTNVYADSFVIRGDEVRQIAPGQTGKIADYNYKLPDDFTGCVIAWNSNNLDSKVGGNYNYLYRLFRKSNLKPFERDISTEIYQAGSTPCNGVEGFNCYFPLQSYGFQPTNGVGYQPYRVVVLSFELLHAPATVCGPKKSTNLVKNKCVNFNFNGLTGTGVLTESNKKFLPFQQFGRDIADTTDAVRDPQTLEILDITPCSFGGVSVITPGTNTSNQVAVLYQDVNCTEVPVAIHADQLTPTWRVYSTGSNVFQTRAGCLIGAEHVNNSYECDIPIGAGICASYQTQTNSPRRARSVASQSIIAYTMSLGAENSVAYSNNSCAIPTNFTISVTTEILPVSMTKTSVDCTMYICGDSTECSNLLLQYGSFCTQLNRALTGIAVEQDKNTQEVFAQVKQIYKTPPIKDFGGFNFSQILPDPSKPSKRSFIEDLLFNKVTLADAGFIKQYGDCLGDIAARDLICAQKFNGLTVLPPLLTDEMIAQYTSALLAGTITSGWTFGAGAALQIPFAMQMAYRFNGIGVTQNVLYENQKLIANQFNSAIGKIQDSLSSTASALGKLQDVVNQNAQALNTLVKQLSSNFGAISSVLNDILSRLDKVEAEVQIDRLITGRLQSLQTYVTQQLIRAAEIRASANLAATKMSECVLGQSKRVDFCGKGYHLMSFPQSAPHGVVFLHVTYVPAQEKNFTCAPAICHDGKAHFPREGVFVSNGTHWFVTQRNFYEPQIITTDNTFVSGNCDVVIGIVNNTVYDPLQPELDSFKEELDKYFKNHTSPDVDLGDIPGINASVVNIQKEIDRLNEVAKNLNESLIDLQELGKYEQYIKGGGSGGGQIYEGKLTAEGLRFGIVASRFNHALVDRLVEGAIDAIVRHGGREEDITLVRVPGSWEIPVAAGELARKEDIDAVIAIGVLIRGATPHFDYIASEVSKGLADLSLELRKPITFGVITADTLEQAIERAGTKHGNKGWEAALSAIEMANLFKSLR

SEQ ID NO: 4006 - protein, 1371 aa, Artificial Sequence
  SARS-CoV-2/USA/WA-UW261/2020__EPI_ISL_418046 spike protein (1-1211)(I712C_T1077C) LumSynth construct
MFVFLVLLPLVSSQCVNLTTRTQLPPAYTNSFTRGVYYPDKVFRSSVLHSTQDLFLPFFSNVTWFHAIHVSGTNGTKRFDNPVLPFNDGVYFASTEKSNIIRGWIFGTTLDSKTQSLLIVNNATNVVIKVCEFQFCNDPFLGVYYHKNNKSWMESEFRVYSSANNCTFEYVSQPFLMDLEGKQGNFKNLREFVFKNIDGYFKIYSKHTPINLVRDLPQGFSALEPLVDLPIGINITRFQTLLALHRSYLTPGDSSSGWTAGAAAYYVGYLQPRTFLLKYNENGTITDAVDCALDPLSETKCTLKSFTVEKGIYQTSNFRVQPTESIVRFPNITNLCPFGEVFNATRFTSVYAWNRKRISNCVADYSVLYNSASFSTFKCYGVSPTKLNDLCFTNVYADSFVIRGDEVRQIAPGQTGKIADYNYKLPDDFTGCVIAWNSNNLDSKVGGNYNYLYRLFRKSNLKPFERDISTEIYQAGSTPCNGVEGFNCYFPLQSYGFQPTNGVGYQPYRVVVLSFELLHAPATVCGPKKSTNLVKNKCVNFNFNGLTGTGVLTESNKKFLPFQQFGRDIADTTDAVRDPQTLEILDITPCSFGGVSVITPGTNTSNQVAVLYQDVNCTEVPVAIHADQLTPTWRVYSTGSNVFQTRAGCLIGAEHVNNSYECDIPIGAGICASYQTQTNSPRRARSVASQSIIAYTMSLGAENSVAYSNNSCAIPTNFTISVTTEILPVSMTKTSVDCTMYICGDSTECSNLLLQYGSFCTQLNRALTGIAVEQDKNTQEVFAQVKQIYKTPPIKDFGGFNFSQILPDPSKPSKRSFIEDLLFNKVTLADAGFIKQYGDCLGDIAARDLICAQKFNGLTVLPPLLTDEMIAQYTSALLAGTITSGWTFGAGAALQIPFAMQMAYRFNGIGVTQNVLYENQKLIANQFNSAIGKIQDSLSSTASALGKLQDVVNQNAQALNTLVKQLSSNFGAISSVLNDILSRLDKVEAEVQIDRLITGRLQSLQTYVTQQLIRAAEIRASANLAATKMSECVLGQSKRVDFCGKGYHLMSFPQSAPHGVVFLHVTYVPAQEKNFTCAPAICHDGKAHFPREGVFVSNGTHWFVTQRNFYEPQIITTDNTFVSGNCDVVIGIVNNTVYDPLQPELDSFKEELDKYFKNHTSPDVDLGDISGINASVVNIQKEIDRLNEVAKNLNESLIDLQELGKYEQYIKGGGSGGGQIYEGKLTAEGLRFGIVASRFNHALVDRLVEGAIDAIVRHGGREEDITLVRVPGSWEIPVAAGELARKEDIDAVIAIGVLIRGATPHFDYIASEVSKGLADLSLELRKPITFGVITADTLEQAIERAGTKHGNKGWEAALSAIEMANLFKSLR

SEQ ID NO: 4007 - protein, 1371 aa, Artificial Sequence
  SARS-CoV-2/Portugal/PT0035/2020__EPI_ISL_418020 spike protein (1-1211)(I712C_T1077C) LumSynth construct
MFVFLVLLPLVSSQCVNLTTRTQLPPAYTNSFTRGVYYPDKVFRSSVLHSTQDLFLPFFSNVTWFHAIHVSGTNGTKRFDNPVLPFNDGVYFASTEKSNIIRGWIFGTTLDSKTQSLLIVNNATNVVIKVCEFQFCNDPFLGVYYHKNNKSWMESEFRVYSSANNCTFEYVSQPFLMDLEGKQGNFKNLREFVFKNIDGYFKIYSKHTPINLVRDLPQGFSALEPLVDLPIGINITRFQTLLALHRSYLTPGDSSSGWTAGAAAYYVGYLQPRTFLLKYNENGTITDAVDCALDPLSETKCTLKSFTVEKGIYQTSNFRVQPTESIVRFPNITNLCPFGEVFNATRFASVYAWNRKRISNCVADYSVLYNSASFSTFKCYGVSPTKLNDLCFTNVYADSFVIRGDEVRQIAPGQTGKIADYNYKLPDDFTGCVIAWNSNNLDSKVGGNYNYLYRLFRKSNLKPFERDISTEIYQAGSTPCNGVEGFNCYFPLQSYGFQPTNGVGYQPYRVVVLSFELLHAPATVCGPKKSTNLVKNKCVNFNFNGLTGTGVLTESNKKFLPFQQFGRDIADTTDAVRDPQTLEILDITPCSFGGVSVITPGTNTSNQVAVLYQDVNCTEVPVAIHADQLTPTWRVYSTGSNVFQTRAGCLIGAEHVNNSYECDIPIGAGICASYQTQTNSPRRARSVASQSIIAYTMSLGAENSVAYSNNSCAIPTNFTISVTTEILPVSMTKTSVDCTMYICGDSTECSNLLLQYGSFCTQLNRALTGIAVEQDKNTQEVFAQVKQIYKTPPIKDFGGFNFSQILPDPSKPSKRSFIEDLLFNKVTLADAGFIKQYGDCLGDISARDLICAQKFNGLTVLPPLLTDEMIAQYTSALLAGTITSGWTFGAGAALQIPFAMQMAYRFNGIGVTQNVLYENQKLIANQFNSAIGKIQDSLSSTASALGKLQDVVNQNAQALNTLVKQLSSNFGAISSVLNDILSRLDKVEAEVQIDRLITGRLQSLQTYVTQQLIRAAEIRASANLAATKMSECVLGQSKRVDFCGKGYHLMSFPQSAPHGVVFLHVTYVPAQEKNFTCAPAICHDGKAHFPREGVFVSNGTHWFVTQRNFYEPQIITTDNTFVSGNCDVVIGIVNNTVYDPLQPELDSFKEELDKYFKNHTSPDVDLGDISGINASVVNIQKEIDRLNEVAKNLNESLIDLQELGKYEQYIKGGGSGGGQIYEGKLTAEGLRFGIVASRFNHALVDRLVEGAIDAIVRHGGREEDITLVRVPGSWEIPVAAGELARKEDIDAVIAIGVLIRGATPHFDYIASEVSKGLADLSLELRKPITFGVITADTLEQAIERAGTKHGNKGWEAALSAIEMANLFKSLR

SEQ ID NO: 4008 - protein, 1371 aa, Artificial Sequence
  SARS-CoV-2/USA/NY-NYUMC7/2020__EPI_ISL_418192 spike protein (1-1211)(I712C_T1077C) LumSynth construct
MFVFLVLLPLVSSQCVNLTTRTQLPPAYTNSFTRGVYYPDKVFRSSVLHSTQDLFLPFFSNVTWFHAIHVSGTNGTKRFDNPVLPFNDGVYFASTEKSNIIRGWIFGTTLDSKTQSLLIVNNATNVVIKVCEFQFCNDPFLGVYHHKNNKSWMESEFRVYSSANNCTFEYVSQPFLMDLEGKQGNFKNLREFVFKNIDGYFKIYSKHTPINLVRDLPQGFSALEPLVDLPIGINITRFQTLLALHRSYLTPGDSSSGWTAGAAAYYVGYLQPRTFLLKYNENGTITDAVDCALDPLSETKCTLKSFTVEKGIYQTSNFRVQPTESIVRFPNITNLCPFGEVFNATRFASVYAWNRKRISNCVADYSVLYNSASFSTFKCYGVSPTKLNDLCFTNVYADSFVIRGDEVRQIAPGQTGKIADYNYKLPDDFTGCVIAWNSNNLDSKVGGNYNYLYRLFRKSNLKPFERDISTEIYQAGSTPCNGVEGFNCYFPLQSYGFQPTNGVGYQPYRVVVLSFELLHAPATVCGPKKSTNLVKNKCVNFNFNGLTGTGVLTESNKKFLPFQQFGRDIADTTDAVRDPQTLEILDITPCSFGGVSVITPGTNTSNQVAVLYQGVNCTEVPVAIHADQLTPTWRVYSTGSNVFQTRAGCLIGAEHVNNSYECDIPIGAGICASYQTQTNSPRRARSVASQSIIAYTMSLGAENSVAYSNNSCAIPTNFTISVTTEILPVSMTKTSVDCTMYICGDSTECSNLLLQYGSFCTQLNRALTGIAVEQDKNTQEVFAQVKQIYKTPPIKDFGGFNFSQILPDPSKPSKRSFIEDLLFNKVTLADAGFIKQYGDCLGDIAARDLICAQKFNGLTVLPPLLTDEMIAQYTSALLAGTITSGWTFGAGAALQIPFAMQMAYRFNGIGVTQNVLYENQKLIANQFNSAIGKIQDSLSSTASALGKLQDVVNQNAQALNTLVKQLSSNFGAISSVLNDILSRLDKVEAEVQIDRLITGRLQSLQTYVTQQLIRAAEIRASANLAATKMSECVLGQSKRVDFCGKGYHLMSFPQSAPHGVVFLHVTYVPAQEKNFTCAPAICHDGKAHFPREGVFVSNGTHWFVTQRNFYEPQIITTDNTFVSGNCDVVIGIVNNTVYDPLQPELDSFKEELDKYFKNHTSPDVDLGDISGINASVVNIQKEIDRLNEVAKNLNESLIDLQELGKYEQYIKGGGSGGGQIYEGKLTAEGLRFGIVASRFNHALVDRLVEGAIDAIVRHGGREEDITLVRVPGSWEIPVAAGELARKEDIDAVIAIGVLIRGATPHFDYIASEVSKGLADLSLELRKPITFGVITADTLEQAIERAGTKHGNKGWEAALSAIEMANLFKSLR

SEQ ID NO: 4009 - protein, 1371 aa, Artificial Sequence
  SARS-CoV-2/Iceland/189/2020__EPI_ISL_417709 spike protein (1-1211)(I712C_T1077C) LumSynth construct
MFVFLVLLPLVSSQCVNLTTRTQLPPAYTNSFTRGVYYPDKVFRSSVLHSTQDLFLPFFSNVTWFHAIHVSGTNGTKRFDNPVLPFNDGVYFASTEKSNIIRGWIFGTTLDSKTQSLLIVNNATNVVIKVCEFQFCNDPFLGVYYHKNNKSWMESEFRVYSSANNCTFEYVSQPFLMDLEGKQGNFKNLREFVFKNIDGYFKIYSKHTPINLVRDLPQGFSALEPLVDLPIGINITRFQTLLALHRSYLTPGDSSSGWTAGAAAYYVGYLQPRTFLLKYNENGTITDAVDCALDPLSETKCTLKSFTVEKGIYQTSNFRVQPTESIVRFPNITNLCPFGEVFNATRFASVYAWNRKRISNCVADYSVLYNSASFSTFKCYGVSPTKLNDLCFTNVYADSFVIRGDEVRQIAPGQTGKIADYNYKLPDDFTGCVIAWNSNNLDSKVGGNYNYLYRLFRKSNLKPFERDISTEIYQAGSTPCNGVEGFNCYFPLQSYGFQPTNGVGYQPYRVVVLSFELLHAPATVCGPKKSTNLVKNKCVNFNFNGLTGTGVLTESNKKFLPFQQFGRDIADTTDAVRDPQTLEILDITPCSFGGVSVITPGTNTSNQVAVLYQGVNCTEVPVAIHADQLTPTWRVYSTGSNVFQTRAGCLIGAEHVNNSYECDIPIGAGICASYQTQTNSPRRARSVASQSIIAYTMSLGAENSVAYSNNSCAIPTNFTISVTTEILPVSMTKTSVDCTMYICGDSTECSNLLLQYGSFCTQLNRALTGIAVEQDKNTQEVFAQVKQIYKTPPIKDFGGFNFSQILPDPSKPSKRSFIEDLLFNKVTLADAGFTKQYGDCLGDIAARDLICAQKFNGLTVLPPLLTDEMIAQYTSALLAGTITSGWTFGAGAALQIPFAMQMAYRFNGIGVTQNVLYENQKLIANQFNSAIGKIQDSLSSTASALGKLQDVVNQNAQALNTLVKQLSSNFGAISSVLNDILSRLDKVEAEVQIDRLITGRLQSLQTYVTQQLIRAAEIRASANLAATKMSECVLGQSKRVDFCGKGYHLMSFPQSAPHGVVFLHVTYVPAQEKNFTCAPAICHDGKAHFPREGVFVSNGTHWFVTQRNFYEPQIITTDNTFVSGNCDVVIGIVNNTVYDPLQPELDSFKEELDKYFKNHTSPDVDLGDISGINASVVNIQKEIDRLNEVAKNLNESLIDLQELGKYEQYIKGGGSGGGQIYEGKLTAEGLRFGIVASRFNHALVDRLVEGAIDAIVRHGGREEDITLVRVPGSWEIPVAAGELARKEDIDAVIAIGVLIRGATPHFDYIASEVSKGLADLSLELRKPITFGVITADTLEQAIERAGTKHGNKGWEAALSAIEMANLFKSLR

SEQ ID NO: 4010 - protein, 1371 aa, Artificial Sequence
  SARS-CoV-2/Australia/NSW56/2020__EPI_ISL_417408 spike protein (1-1211)(I712C_T1077C) LumSynth construct
MFVFLVLLPLVSSQCVNLTTRTQLPPAYTNSFTRGVYYPDKVFRSSVLHSTQDLFLPFFSNVTWFHAIHVSGTNGTKRFDNPVLPFNDGVYFASTEKSNIIRGWIFGTTLDSKTQSLLIVNNATNVVIKVCEFQFCNDPFLGVYYHKNNKSWMESEFRVYSSANNCTFEYVSQPFLMDLEGKQGNFKNLREFVFKNIDGYFKIYSKHTPINLVRDLPQGFSALEPLVDLPIGINITRFQTLLALHRSYLTPGDSSSGWTAGAAAYYVGYLQPRTFLLKYNENGTITDAVDCALDPLSETKCTLKSFTVEKGIYQTSNFRVQPTESIVRFPNITNLCPFGEVFNATRFASVYAWNRKRISNCVADYSVLYNSASFSTFKCYGVSPTKLNDLCFTNVYADSFVIRGDEVRQIAPGQTGKIADYNYKLPDDFTGCVIAWNSNNLDSKVGGNYNYLYRLFRKSNLKPFERDISTEIYQAGSTPCNGVEGFNCYFPLQSYGFQPTNGVGYQPYRVVVLSFELLHAPATVCGPKKSTNLVKNKCVNFNFNGLTGTGVLTESNKKFLPFQQFGRDIADTTDAVRDPQTLEILDITPCSFGGVSVITPGTNTSNQVAVLYQDVNCTEVPVAIHADQLTPTWRVYSTGSNVFQTRAGCLIGAEHVNNSYECDIPIGAGICASYQTQTNSPRRARSVASQSIIAYTMSLGAENSVAYSNNSCAIPTNFTISVTTEILPVSMTKTSVDCTMYICGDSTECSNLLLQYGSFCTQLNRALTGIAVEQDKNTQEVFAQVKQIYKTPPIKDFGGFNFSQILPDSSKPSKRSFIEDLLFNKVTLADAGFIKQYGDCLGDIAARDLICAQKFNGLTVLPPLLTDEMIAQYTSALLAGTITSGWTFGAGAALQIPFAMQMAYRFNGIGVTQNVLYENQKLIANQFNSAIGKIQDSLSSTASALGKLQDVVNQNAQALNTLVKQLSSNFGAISSVLNDILSRLDKVEAEVQIDRLITGRLQSLQTYVTQQLIRAAEIRASANLAATKMSECVLGQSKRVDFCGKGYHLMSFPQSAPHGVVFLHVTYVPAQEKNFTCAPAICHDGKAHFPREGVFVSNGTHWFVTQRNFYEPQIITTDNTFVSGNCDVVIGIVNNTVYDPLQPELDSFKEELDKYFKNHTSPDVDLGDISGINASVVNIQKEIDRLNEVAKNLNESLIDLQELGKYEQYIKGGGSGGGQIYEGKLTAEGLRFGIVASRFNHALVDRLVEGAIDAIVRHGGREEDITLVRVPGSWEIPVAAGELARKEDIDAVIAIGVLIRGATPHFDYIASEVSKGLADLSLELRKPITFGVITADTLEQAIERAGTKHGNKGWEAALSAIEMANLFKSLR

SEQ ID NO: 4011 - protein, 1371 aa, Artificial Sequence
  SARS-CoV-2/Iceland/280/2020__EPI_ISL_417608 spike protein (1-1211)(I712C_T1077C) LumSynth construct
MFVFLVLLPLVSSQCVNLTTRTQLPPAYTNSFTRGVYYPDKVFRSSVLHSTQDLFLPFFSNVTWFHAIHVSGTNGTKRFDNPVLPFNDGVYFASTEKSNIIRGWIFGTTLDSKTQSLLIVNNATNVVIKVCEFQFCNDPFLGVYYHKNNKSWMESEFRVYSSANNCTFEYVSQPFLMDLEGKQGNFKNLREFVFKNIDGYFKIYSKHTPINLVRDLPQGFSALEPLVDLPIGINITRFQTLLALHRSYLTPGDSSSGWTAGAAAYYVGYLQPRTFLLKYNENGTITDAVDCALDPLSETKCTLKSFTVEKGIYQTSNFRVQPTESIVRFPNITNLCPFGEVFNATRFASVYAWNRKRISNCVADYSVLYNSASFSTFKCYGVSPTKLNDLCFTNVYADSFVIRGDEVRQIAPGQTGKIADYNYKLPDDFTGCVIAWNSNNLDSKVGGNYNYLYRLFRKSNLKPFERDISTEIYQAGSTPCNGVEGFNCYFPLQSYGFQPTNGVGYQPYRVVVLSFELLHAPATVCGPKKSTNLVKNKCVNFNFNGLTGTGVLTESNKKFLPFQQFGRDIADTTDAVRDPQTLEILDITPCSFGGVSVITPGTNTSNQVAVLYQGVNCTEVPVAIHADQLTPTWRVYSTGSNVFQTRAGCLIGAEHVNNSYECDIPIGAGICASYHTQTNSPRRARSVASQSIIAYTMSLGAENSVAYSNNSCAIPTNFTISVTTEILPVSMTKTSVDCTMYICGDSTECSNLLLQYGSFCTQLNRALTGIAVEQDKNTQEVFAQVKQIYKTPPIKDFGGFNFSQILPDPSKPSKRSFIEDLLFNKVTLADAGFIKQYGDCLGDIAARDLICAQKFNGLTVLPPLLTDEMIAQYTSALLAGTITSGWTFGAGAALQIPFAMQMAYRFNGIGVTQNVLYENQKLIANQFNSAIGKIQDSLSSTASALGKLQDVVNQNAQALNTLVKQLSSNFGAISSVLNDILSRLDKVEAEVQIDRLITGRLQSLQTYVTQQLIRAAEIRASANLAATKMSECVLGQSKRVDFCGKGYHLMSFPQSAPHGVVFLHVTYVPAQEKNFTCAPAICHDGKAHFPREGVFVSNGTHWFVTQRNFYEPQIITTDNTFVSGNCDVVIGIVNNTVYDPLQPELDSFKEELDKYFKNHTSPDVDLGDISGINASVVNIQKEIDRLNEVAKNLNESLIDLQELGKYEQYIKGGGSGGGQIYEGKLTAEGLRFGIVASRFNHALVDRLVEGAIDAIVRHGGREEDITLVRVPGSWEIPVAAGELARKEDIDAVIAIGVLIRGATPHFDYIASEVSKGLADLSLELRKPITFGVITADTLEQAIERAGTKHGNKGWEAALSAIEMANLFKSLR

SEQ ID NO: 4012 - protein, 1371 aa, Artificial Sequence; identical to SEQ ID NO: 3967
  SARS-CoV-2/Iceland/247/2020__EPI_ISL_417575 spike protein (1-1211)(I712C_T1077C) LumSynth construct

SEQ ID NO: 4013 - protein, 1371 aa, Artificial Sequence
  SARS-CoV-2/Iceland/238/2020__EPI_ISL_417566 spike protein (1-1211)(I712C_T1077C) LumSynth construct
MFVFLVLLPLVSSQCVNLTTRTQLPPAYTNSFTRGVYYPDKVFRSSVLHSTQDLFLPFFSNVTWFHAIHVSGTNGTKRFDNPVLPFNDGVYFASTEKSNIIRGWIFGTTLDSKTQSLLIVNNATNVVIKVCEFQFCNDPFLGVYYHKNNKSWMESEFRVYSSANNCTFEYVSQPFLMDLEGKQGNFKNLREFVFKNIDGYFKIYSKHTPINLVRDLPQGFSALEPLVDLPIGINITRFQTLLALHRSYLTPGDSSSGWTAGAAAYYVGYLQPRTFLLKYNENGTITDAVDCALDPLSETKCTLKSFTVEKGIYQTSNFRVQPTESIVRFPNITNLCPFGEVFNATRFASVYAWNRKRISNCVADYSVLYNSASFSTFKCYGVSPTKLNDLCFTNVYADSFVIRGDEVRQIAPGQTGKIADYNYKLPDDFTGCVIAWNSNNLDSKVGGNYNYLYRLFRKSNLKPFERDISTEIYQAGSTPCNGVEGFNCYFPLQSYGFQPTNGVGYQPYRVVVLSFELLHAPATVCGPKKSTNLVKNKCVNFNFNGLTGTGVLTESNKKFLPFQQFGRDIADTTDAVRDPQTLEILDITPCSFGGVSVITPGTNTSNQVAVLYQGVNCTEVPVAIHADQLTPTWRVYSTGSNVFQTRAGCLIGAEHVNNSYECDIPIGAGICASYQTQTNSPRRARSVASQSIIAYTMSLGAENSVAYSNNSCAIPTNFTISVTTEILPVSMTKTSVDCTMYICGDSTECSNLLLQYGSFCTQLNRALTGIAVEQDKNTQEVFAQVKQIYKTPPIKDFGGFNFSQILPDPSKPSKRSFIEDLLFNKVTLADVGFIKQYGDCLGDIAARDLICAQKFNGLTVLPPLLTDEMIAQYTSALLAGTITSGWTFGAGAALQIPFAMQMAYRFNGIGVTQNVLYENQKLIANQFNSAIGKIQDSLSSTASALGKLQDVVNQNAQALNTLVKQLSSNFGAISSVLNDILSRLDKVEAEVQIDRLITGRLQSLQTYVTQQLIRAAEIRASANLAATKMSECVLGQSKRVDFCGKGYHLMSFPQSAPHGVVFLHVTYVPAQEKNFTCAPAICHDGKAHFPREGVFVSNGTHWFVTQRNFYEPQIITTDNTFVSGNCDVVIGIVNNTVYDPLQPELDSFKEELDKYFKNHTSPDVDLGDISGINASVVNIQKEIDRLNEVAKNLNESLIDLQELGKYEQYIKGGGSGGGQIYEGKLTAEGLRFGIVASRFNHALVDRLVEGAIDAIVRHGGREEDITLVRVPGSWEIPVAAGELARKEDIDAVIAIGVLIRGATPHFDYIASEVSKGLADLSLELRKPITFGVITADTLEQAIERAGTKHGNKGWEAALSAIEMANLFKSLR

SEQ ID NO: 4014 - protein, 1371 aa, Artificial Sequence
  SARS-CoV-2/Greece/16/2020__EPI_ISL_418265 spike protein (1-1211)(I712C_T1077C) LumSynth construct
MFVFLVLLPLVSSQCVNLTTRTQLPPAYTNSFTRGVYYPDKVFRSSVLHSTQDLFLPFFSNVTWFHAIHVSGTNGTKRFDNPVLPFNDGVYFASTEKSNIIRGWIFGTTLDSKTQSLLIVNNATNVVIKVCEFQFCNDPFLGVYYHKNNKSWMESEFRVYSSANNCTFEYVSQPFLMDLEGKQGNFKNLREFVFKNVDGYFKIYSKHTPINLVRDLPQGFSALEPLVDLPIGINITRFQTLLALHRSYLTPGDSSSGWTAGAAAYYVGYLQPRTFLLKYNENGTITDAVDCALDPLSETKCTLKSFTVEKGIYQTSNFRVQPTESIVRFPNITNLCPFGEVFNATRFASVYAWNRKRISNCVADYSVLYNSASFSTFKCYGVSPTKLNDLCFTNVYADSFVIRGDEVRQIAPGQTGKIADYNYKLPDDFTGCVIAWNSNNLDSKVGGNYNYLYRLFRKSNLKPFERDISTEIYQAGSTPCNGVEGFNCYFPLQSYGFQPTNGVGYQPYRVVVLSFELLHAPATVCGPKKSTNLVKNKCVNFNFNGLTGTGVLTESNKKFLPFQQFGRDIADTTDAVRDPQTLEILDITPCSFGGVSVITPGTNTSNQVAVLYQDVNCTEVPVAIHADQLTPTWRVYSTGSNVFQTRAGCLIGAEHVNNSYECDIPIGAGICASYQTQTNSPRRARSVASQSIIAYTMSLGAENSVAYSNNSCAIPTNFTISVTTEILPVSMTKTSVDCTMYICGDSTECSNLLLQYGSFCTQLNRALTGIAVEQDKNTQEVFAQVKQIYKTPPIKDFGGFNFSQILPDPSKPSKRSFIEDLLFNKVTLADAGFIKQYGDCLGDIAARDLICAQKFNGLTVLPPLLTDEMIAQYTSALLAGTITSGWTFGAGAALQIPFAMQMAYRFNGIGVTQNVLYENQKLIANQFNSAIGKIQDSLSSTASALGKLQDVVNQNAQALNTLVKQLSSNFGAISSVLNDILSRLDKVEAEVQIDRLITGRLQSLQTYVTQQLIRAAEIRASANLAATKMSECVLGQSKRVDFCGKGYHLMSFPQSAPHGVVFLHVTYVPAQEKNFTCAPAICHDGKAHFPREGVFVSNGTHWFVTQRNFYEPQIITTDNTFVSGNCDVVIGIVNNTVYDPLQPELDSFKEELDKYFKNHTSPDVDLGDISGINASVVNIQKEIDRLNEVAKNLNESLIDLQELGKYEQYIKGGGSGGGQIYEGKLTAEGLRFGIVASRFNHALVDRLVEGAIDAIVRHGGREEDITLVRVPGSWEIPVAAGELARKEDIDAVIAIGVLIRGATPHFDYIASEVSKGLADLSLELRKPITFGVITADTLEQAIERAGTKHGNKGWEAALSAIEMANLFKSLR

SEQ ID NO: 4015 - protein, 1371 aa, Artificial Sequence
  SARS-CoV-2/Iceland/319/2020__EPI_ISL_417648 spike protein (1-1211)(I712C_T1077C) LumSynth construct
MFVFLVLLPLVSSQCVNLTTRTQLPPAYTNSFTRGVYYPDKVFRSSVLHSTQDLFLPFFSNVTWFHAIHVSGTNGTKRFDNPVLPFNDGVYFASTEKSNIIRGWIFGTTLDSKTQSLLIVNNATNVVIKVCEFQFCNDPFLGVYYHKNNKSWMESEFRVYSSANNCTFEYVSQPFLIDLEGKQGNFKNLREFVFKNIDGYFKIYSKHTPINLVRDLPQGFSALEPLVDLPIGINITRFQTLLALHRSYLTPGDSSSGWTAGAAAYYVGYLQPRTFLLKYNENGTITDAVDCALDPLSETKCTLKSFTVEKGIYQTSNFRVQPTESIVRFPNITNLCPFGEVFNATRFASVYAWNRKRISNCVADYSVLYNSASFSTFKCYGVSPTKLNDLCFTNVYADSFVIRGDEVRQIAPGQTGKIADYNYKLPDDFTGCVIAWNSNNLDSKVGGNYNYLYRLFRKSNLKPFERDISTEIYQAGSTPCNGVEGFNCYFPLQSYGFQPTNGVGYQPYRVVVLSFELLHAPATVCGPKKSTNLVKNKCVNFNFNGLTGTGVLTESNKKFLPFQQFGRDIADTTDAVRDPQTLEILDITPCSFGGVSVITPGTNTSNQVAVLYQGVNCTEVPVAIHADQLTPTWRVYSTGSNVFQTRAGCLIGAEHVNNSYECDIPIGAGICASYQTQTNSPRRARSVASQSIIAYTMSLGAENSVAYSNNSCAIPTNFTISVTTEILPVSMTKTSVDCTMYICGDSTECSNLLLQYGSFCTQLNRALTGIAVEQDKNTQEVFAQVKQIYKTPPIKDFGGFNFSQILPDPSKPSKRSFIEDLLFNKVTLADAGFIKQYGDCLGDIAARDLICAQKFNGLTVLPPLLTDEMIAQYTSALLAGTITSGWTFGAGAALQIPFAMQMAYRFNGIGVTQNVLYENQKLIANQFNSAIGKIQDSLSSTASALGKLQDVVNQNAQALNTLVKQLSSNFGAISSVLNDILSRLDKVEAEVQIDRLITGRLQSLQTYVTQQLIRAAEIRASANLAATKMSECVLGQSKRVDFCGKGYHLMSFPQSAPHGVVFLHVTYVPAQEKNFTCAPAICHDGKAHFPREGVFVSNGTHWFVTQRNFYEPQIITTDNTFVSGNCDVVIGIVNNTVYDPLQPELDSFKEELDKYFKNHTSPDVDLGDISGINASVVNIQKEIDRLNEVAKNLNESLIDLQELGKYEQYIKGGGSGGGQIYEGKLTAEGLRFGIVASRFNHALVDRLVEGAIDAIVRHGGREEDITLVRVPGSWEIPVAAGELARKEDIDAVIAIGVLIRGATPHFDYIASEVSKGLADLSLELRKPITFGVITADTLEQAIERAGTKHGNKGWEAALSAIEMANLFKSLR

SEQ ID NO: 4016 - protein, 1371 aa, Artificial Sequence
  SARS-CoV-2/Congo/94/2020__EPI_ISL_417947 spike protein (1-1211)(I712C_T1077C) LumSynth construct
MFVFLVLLPLVSSQCVNLTTRTQLPPAYTNSFTRGVYYPDKVFRSSVLHSTQDLFLPFFSNVTWFHAIHVSGTNGTKRFDNPVLPFNDGVYFASTEKSNIIRGWIFGTTLDSKTQSLLIVNNATNVVIKVCEFQFCNDPFLGVYYHKNNKSWMESEFRVYSSANNCTFEYVSQPFLMDLEGKQGNFKNLREFVFKNIDGYFKIYSKHTPINLVRDLPQGFSALEPLVDLPIGINITRFQTLLALHRSYLTPGDSSSGWTAGAAAYYVGYLQPRTFLLKYNENGTITDAVDCALDPLSETKCTLKSFTVEKGIYQTSNFRVQPTESIVRFPNITNLCPFGEVFNATRFASVYAWNRKRISNCVADYSVLYNSASFSTFKCYGVSPTKLNDLCFTNVYADSFVIRGDEVRQIAPGQTGKIADYNYKLPDDFTGCVIAWNSNNLDSKVGGNYNYLYRLFRKSNLKPFERDISTEIYQAGSTPCNGVEGFNCYFPLQSYGFQPTNGVGYQPYRVVVLSFELLHAPATVCGPKKSTNLVKNKCVNFNFNGLTGTGVLTESNKKFLPFQQFGRDIADTTDAVRDPQTLEILDITPCSFGGVSVITPGTNTSNQVAVLYQGVNCTEVPVAIHADQLTPTWRVYSTGSNVFQTRAGCLIGAEHVNNSYECDIPIGAGICASYQTQTNSPRRARSVASQSIIAYTMSLGAENSVAYSNNSCAIPTNFTISVTTEILPVSMTKTSVDCTMYICGDSTECSNLLLQYGSFCTQLNRALTGIAVEQDKNTQEVFAQVKQIYKTPPIKDFGGFNFSQILPDPSKPSKRSFIEDILFNKVTLADAGFIKQYGDCLGDIAARDLICAQKFNGLTVLPPLLTDEMIAQYTSALLAGTITSGWTFGAGAALQIPFAMQMAYRFNGIGVTQNVLYENQKLIANQFNSAIGKIQDSLSSTASALGKLQDVVNQNAQALNTLVKQLSSNFGAISSVLNDILSRLDKVEAEVQIDRLITGRLQSLQTYVTQQLIRAAEIRASANLAATKMSECVLGQSKRVDFCGKGYHLMSFPQSAPHGVVFLHVTYVPAQEKNFTCAPAICHDGKAHFPREGVFVSNGTHWFVTQRNFYEPQIITTDNTFVSGNCDVVIGIVNNTVYDPLQPELDSFKEELDKYFKNHTSPDVDLGDISGINASVVNIQKEIDRLNEVAKNLNESLIDLQELGKYEQYIKGGGSGGGQIYEGKLTAEGLRFGIVASRFNHALVDRLVEGAIDAIVRHGGREEDITLVRVPGSWEIPVAAGELARKEDIDAVIAIGVLIRGATPHFDYIASEVSKGLADLSLELRKPITFGVITADTLEQAIERAGTKHGNKGWEAALSAIEMANLFKSLR

SEQ ID NO: 4017 - protein, 1371 aa, Artificial Sequence
  SARS-CoV-2/Congo/158/2020__EPI_ISL_417950 spike protein (1-1211)(I712C_T1077C) LumSynth construct
MFVFLVLLPLVSSQCVNLTTRTQLPPAYTNSFTRGVYYPDKVFRSSVLHSTQDLFLPFFSNVTWFHAIHVSGTNGTKRFDNPVLPFNDGVYFASTEKSNIIRGWIFGTTLDSKTQSLLIVNNATNVVIKVCEFQFCNDPFLGVYYHKNNKSWMESEFRVYSSANNCTFEYVSQPFLMDLEGKQGNFKNLREFVFKNIDGYFKIYSKHTPINLVRDLPQGFSALEPLVDLPIGINITRFQTLLALHRSYLTPGDSSSGWTAGAAAYYVGYLQPRTFLLKYNENGTITDAVDCALDPLSETKCTLKSFTVEKGIYQTSNFRVQPTESIVRFPNITNLCPFGEVFNATRFASVYAWNRKRISNCVADYSVLYNSASFSTFKCYGVSPTKLNDLCFTNVYADSFVIRGDEVRQIAPGQTGKIADYNYKLPDDFTGCVIAWNSNNLDSKVGGNYNYLYRLFRKSNLKPFERDISTEIYQAGSTPCNGVEGFNCYFPLQSYGFQPTNGVGYQPYRVVVLSFELLHAPATVCGPKKSTNLVKNKCVNFNFNGLTGTGVLTESNKKFLPFQQFGRDIADTTDAVRDPQTLEILDITPCSFGGVSVITPGTNTSNQVAVLYQDVNCTEVPVAIHADQLTPTWRVYSTGSNVFQTRAGCLIGAEHVNNSYECDIPIGAGICASYQTQTNSPRRARSVASQSIIAYTMSLGAENSVAYSNNSCAIPTNFTISVTTEILPVSMTKTSVDCTMYICGDSTECSNLLLQYGSFCTQLNRALTGIAVEQDKNTQEVFAQVKQIYKTPPIKDFGGFNFSQILPDPSKPSKRSFIEDLLFNKVTLADAGFIKQYGDCLGDIAARDLICAQKFNGLTVLPPLLTDEMIAQYTSALLAGTITSGWTFGAGAALQIPFAMQMAYRFNGIGVTQNVLYENQKLIANQFNSAIGKIQDSLSSTASALGKLQDVVNQNAQALNTLVKQLSSNFGAISSVLNDILSRLDKVEAEVQIDRLITGRLQSLQTYVTQQLIRAAEIRASANLAATKMSECVLGQSKRVDFCGKGYHLMSFPQSAPHGVVFLHVTYVPAQEKNFTCAPAICHDGKAHFPREGVFVSNGTHWFVTQRNFYEPQIITTDNTFLSGNCDVVIGIVNNTVYDPLQPELDSFKEELDKYFKNHTSPDVDLGDISGINASVVNIQKEIDRLNEVAKNLNESLIDLQELGKYEQYIKGGGSGGGQIYEGKLTAEGLRFGIVASRFNHALVDRLVEGAIDAIVRHGGREEDITLVRVPGSWEIPVAAGELARKEDIDAVIAIGVLIRGATPHFDYIASEVSKGLADLSLELRKPITFGVITADTLEQAIERAGTKHGNKGWEAALSAIEMANLFKSLR

SEQ ID NO: 4018 - protein, 1371 aa, Artificial Sequence
  SARS-CoV-2/USA/UT-00034/2020__EPI_ISL_417977 spike protein (1-1211)(I712C_T1077C) LumSynth construct
MFVFLVLLPLVSSQCVNLTTRTQLPPAYTNSFTRGVYYPDKVFRSSVLHSTQDLFLPFFSNVTWFHAIHVSGTNGTKRFDNPVLPFNDGVYFASTEKSNIIRGWIFGTTLDSKTQSLLIVNNATNVVIKVCEFQFCNDPFLGVYYYKNNKSWMESEFRVYSSANNCTFEYVSQPFLMDLEGKQGNFKNLREFVFKNIDGYFKIYSKHTPINLVRDLPQGFSALEPLVDLPIGINITRFQTLLALHRSYLTPGDSSSGWTAGAAAYYVGYLQPRTFLLKYNENGTITDAVDCALDPLSETKCTLKSFTVEKGIYQTSNFRVQPTESIVRFPNITNLCPFGEVFNATRFASVYAWNRKRISNCVADYSVLYNSASFSTFKCYGVSPTKLNDLCFTNVYADSFVIRGDEVRQIAPGQTGKIADYNYKLPDDFTGCVIAWNSNNLDSKVGGNYNYLYRLFRKSNLKPFERDISTEIYQAGSTPCNGVEGFNCYFPLQSYGFQPTNGVGYQPYRVVVLSFELLHAPATVCGPKKSTNLVKNKCVNFNFNGLTGTGVLTESNKKFLPFQQFGRDIADTTDAVRDPQTLEILDITPCSFGGVSVITPGTNTSNQVAVLYQGVNCTEVPVAIHADQLTPTWRVYSTGSNVFQTRAGCLIGAEHVNNSYECDIPIGAGICASYQTQTNSPRRARSVASQSIIAYTMSLGAENSVAYSNNSCAIPTNFTISVTTEILPVSMTKTSVDCTMYICGDSTECSNLLLQYGSFCTQLNRALTGIAVEQDKNTQEVFAQVKQIYKTPPIKDFGGFNFSQILPDPSKPSKRSFIEDLLFNKVTLADAGFIKQYGDCLGDIAARDLICAQKFNGLTVLPPLLTDEMIAQYTSALLAGTITSGWTFGAGAALQIPFAMQMAYRFNGIGVTQNVLYENQKLIANQFNSAIGKIQDSLSSTASALGKLQDVVNQNAQALNTLVKQLSSNFGAISSVLNDILSRLDKVEAEVQIDRLITGRLQSLQTYVTQQLIRAAEIRASANLAATKMSECVLGQSKRVDFCGKGYHLMSFPQSAPHGVVFLHVTYVPAQEKNFTCAPAICHDGKAHFPREGVFVSNGTHWFVTQRNFYEPQIITTDNTFVSGNCDVVIGIVNNTVYDPLQPELDSFKEELDKYFKNHTSPDVDLGDISGINASVVNIQKEIDRLNEVAKNLNESLIDLQELGKYEQYIKGGGSGGGQIYEGKLTAEGLRFGIVASRFNHALVDRLVEGAIDAIVRHGGREEDITLVRVPGSWEIPVAAGELARKEDIDAVIAIGVLIRGATPHFDYIASEVSKGLADLSLELRKPITFGVITADTLEQAIERAGTKHGNKGWEAALSAIEMANLFKSLR

SEQ ID NO: 4019 - protein, 1371 aa, Artificial Sequence
  SARS-CoV-2/USA/UT-00033/2020__EPI_ISL_417976 spike protein (1-1211)(I712C_T1077C) LumSynth construct
MFVFLVLLPLVSSQCVNLTTRTQLPPAYTNSFTRGVYYPDKVFRSSVLHSTQDLFLPFFSNVTWFHAIHVSGTNGTKRFDNPVLPFNDGVYFASTEKSNIIRGWIFGTTLDSKTQSLLIVNNATNVVIKVCEFQFCNDPFLGVYYHKNNKSWMESEFRVYSSANNCTFEYVSQPFLMDLEGKQGNFKNLREFVFKNIDGYFKIYSKHTPINLVRDLPQGFSALEPLVDLPIGINITRFQTLLALHRSYLTPGDSSSGLTAGAAAYYVGYLQPRTFLLKYNENGTITDAVDCALDPLSETKCTLKSFTVEKGIYQTSNFRVQPTESIVRFPNITNLCPFGEVFNATRFASVYAWNRKRISNCVADYSVLYNSASFSTFKCYGVSPTKLNDLCFTNVYADSFVIRGDEVRQIAPGQTGKIADYNYKLPDDFTGCVIAWNSNNLDSKVGGNYNYLYRLFRKSNLKPFERDISTEIYQAGSTPCNGVEGFNCYFPLQSYGFQPTNGVGYQPYRVVVLSFELLHAPATVCGPKKSTNLVKNKCVNFNFNGLTGTGVLTESNKKFLPFQQFGRDIADTTDAVRDPQTLEILDITPCSFGGVSVITPGTNTSNQVAVLYQGVNCTEVPVAIHADQLTPTWRVYSTGSNVFQTRAGCLIGAEHVNNSYECDIPIGAGICASYQTQTNSPRRARSVASQSIIAYTMSLGAENSVAYSNNSCAIPTNFTISVTTEILPVSMTKTSVDCTMYICGDSTECSNLLLQYGSFCTQLNRALTGIAVEQDKNTQEVFAQVKQIYKTPPIKDFGGFNFSQILPDPSKPSKRSFIEDLLFNKVTLADAGFIKQYGDCLGDIAARDLICAQKFNGLTVLPPLLTDEMIAQYTSALLAGTITSGWTFGAGAALQIPFAMQMAYRFNGIGVTQNVLYENQKLIANQFNSAIGKIQDSLSSTASALGKLQDVVNQNAQALNTLVKQLSSNFGAISSVLNDILSRLDKVEAEVQIDRLITGRLQSLQTYVTQQLIRAAEIRASANLAATKMSECVLGQSKRVDFCGKGYHLMSFPQSAPHGVVFLHVTYVPAQEKNFTCAPAICHDGKAHFPREGVFVSNGTHWFVTQRNFYEPQIITTDNTFVSGNCDVVIGIVNNTVYDPLQPELDSFKEELDKYFKNHTSPDVDLGDISGINASVVNIQKEIDRLNEVAKNLNESLIDLQELGKYEQYIKGGGSGGGQIYEGKLTAEGLRFGIVASRFNHALVDRLVEGAIDAIVRHGGREEDITLVRVPGSWEIPVAAGELARKEDIDAVIAIGVLIRGATPHFDYIASEVSKGLADLSLELRKPITFGVITADTLEQAIERAGTKHGNKGWEAALSAIEMANLFKSLR

SEQ ID NO: 4020 - protein, 1371 aa, Artificial Sequence
  SARS-CoV-2/USA/WI-13/2020__EPI_ISL_417516 spike protein (1-1211)(I712C_T1077C) LumSynth construct
MFVFLVLLPLVSSQCVNLTTRTQLPPAYTNSFTRGVYYPDKVFRSSVLHSTQDLFLPFFSNVTWFHAIHVSGTNGTKRFDNPVLPFNDGVYFASTEKSNIIRGWIFGTTLDSKTQSLLIVNNATNVVIKVCEFQFCNDPFLGVYYHKNNKSWMESEFRVYSSANNCTFEYVSQPFLMDLEGKQGNFKNLREFVFKNIDGYFKIYSKHTPINLVRDLPQGFSALEPLVDLPIGINITRFQTLLALHRSYLTPGDSSSGWTAGAAAYYVGYLQPRTFLLKYNENGTITDAVDCALDPLSETKCTLKSFTVEKGIYQTSNFRVLPTESIVRFPNITNLCPFGEVFNATRFASVYAWNRKRISNCVADYSVLYNSASFSTFKCYGVSPTKLNDLCFTNVYADSFVIRGDEVRQIAPGQTGKIADYNYKLPDDFTGCVIAWNSNNLDSKVGGNYNYLYRLFRKSNLKPFERDISTEIYQAGSTPCNGVEGFNCYFPLQSYGFQPTNGVGYQPYRVVVLSFELLHAPATVCGPKKSTNLVKNKCVNFNFNGLTGTGVLTESNKKFLPFQQFGRDIADTTDAVRDPQTLEILDITPCSFGGVSVITPGTNTSNQVAVLYQGVNCTEVPVAIHADQLTPTWRVYSTGSNVFQTRAGCLIGAEHVNNSYECDIPIGAGICASYQTQTNSPRRARSVASQSIIAYTMSLGAENSVAYSNNSCAIPTNFTISVTTEILPVSMTKTSVDCTMYICGDSTECSNLLLQYGSFCTQLNRALTGIAVEQDKNTQEVFAQVKQIYKTPPIKDFGGFNFSQILPDPSKPSKRSFIEDLLFNKVTLADAGFIKQYGDCLGDIAARDLICAQKFNGLTVLPPLLTDEMIAQYTSALLAGTITSGWTFGAGAALQIPFAMQMAYRFNGIGVTQNVLYENQKLIANQFNSAIGKIQDSLSSTASALGKLQDVVNQNAQALNTLVKQLSSNFGAISSVLNDILSRLDKVEAEVQIDRLITGRLQSLQTYVTQQLIRAAEIRASANLAATKMSECVLGQSKRVDFCGKGYHLMSFPQSAPHGVVFLHVTYVPAQEKNFTCAPAICHDGKAHFPREGVFVSNGTHWFVTQRNFYEPQIITTDNTFVSGNCDVVIGIVNNTVYDPLQPELDSFKEELDKYFKNHTSPDVDLGDISGINASVVNIQKEIDRLNEVAKNLNESLIDLQELGKYEQYIKGGGSGGGQIYEGKLTAEGLRFGIVASRFNHALVDRLVEGAIDAIVRHGGREEDITLVRVPGSWEIPVAAGELARKEDIDAVIAIGVLIRGATPHFDYIASEVSKGLADLSLELRKPITFGVITADTLEQAIERAGTKHGNKGWEAALSAIEMANLFKSLR

SEQ ID NO: 4021 - protein, 1370 aa, Artificial Sequence
  SARS-CoV-2/India/1-27/2020__EPI_ISL_413522 spike protein (1-1210)(I711C_T1076C) LumSynth construct
MFVFLVLLPLVSSQCVNLTTRTQLPPAYTNSFTRGVYYPDKVFRSSVLHSTQDLFLPFFSNVTWFHAIHVSGTNGTKRFDNPVLPFNDGVYFASTEKSNIIRGWIFGTTLDSKTQSLLIVNNATNVVIKVCEFQFCNDPFLGVYHKNNKSWMESEFRVYSSANNCTFEYVSQPFLMDLEGKQGNFKNLREFVFKNIDGYFKIYSKHTPINLVRDLPQGFSALEPLVDLPIGINITRFQTLLALHRSYLTPGDSSSGWTAGAAAYYVGYLQPRTFLLKYNENGTITDAVDCALDPLSETKCTLKSFTVEKGIYQTSNFRVQPTESIVRFPNITNLCPFGEVFNATRFASVYAWNRKRISNCVADYSVLYNSASFSTFKCYGVSPTKLNDLCFTNVYADSFVIRGDEVIQIAPGQTGKIADYNYKLPDDFTGCVIAWNSNNLDSKVGGNYNYLYRLFRKSNLKPFERDISTEIYQAGSTPCNGVEGFNCYFPLQSYGFQPTNGVGYQPYRVVVLSFELLHAPATVCGPKKSTNLVKNKCVNFNFNGLTGTGVLTESNKKFLPFQQFGRDIADTTDAVRDPQTLEILDITPCSFGGVSVITPGTNTSNQVAVLYQDVNCTEVPVAIHADQLTPTWRVYSTGSNVFQTRAGCLIGAEHVNNSYECDIPIGAGICASYQTQTNSPRRARSVASQSIIAYTMSLGAENSVAYSNNSCAIPTNFTISVTTEILPVSMTKTSVDCTMYICGDSTECSNLLLQYGSFCTQLNRALTGIAVEQDKNTQEVFAQVKQIYKTPPIKDFGGFNFSQILPDPSKPSKRSFIEDLLFNKVTLADAGFIKQYGDCLGDIAARDLICAQKFNGLTVLPPLLTDEMIAQYTSALLAGTITSGWTFGAGAALQIPFAMQMAYRFNGIGVTQNVLYENQKLIANQFNSAIGKIQDSLSSTASALGKLQDVVNQNAQALNTLVKQLSSNFGAISSVLNDILSRLDKVEAEVQIDRLITGRLQSLQTYVTQQLIRAAEIRASANLAATKMSECVLGQSKRVDFCGKGYHLMSFPQSAPHGVVFLHVTYVPAQEKNFTCAPAICHDGKAHFPREGVFVSNGTHWFVTQRNFYEPQIITTDNTFVSGNCDVVIGIVNNTVYDPLQPELDSFKEELDKYFKNHTSPDVDLGDISGINASVVNIQKEIDRLNEVAKNLNESLIDLQELGKYEQYIKGGGSGGGQIYEGKLTAEGLRFGIVASRFNHALVDRLVEGAIDAIVRHGGREEDITLVRVPGSWEIPVAAGELARKEDIDAVIAIGVLIRGATPHFDYIASEVSKGLADLSLELRKPITFGVITADTLEQAIERAGTKHGNKGWEAALSAIEMANLFKSLR

SEQ ID NO: 4022 - protein, 1365 aa, Artificial Sequence
  SARS-CoV-2/pangolin/Guangxi/P4L/2017__EPI_ISL_410538 spike protein (1-1205)(I706C_T1071C) LumSynth construct
MFVFLFVLPLVSSQCVNLTTRTGIPPGYTNSSTRGVYYPDKVFRSSILHLTQDLFLPFFSNVTWFNTINYQGGFKKFDNPVLPFNDGVYFASTEKSNIIRGWIFGTTLDARTQSLLIVNNATNVVIKVCEFQFCTDPFLGVYYHNNNKTWVENEFRVYSSANNCTFEYISQPFLMDLEGKQGNFKNLREFVFKNVDGYFKIYSKHTPIDLVRDLPRGFAALEPLVDLPIGINITRFQTLLALHRSYLTPGNLESGWTTGAAAYYVGYLQQRTFLLSYNQNGTITDAVDCSLDPLSETKCTLKSLTVEKGIYQTSNFRVQPTISIVRFPNITNLCPFGEVFNASKFASVYAWNRKRISNCVADYSVLYNSTSFSTFKCYGVSPTKLNDLCFTNVYADSFVVKGDEVRQIAPGQTGVIADYNYKLPDDFTGCVIAWNSVKQDALTGGNYGYLYRLFRKSKLKPFERDISTEIYQAGSTPCNGQVGLNCYYPLERYGFHPTTGVNYQPFRVVVLSFELLNGPATVCGPKLSTTLVKDKCVNFNFNGLTGTGVLTTSKKQFLPFQQFGRDISDTTDAVRDPQTLEILDITPCSFGGVSVITPGTNTSNQVAVLYQDVNCTEVPMAIHAEQLTPAWRVYSAGANVFQTRAGCLVGAEHVNNSYECDIPVGAGICASYHSMSSLRSVNQRSIIAYTMSLGAENSVAYSNNSCAIPTNFTISVTTEILPVSMTKTSVDCTMYICGDSIECSNLLLQYGSFCTQLNRALTGIAVEQDKNTQEVFAQVKQIYKTPPIKDFGGFNFSQILPDPSKPSKRSFIEDLLFNKVTLADAGFIKQYGDCLGDIAARDLICAQKFNGLTVLPPLLTDEMIAQYTSALLAGTITSGWTFGAGAALQIPFAMQMAYRFNGIGVTQNVLYENQKLIANQFNSAIGKIQDSLSSTASALGKLQDVVNQNAQALNTLVKQLSSNFGAISSVLNDILSRLDKVEAEVQIDRLITGRLQSLQTYVTQQLIRAAEIRASANLAATKMSECVLGQSKRVDFCGKGYHLMSFPQSAPHGVVFLHVTYVPAQEKNFTCAPAICHEGKAHFPREGVFVSNGTHWFITQRNFYEPQIITTDNTFVSGSCDVVIGIVNNTVYDPLQPELDSFKEELDKYFKNHTSPDVDLGDISGINASVVNIQKEIDRLNEVAKNLNESPIDLQELGKYEQYIKGGGSGGGQIYEGKLTAEGLRFGIVASRFNHALVDRLVEGAIDAIVRHGGREEDITLVRVPGSWEIPVAAGELARKEDIDAVIAIGVLIRGATPHFDYIASEVSKGLADLSLELRKPITFGVITADTLEQAIERAGTKHGNKGWEAALSAIEMANLFKSLR

SEQ ID NO: 4023 - protein, 1365 aa, Artificial Sequence
  SARS-CoV-2/pangolin/Guangxi/P5L/2017__EPI_ISL_410540 spike protein (1-1205)(I706C_T1071C) LumSynth construct
MFVFLFVLPLVSSQCVNLTTRTGIPPGYTNSSTRGVYYPDKVFRSSILHLTQDLFLPFFSNVTWFNTINYQGGFKKFDNPVLPFNDGVYFASTEKSNIIRGWIFGTTLDARTQSLLIVNNATNVVIKVCEFQFCTDPFLGVYYHNNNKTWVENEFRVYSSANNCTFEYISQPFLMDLEGKQGNFKNLREFVFKNVDGYFKIYSKHTPIDLVRDLPRGFAALEPLVDLPIGINITRFQTLLALHRSYLTPGKLESGWTTGAAAYYVGYLQQRTFLLSYNQNGTITDAVDCSLDPLSETKCTLKSLTVEKGIYQTSNFRVQPTISIVRFPNITNLCPFGEVFNASKFASVYAWNRKRISNCVADYSVLYNSTSFSTFKCYGVSPTKLNDLCFTNVYADSFVVKGDEVRQIAPGQTGVIADYNYKLPDDFTGCVIAWNSVKQDALTGGNYGYLYRLFRKSKLKPFERDISTEIYQAGSTPCNGQVGLNCYYPLERYGFHPTTGVNYQPFRVVVLSFELLNGPATVCGPKLSTTLVKDKCVNFNFNGLTGTGVLTTSKKQFLPFQQFGRDISDTTDAVRDPQTLEILDITPCSFGGVSVITPGTNTSNQVAVLYQDVNCTEVPMAIHAEQLTPAWRVYSAGANVFQTRAGCLVGAEHVNNSYECDIPVGAGICASYHSMSSFRSVNQRSIIAYTMSLGAENSVAYSNNSCAIPTNFTISVTTEILPVSMTKTSVDCTMYICGDSIECSNLLLQYGSFCTQLNRALTGIAVEQDKNTQEVFAQVKQIYKTPPIKDFGGFNFSQILPDPSKPSKRSFIEDLLFNKVTLADAGFIKQYGDCLGDIAARDLICAQKFNGLTVLPPLLTDEMIAQYTSALLAGTITSGWTFGAGAALQIPFAMQMAYRFNGIGVTQNVLYENQKLIANQFNSAIGKIQDSLSSTASALGKLQDVVNQNAQALNTLVKQLSSNFGAISSVLNDILSRLDKVEAEVQIDRLITGRLQSLQTYVTQQLIRAAEIRASANLAATKMSECVLGQSKRVDFCGKGYHLMSFPQSAPHGVVFLHVTYVPAQEKNFTCAPAICHEGKAHFPREGVFVSNGTHWFITQRNFYEPQIITTDNTFVSGSCDVVIGIVNNTVYDPLQPELDSFKEELDKYFKNHTSPDVDLGDISGINASVVNIQKEIDRLNEVAKNLNESLIDLQELGKYEQYIKGGGSGGGQIYEGKLTAEGLRFGIVASRFNHALVDRLVEGAIDAIVRHGGREEDITLVRVPGSWEIPVAAGELARKEDIDAVIAIGVLIRGATPHFDYIASEVSKGLADLSLELRKPITFGVITADTLEQAIERAGTKHGNKGWEAALSAIEMANLFKSLR

SEQ ID NO: 4024 - protein, 1365 aa, Artificial Sequence
  SARS-CoV-2/pangolin/Guangxi/P5E/2017__EPI_ISL_410541 spike protein (1-1205)(I706C_T1071C) LumSynth construct
MFVFLFVLPLVSSQCVNLTTRTGIPPGYTNSSTRGVYYPDKVFRSSILHLTQDLFLPFFSNVTWFNTITYQGGSKKFDNPVLPFNDGVYFASTEKSNIIRGWIFGTTLDARTQSLLIVNNATNVVIKVCEFQFCTDPFLGVYYHNNNKTWVENEFRVYSSANNCTFEYISQPFLMDLEGKQGNFKNLREFVFKNVDGYFKIYSKHTPIDLVRDLPRGFAALEPLVDLPIGINITRFQTLLALHRSYLTPGKLESGWTTGAAAYYVGYLQQRTFLLSYNQNGTITDAVDCSLDPLSETKCTLKSLTVEKGIYQTSNFRVQPTISIVRFPNITNLCPFGEVFNASKFASVYAWNRKRISNCVADYSVLYNSTSFSTFKCYGVSPTKLNDLCFTNVYADSFVVKGDEVRQIAPGQTGVIADYNYKLPDDFTGCVIAWNSVKQDALTGDNYGYLYRLFRKSKLKPFERDISTEIYQAGSTPCNGQVGLNCYYPLERYGFHPTTGVNYQPFRVVVLSFELLNGPATVCGPKLSTTLVKDKCVNFNFNGLTGTGVLTTSKKQFLPFQQFGRDISDTTDAVRDPQTLEILDITPCSFGGVSVITPGTNTSNQVAVLYQDVNCTEVPMAIHAEQLTPAWRVYSAGANVFQTRAGCLVGAEHVNNSYECDIPVGAGICASYHSMSSFRSVNQRSIIAYTMSLGAENSVAYSNNSCAIPTNFTISVTTEILPVSMTKTSVDCTMYICGDSIECSNLLLQYGSFCTQLNRALTGIAVEQDKNTQEVFAQVKQIYKTPPIKDFGGFNFSQILPDPSKPSKRSFIEDLLFNKVTLADAGFIKQYGDCLGDIAARDLICAQKFNGLTVLPPLLTDEMIAQYTSALLAGTITSGWTFGAGAALQIPFAMQMAYRFNGIGVTQNVLYENQKLIANQFNSAIGKIQDSLSSTASALGKLQDVVNQNAQALNTLVKQLSSNFGAISSVLNDILSRLDKVEAEVQIDRLITGRLQSLQTYVTQQLIRAAEIRASANLAATKMSECVLGQSKRVDFCGKGYHLMSFPQSAPHGVVFLHVTYVPAQEKNFTCAPAICHEGKAHFPREGVFVSNGTHWFITQRNFYEPQIITTDNTFVSGSCDVVIGIVNNTVYDPLQPELDSFKEELDKYFKNHTSPDVDLGDISGINASVVNIQKEIDRLNEVAKNLNESLIDLQELGKYEQYIKGGGSGGGQIYEGKLTAEGLRFGIVASRFNHALVDRLVEGAIDAIVRHGGREEDITLVRVPGSWEIPVAAGELARKEDIDAVIAIGVLIRGATPHFDYIASEVSKGLADLSLELRKPITFGVITADTLEQAIERAGTKHGNKGWEAALSAIEMANLFKSLR

SEQ ID NO: 4025 - protein, 1363 aa, Artificial Sequence
  SARS-CoV-2/pangolin/Guangxi/P1E/2017__EPI_ISL_410539 spike protein (1-1203)(I704C_T1069C) LumSynth construct
MFVFLFVLPLVSSQCVNLTTRTGIQPGYTNSSTRGVYYPDKVFRSSILHLTQDLFLPFFSNVTWFNTINYQGGFKKFDNPVLPFNDGVYFASTEKSNIIRGWIFGTTLDARTQSLLIVNNATNVVIKVCEFQFCTDPFLGVYYHNNNKTWVENEFRVYSSANNCTFEYISQPFLMDLEGKQGNFKNLREFVFKNVDGYFKIYSKHTPIDLVRDLPRGFAALEPLVDLPIGINITRFQTLLALHRSYLTPGKLESGWTTGAAAYYVGYLQQRTFLLSYNQNGTITDAVDCSLDPLSETKCTLKSLTVEKGIYQTSNFRVQPTISIVRFPNITNLCPFGEVFNASKFASVYAWNRKRISNCVADYSVLYNSTSFSTFKCYGVSPTKLNDLCFTNVYADSFVVKGDEVRQIAPGQTGVIADYNYKLPDDFTGCVIAWNSVKQDALTGGNYLYRLFRKSKLKPFERDISTEIYQAGSTPCNGQVGLNCYYPLERYGFHPTTGVNYQPFRVVVLSFELLNGPATVCGPKLSTTLVKDKCVNFNFNGLTGTGVLTTSKKQFLPFQQFGRDISDTTDAVRDPQTLEILDITPCSFGGVSVITPGTNTSNQVAVLYQDVNCTEVPMAIHAEQLTPAWRVYSAGANVFQTRAGCLVGAEHVNNSYECDIPVGAGICASYHSMSSLRSVNQRSIIAYTMSLGAENSVAYSNNSCAIPTNFTISVTTEILPVSMTKTSVDCTMYICGDSIECSNLLLQYGSFCTQLNRALTGIAVEQDKNTQEVFAQVKQIYKTPPIKDFGGFNFSQILPDPSKPSKRSFIEDLLFNKVTLADAGFIKQYGDCLGDIAARDLICAQKFNGLTVLPPLLTDEMIAQYTSALLAGTITSGWTFGAGAALQIPFAMQMAYRFNGIGVTQNVLYENQKLIANQFNSAIGKIQDSLSSTASALGKLQDVVNQNAQALNTLVKQLSSNFGAISSVLNDILSRLDKVEAEVQIDRLITGRLQSLQTYVTQQLIRAAEIRASANLAATKMSECVLGQSKRVDFCGKGYHLMSFPQSAPHGVVFLHVTYVPAQEKNFTCAPAICHEGKAHFPREGVFVSNGTHWFITQRNFYEPQIITTDNTFVSGSCDVVIGIVNNTVYDPLQPELDSFKEELDKYFKNHTSPDVDLGDISGINASVVNIQKEIDRLNEVAKNLNESLIDLQELGKYEQYIKGGGSGGGQIYEGKLTAEGLRFGIVASRFNHALVDRLVEGAIDAIVRHGGREEDITLVRVPGSWEIPVAAGELARKEDIDAVIAIGVLIRGATPHFDYIASEVSKGLADLSLELRKPITFGVITADTLEQAIERAGTKHGNKGWEAALSAIEMANLFKSLR

SEQ ID NO: 4026 - protein, 1371 aa, Artificial Sequence
  SARS-CoV-2/Wuhan/WIV05/2019__EPI_ISL_402128 spike protein (1-1211)(I714C_Y1110C) LumSynth construct
MFVFLVLLPLVSSQCVNLTTRTQLPPAYTNSFTRGVYYPDKVFRSSVLHSTQDLFLPFFSNVTWFHAIHVSGTNGTKRFDNPVLPFNDGVYFASTEKSNIIRGWIFGTTLDSKTQSLLIVNNATNVVIKVCEFQFCNDPFLGVYYHKNNKSWMESEFRVYSSANNCTFEYVSQPFLMDLEGKQGNFKNLREFVFKNIDGYFKIYSKHTPINLVRDLPQGFSALEPLVDLPIGINITRFQTLLALHRSYLTPGDSSSGWTAGAAAYYVGYLQPRTFLLKYNENGTITDAVDCALDPLSETKCTLKSFTVEKGIYQTSNFRVQPTESIVRFPNITNLCPFGEVFNATRFASVYAWNRKRISNCVADYSVLYNSASFSTFKCYGVSPTKLNDLCFTNVYADSFVIRGDEVRQIAPGQTGKIADYNYKLPDDFTGCVIAWNSNNLDSKVGGNYNYLYRLFRKSNLKPFERDISTEIYQAGSTPCNGVEGFNCYFPLQSYGFQPTNGVGYQPYRVVVLSFELLHAPATVCGPKKSTNLVKNKCVNFNFNGLTGTGVLTESNKKFLPFQQFGRDIADTTDAVRDPQTLEILDITPCSFGGVSVITPGTNTSNQVAVLYQDVNCTEVPVAIHADQLTPTWRVYSTGSNVFQTRAGCLIGAEHVNNSYECDIPIGAGICASYQTQTNSPRRARSVASQSIIAYTMSLGAENSVAYSNNSIACPTNFTISVTTEILPVSMTKTSVDCTMYICGDSTECSNLLLQYGSFCTQLNRALTGIAVEQDKNTQEVFAQVKQIYKTPPIKDFGGFNFSQILPDPSKPSKRSFIEDLLFNKVTLADAGFIKQYGDCLGDIAARDLICAQKFNGLTVLPPLLTDEMIAQYTSALLAGTITSGWTFGAGAALQIPFAMQMAYRFNGIGVTQNVLYENQKLIANQFNSAIGKIQDSLSSTASALGKLQDVVNQNAQALNTLVKQLSSNFGAISSVLNDILSRLDKVEAEVQIDRLITGRLQSLQTYVTQQLIRAAEIRASANLAATKMSECVLGQSKRVDFCGKGYHLMSFPQSAPHGVVFLHVTYVPAQEKNFTTAPAICHDGKAHFPREGVFVSNGTHWFVTQRNFCEPQIITTDNTFVSGNCDVVIGIVNNTVYDPLQPELDSFKEELDKYFKNHTSPDVDLGDISGINASVVNIQKEIDRLNEVAKNLNESLIDLQELGKYEQYIKGGGSGGGQIYEGKLTAEGLRFGIVASRFNHALVDRLVEGAIDAIVRHGGREEDITLVRVPGSWEIPVAAGELARKEDIDAVIAIGVLIRGATPHFDYIASEVSKGLADLSLELRKPITFGVITADTLEQAIERAGTKHGNKGWEAALSAIEMANLFKSLR

SEQ ID NO: 4027 - protein, 1367 aa, Artificial Sequence
  SARS-CoV-2/bat/Yunnan/RaTG13/2013__EPI_ISL_402131 spike protein (1-1207)(I710C_Y1106C) LumSynth construct
MFVFLVLLPLVSSQCVNLTTRTQLPPAYTNSSTRGVYYPDKVFRSSVLHLTQDLFLPFFSNVTWFHAIHVSGTNGIKRFDNPVLPFNDGVYFASTEKSNIIRGWIFGTTLDSKTQSLLIVNNATNVVIKVCEFQFCNDPFLGVYYHKNNKSWMESEFRVYSSANNCTFEYVSQPFLMDLEGKQGNFKNLREFVFKNIDGYFKIYSKHTPINLVRDLPPGFSALEPLVDLPIGINITRFQTLLALHRSYLTPGDSSSGWTAGAAAYYVGYLQPRTFLLKYNENGTITDAVDCALDPLSETKCTLKSFTVEKGIYQTSNFRVQPTDSIVRFPNITNLCPFGEVFNATTFASVYAWNRKRISNCVADYSVLYNSTSFSTFKCYGVSPTKLNDLCFTNVYADSFVITGDEVRQIAPGQTGKIADYNYKLPDDFTGCVIAWNSKHIDAKEGGNFNYLYRLFRKANLKPFERDISTEIYQAGSKPCNGQTGLNCYYPLYRYGFYPTDGVGHQPYRVVVLSFELLNAPATVCGPKKSTNLVKNKCVNFNFNGLTGTGVLTESNKKFLPFQQFGRDIADTTDAVRDPQTLEILDITPCSFGGVSVITPGTNASNQVAVLYQDVNCTEVPVAIHADQLTPTWRVYSTGSNVFQTRAGCLIGAEHVNNSYECDIPIGAGICASYQTQTNSRSVASQSIIAYTMSLGAENSVAYSNNSIACPTNFTISVTTEILPVSMTKTSVDCTMYICGDSTECSNLLLQYGSFCTQLNRALTGIAVEQDKNTQEVFAQVKQIYKTPPIKDFGGFNFSQILPDPSKPSKRSFIEDLLFNKVTLADAGFIKQYGDCLGDIAARDLICAQKFNGLTVLPPLLTDEMIAQYTSALLAGTITSGWTFGAGAALQIPFAMQMAYRFNGIGVTQNVLYENQKLIANQFNSAIGKIQDSLSSTASALGKLQDVVNQNAQALNTLVKQLSSNFGAISSVLNDILSRLDKVEAEVQIDRLITGRLQSLQTYVTQQLIRAAEIRASANLAATKMSECVLGQSKRVDFCGKGYHLMSFPQSAPHGVVFLHVTYVPAQEKNFTTAPAICHDGKAHFPREGVFVSNGTHWFVTQRNFCEPQIITTDNTFVSGSCDVVIGIVNNTVYDPLQPELDSFKEELDKYFKNHTSPDVDLGDISGINASVVNIQKEIDRLNEVAKNLNESLIDLQELGKYEQYIKGGGSGGGQIYEGKLTAEGLRFGIVASRFNHALVDRLVEGAIDAIVRHGGREEDITLVRVPGSWEIPVAAGELARKEDIDAVIAIGVLIRGATPHFDYIASEVSKGLADLSLELRKPITFGVITADTLEQAIERAGTKHGNKGWEAALSAIEMANLFKSLR

SEQ ID NO: 4028 - protein, 1371 aa, Artificial Sequence
  SARS-CoV-2/Wuhan/HBCDC-HB-01/2019__EPI_ISL_402132 spike protein (1-1211)(I714C_Y1110C) LumSynth construct
MFVFLVLLPLVSSQCVNLTTRTQLPPAYTNSITRGVYYPDKVFRSSVLHSTQDLFLPFFSNVTWFHAIHVSGTNGTKRFDNPVLPFNDGVYFASTEKSNIIRGWIFGTTLDSKTQSLLIVNNATNVVIKVCEFQFCNDPFLGVYYHKNNKSWMESEFRVYSSANNCTFEYVSQPFLMDLEGKQGNFKNLREFVFKNIDGYFKIYSKHTPINLVRDLPQGFSALEPLVDLPIGINITRFQTLLALHRSYLTPGDSSSGWTAGAAAYYVGYLQPRTFLLKYNENGTITDAVDCALDPLSETKCTLKSFTVEKGIYQTSNFRVQPTESIVRFPNITNLCPFGEVFNATRFASVYAWNRKRISNCVADYSVLYNSASFSTFKCYGVSPTKLNDLCFTNVYADSFVIRGDEVRQIAPGQTGKIADYNYKLPDDFTGCVIAWNSNNLDSKVGGNYNYLYRLFRKSNLKPFERDISTEIYQAGSTPCNGVEGFNCYFPLQSYGFQPTNGVGYQPYRVVVLSFELLHAPATVCGPKKSTNLVKNKCVNFNFNGLTGTGVLTESNKKFLPFQQFGRDIADTTDAVRDPQTLEILDITPCSFGGVSVITPGTNTSNQVAVLYQDVNCTEVPVAIHADQLTPTWRVYSTGSNVFQTRAGCLIGAEHVNNSYECDIPIGAGICASYQTQTNSPRRARSVASQSIIAYTMSLGAENSVAYSNNSIACPTNFTISVTTEILPVSMTKTSVDCTMYICGDSTECSNLLLQYGSFCTQLNRALTGIAVEQDKNTQEVFAQVKQIYKTPPIKDFGGFNFSQILPDPSKPSKRSFIEDLLFNKVTLADAGFIKQYGDCLGDIAARDLICAQKFNGLTVLPPLLTDEMIAQYTSALLAGTITSGWTFGAGAALQIPFAMQMAYRFNGIGVTQNVLYENQKLIANQFNSAIGKIQDSLSSTASALGKLQDVVNQNAQALNTLVKQLSSNFGAISSVLNDILSRLDKVEAEVQIDRLITGRLQSLQTYVTQQLIRAAEIRASANLAATKMSECVLGQSKRVDFCGKGYHLMSFPQSAPHGVVFLHVTYVPAQEKNFTTAPAICHDGKAHFPREGVFVSNGTHWFVTQRNFCEPQIITTDNTFVSGNCDVVIGIVNNTVYDPLQPELDSFKEELDKYFKNHTSPDVDLGDISGINASVVNIQKEIDRLNEVAKNLNESLIDLQELGKYEQYIKGGGSGGGQIYEGKLTAEGLRFGIVASRFNHALVDRLVEGAIDAIVRHGGREEDITLVRVPGSWEIPVAAGELARKEDIDAVIAIGVLIRGATPHFDYIASEVSKGLADLSLELRKPITFGVITADTLEQAIERAGTKHGNKGWEAALSAIEMANLFKSLR

SEQ ID NO: 4029 - protein, 1371 aa, Artificial Sequence
  SARS-CoV-2/Guangdong/20SF028/2020__EPI_ISL_403936 spike protein (1-1211)(I714C_Y1110C) LumSynth construct
MFVFLVLLPLVSSQCVNLTTRTQLPPAYTNSFTRGVYYPDKVFRSSVLYSTQDLFLPFFSNVTWFHAIHVSGTNGTKRFDNPVLPFNDGVYFASTEKSNIIRGWIFGTTLDSKTQSLLIVNNATNVVIKVCEFQFCNDPFLGVYYHKNNKSWMESEFRVYSSANNCTFEYVSQPFLMDLEGKQGNFKNLREFVFKNIDGYFKIYSKHTPINLVRDLPQGFSALEPLVDLPIGINITRFQTLLALHRSYLTPGDSSSGWTAGAAAYYVGYLQPRTFLLKYNENGTITDAVDCALDPLSETKCTLKSFTVEKGIYQTSNFRVQPTESIVRFPNITNLCPFGEVFNATRFASVYAWNRKRISNCVADYSVLYNSASFSTFKCYGVSPTKLNDLCFTNVYADSFVIRGDEVRQIAPGQTGKIADYNYKLPDDFTGCVIAWNSNNLDSKVGGNYNYLYRLFRKSNLKPFERDISTEIYQAGSTPCNGVEGFNCYFPLQSYGFQPTNGVGYQPYRVVVLSFELLHAPATVCGPKKSTNLVKNKCVNFNFNGLTGTGVLTESNKKFLPFQQFGRDIADTTDAVRDPQTLEILDITPCSFGGVSVITPGTNTSNQVAVLYQDVNCTEVPVAIHADQLTPTWRVYSTGSNVFQTRAGCLIGAEHVNNSYECDIPIGAGICASYQTQTNSPRRARSVASQSIIAYTMSLGAENSVAYSNNSIACPTNFTISVTTEILPVSMTKTSVDCTMYICGDSTECSNLLLQYGSFCTQLNRALTGIAVEQDKNTQEVFAQVKQIYKTPPIKDFGGFNFSQILPDPSKPSKRSFIEDLLFNKVTLADAGFIKQYGDCLGDIAARDLICAQKFNGLTVLPPLLTDEMIAQYTSALLAGTITSGWTFGAGAALQIPFAMQMAYRFNGIGVTQNVLYENQKLIANQFNSAIGKIQDSLSSTASALGKLQDVVNQNAQALNTLVKQLSSNFGAISSVLNDILSRLDKVEAEVQIDRLITGRLQSLQTYVTQQLIRAAEIRASANLAATKMSECVLGQSKRVDFCGKGYHLMSFPQSAPHGVVFLHVTYVPAQEKNFTTAPAICHDGKAHFPREGVFVSNGTHWFVTQRNFCEPQIITTDNTFVSGNCDVVIGIVNNTVYDPLQPELDSFKEELDKYFKNHTSPDVDLGDISGINASVVNIQKEIDRLNEVAKNLNESLIDLQELGKYEQYIKGGGSGGGQIYEGKLTAEGLRFGIVASRFNHALVDRLVEGAIDAIVRHGGREEDITLVRVPGSWEIPVAAGELARKEDIDAVIAIGVLIRGATPHFDYIASEVSKGLADLSLELRKPITFGVITADTLEQAIERAGTKHGNKGWEAALSAIEMANLFKSLR

SEQ ID NO: 4030 - protein, 1371 aa, Artificial Sequence
  SARS-CoV-2/Shenzhen/SZTH-001/2020__EPI_ISL_406592 spike protein (1-1211)(I714C_Y1110C) LumSynth construct
MFVFLVLLPLVSSQCVNLTTRTQLPPAYTNSFTRGVYYPDKVFRSSVLHSTQDLFLPFFSNVTWFHAIHVSGTNGTKRFDNPVLPFNDGVYFASTEKSNIIRGWIFGTTLDSKTQSLLIVNNATNVVIKVCEFQFCNDPFLGVYYHKNNKSWMESEFRVYSSANNCTFEYVSQPFLMDLEGKQGNFKNLREFVFKNIDGYFKIYSKHTPINLVRDLPQGFSALEPLVDLPIGINITRFQTLLALHRSYLTPGDSSSGWTAGAAAYYVGYLQPRTFLLKYNENGTITDAVDCALDPLSETKCTLKSFTVEKGIYQTSNFRVQPTESIVRFPNITNLCPFGEVFNATRFASVYAWNRKRISNCVADYSVLYNSASFSTFKCYGVSPTKLNDLCFTNVYADSFVIRGDEVRQIAPGQTGKIADYNYKLPDDFTGCVIAWNSNNLDSKVGGNYNYLYRLFRKSNLKPFERDISTEIYQAGSTPCNGVEGFNCYFPLQSYGFQPTNGVGYQPYRVVVLSFELLHAPATVCGPKKSTNLVKNKCVNFNFNGLTGTGVLTESNKKFLPFQQFGRDIADTTDAVRDPQTLEILDITPCSFGGVSVITPGTNTSNQVAVLYQDVNCTEVPVAIHADQLTPTWRVYSTGSNVFQTRAGCLIGAEHVNNSYECDIPIGAGICASYQTQTNSPRRARSVASQSIIAYTMSLGAENSVAYSNNSIACPTNFTISVTTEILPVSMTKTSVDCTMYICGDSTECSNLLLQYGSFCTQLNRALTGIAVEQDKNTQEVFAQVKQIYKTPPIKDFGGFNFSQILPDPSKPSKRSFIEDLLFNKVTLADAGFIKQYGDCLGDIAARDLICAQKFNGLTVLPPLLTDEMIAQYTSALLAGTITSGWTFGAGAALQIPFAMQMAYRFNGIGVTQNVLYENQKLIANQFNSAIGKIQDSLSSTASALGKLQDVVNQNAQALNTLVKQLSSNFGAISSVLNDILSRLDKVEAEVQIDRLITGRLQSLQTYVTQQLIRAAEIRASANLAATKMSECVLGQSKRVDFCGKGYHLMSFPQSAPHGVVFLHVTYVPAQEKNFTTAPAICHDGKAHFPREGVFVSNGTHWFVTQRNFCEPQIITTDNTFVSGNCDVLIGIVNNTVYDPLQPELDSFKEELDKYFKNHTSPDVDLGDISGINASVVNIQKEIDRLNEVAKNLNESLIDLQELGKYEQYIKGGGSGGGQIYEGKLTAEGLRFGIVASRFNHALVDRLVEGAIDAIVRHGGREEDITLVRVPGSWEIPVAAGELARKEDIDAVIAIGVLIRGATPHFDYIASEVSKGLADLSLELRKPITFGVITADTLEQAIERAGTKHGNKGWEAALSAIEMANLFKSLR

SEQ ID NO: 4031 - protein, 1371 aa, Artificial Sequence
  SARS-CoV-2/Shenzhen/SZTH-004/2020__EPI_ISL_406595 spike protein (1-1211)(I714C_Y1110C) LumSynth construct
MFVFLVLLPLVSSQCVNLTTRTQLPPAYTNSFTRGVYYPDKVFRSSVLHSTQDLFLPFFSNVTWFHAIHVSGTNGTKRFDNPVLPFNDGVYFASTEKSNIIRGWIFGTTLDSKTQSLLIVNNATNVVIKVCEFQFCNDPFLGVYYHKNNKSWMESEFRVYSSANNCTFEYVSQPFLMDLEGKQGNFKNLREFVFKNIDGYFKIYSKHTPINLVRDLPQGFSALEPLVDLPIGINITRFQTLLALHRSYLTPGDSSSGWTAGAAAYYVGYLQPRTFLLKYNENGTITDAVDCALDPLSETKCTLKSFTVEKGIYQTSNFRVQPTESIVRFPNITNLCPFGEVFNATRFASVYAWDRKRISNCVAYYSVLYNSASFSTFKCYGVSPTKLNDLCFTNVYADSFVIRGDEVRQIAPGQTGKIADYNYKLPDDFTGCVIAWNSNNLDSKVGGNYNYLYRLFRKSNLKPFERDISTEIYQAGSTPCNGVEGFNCYFPLQSYGFQPTNGVGYQPYRVVVLSFELLHAPATVCGPKKSTNLVKNKCVNFNFNGLTGTGVLTESNKKFLPFQQFGRDIADTTDAVRDPQTLEILDITPCSFGGVSVITPGTNTSNQVAVLYQDVNCTEVPVAIHADQLTPTWRVYSTGSNVFQTRAGCLIGAEHVNNSYECDIPIGAGICASYQTQTNSPRRARSVASQSIIAYTMSLGAENSVAYSNNSIACPTNFTISVTTEILPVSMTKTSVDCTMYICGDSTECSNLLLQYGSFCTQLNRALTGIAVEQDKNTQEVFAQVKQIYKTPPIKDFGGFNFSQILPDPSKPSKRSFIEDLLFNKVTLADAGFIKQYGDCLGDIAARDLICAQKFNGLTVLPPLLTDEMIAQYTSALLAGTITSGWTFGAGAALQIPFAMQMAYRFNGIGVTQNVLYENQKLIANQFNSAIGKIQDSLSSTASALGKLQDVVNQNAQALNTLVKQLSSNFGAISSVLNDILSRLDKVEAEVQIDRLITGRLQSLQTYVTQQLIRAAEIRASANLAATKMSECVLGQSKRVDFCGKGYHLMSFPQSAPHGVVFLHVTYVPAQEKNFTTAPAICHDGKAHFPREGVFVSNGTHWFVTQRNFCEPQIITTDNTFVSGNCDVVIGIVNNTVYDPLQPELDSFKEELDKYFKNHTSPDVDLGDISGINASVVNIQKEIDRLNEVAKNLNESLIDLQELGKYEQYIKGGGSGGGQIYEGKLTAEGLRFGIVASRFNHALVDRLVEGAIDAIVRHGGREEDITLVRVPGSWEIPVAAGELARKEDIDAVIAIGVLIRGATPHFDYIASEVSKGLADLSLELRKPITFGVITADTLEQAIERAGTKHGNKGWEAALSAIEMANLFKSLR

SEQ ID NO: 4032 - protein, 1371 aa, Artificial Sequence
  SARS-CoV-2/France/IDF0372/2020__EPI_ISL_406596 spike protein (1-1211)(I714C_Y1110C) LumSynth construct
MFVFLVLLPLVSSQCVNLTTRTQLPPAYTNSFTRGVYYPDKVFRSSVLHSTQDLFLPFFSNVTWFHAIHVSGTNGTKRFDNPVLPFNDGVYFASTEKSNIIRGWIFGTTLDSKTQSLLIVNNATNVVIKVCEFQFCNDPFLGVYYHKNNKSWMESEFRVYSSANNCTFEYVSQPFLMDLEGKQGNFKNLREFVFKNIDGYFKIYSKHTPINLVRDLPQGFSALEPLVDLPIGINITRFQTLLALHRSYLTPGDSSSGWTAGAAAYYVGYLQPRTFLLKYNENGTITDAVDCALDPLSETKCTLKSFTVEKGIYQTSNFRVQPTESIVRFPNITNLCPFGEVFNATRFASVYAWNRKRISNCVADYSFLYNSASFSTFKCYGVSPTKLNDLCFTNVYADSFVIRGDEVRQIAPGQTGKIADYNYKLPDDFTGCVIAWNSNNLDSKVGGNYNYLYRLFRKSNLKPFERDISTEIYQAGSTPCNGVEGFNCYFPLQSYGFQPTNGVGYQPYRVVVLSFELLHAPATVCGPKKSTNLVKNKCVNFNFNGLTGTGVLTESNKKFLPFQQFGRDIADTTDAVRDPQTLEILDITPCSFGGVSVITPGTNTSNQVAVLYQDVNCTEVPVAIHADQLTPTWRVYSTGSNVFQTRAGCLIGAEHVNNSYECDIPIGAGICASYQTQTNSPRRARSVASQSIIAYTMSLGAENSVAYSNNSIACPTNFTISVTTEILPVSMTKTSVDCTMYICGDSTECSNLLLQYGSFCTQLNRALTGIAVEQDKNTQEVFAQVKQIYKTPPIKDFGGFNFSQILPDPSKPSKRSFIEDLLFNKVTLADAGFIKQYGDCLGDIAARDLICAQKFNGLTVLPPLLTDEMIAQYTSALLAGTITSGWTFGAGAALQIPFAMQMAYRFNGIGVTQNVLYENQKLIANQFNSAIGKIQDSLSSTASALGKLQDVVNQNAQALNTLVKQLSSNFGAISSVLNDILSRLDKVEAEVQIDRLITGRLQSLQTYVTQQLIRAAEIRASANLAATKMSECVLGQSKRVDFCGKGYHLMSFPQSAPHGVVFLHVTYVPAQEKNFTTAPAICHDGKAHFPREGVFVSNGTHWFVTQRNFCEPQIITTDNTFVSGNCDVVIGIVNNTVYDPLQPELDSFKEELDKYFKNHTSPDVDLGDISGINASVVNIQKEIDRLNEVAKNLNESLIDLQELGKYEQYIKGGGSGGGQIYEGKLTAEGLRFGIVASRFNHALVDRLVEGAIDAIVRHGGREEDITLVRVPGSWEIPVAAGELARKEDIDAVIAIGVLIRGATPHFDYIASEVSKGLADLSLELRKPITFGVITADTLEQAIERAGTKHGNKGWEAALSAIEMANLFKSLR

SEQ ID NO: 4033 - protein, 1371 aa, Artificial Sequence
  SARS-CoV-2/Australia/VIC01/2020__EPI_ISL_406844 spike protein (1-1211)(I714C_Y1110C) LumSynth construct
MFVFLVLLPLVSSQCVNLTTRTQLPPAYTNSFTRGVYYPDKVFRSSVLHSTQDLFLPFFSNVTWFHAIHVSGTNGTKRFDNPVLPFNDGVYFASTEKSNIIRGWIFGTTLDSKTQSLLIVNNATNVVIKVCEFQFCNDPFLGVYYHKNNKSWMESEFRVYSSANNCTFEYVSQPFLMDLEGKQGNFKNLREFVFKNIDGYFKIYSKHTPINLVRDLPQGFSALEPLVDLPIGINITRFQTLLALHRRYLTPGDSSSGWTAGAAAYYVGYLQPRTFLLKYNENGTITDAVDCALDPLSETKCTLKSFTVEKGIYQTSNFRVQPTESIVRFPNITNLCPFGEVFNATRFASVYAWNRKRISNCVADYSVLYNSASFSTFKCYGVSPTKLNDLCFTNVYADSFVIRGDEVRQIAPGQTGKIADYNYKLPDDFTGCVIAWNSNNLDSKVGGNYNYLYRLFRKSNLKPFERDISTEIYQAGSTPCNGVEGFNCYFPLQSYGFQPTNGVGYQPYRVVVLSFELLHAPATVCGPKKSTNLVKNKCVNFNFNGLTGTGVLTESNKKFLPFQQFGRDIADTTDAVRDPQTLEILDITPCSFGGVSVITPGTNTSNQVAVLYQDVNCTEVPVAIHADQLTPTWRVYSTGSNVFQTRAGCLIGAEHVNNSYECDIPIGAGICASYQTQTNSPRRARSVASQSIIAYTMSLGAENSVAYSNNSIACPTNFTISVTTEILPVSMTKTSVDCTMYICGDSTECSNLLLQYGSFCTQLNRALTGIAVEQDKNTQEVFAQVKQIYKTPPIKDFGGFNFSQILPDPSKPSKRSFIEDLLFNKVTLADAGFIKQYGDCLGDIAARDLICAQKFNGLTVLPPLLTDEMIAQYTSALLAGTITSGWTFGAGAALQIPFAMQMAYRFNGIGVTQNVLYENQKLIANQFNSAIGKIQDSLSSTASALGKLQDVVNQNAQALNTLVKQLSSNFGAISSVLNDILSRLDKVEAEVQIDRLITGRLQSLQTYVTQQLIRAAEIRASANLAATKMSECVLGQSKRVDFCGKGYHLMSFPQSAPHGVVFLHVTYVPAQEKNFTTAPAICHDGKAHFPREGVFVSNGTHWFVTQRNFCEPQIITTDNTFVSGNCDVVIGIVNNTVYDPLQPELDSFKEELDKYFKNHTSPDVDLGDISGINASVVNIQKEIDRLNEVAKNLNESLIDLQELGKYEQYIKGGGSGGGQIYEGKLTAEGLRFGIVASRFNHALVDRLVEGAIDAIVRHGGREEDITLVRVPGSWEIPVAAGELARKEDIDAVIAIGVLIRGATPHFDYIASEVSKGLADLSLELRKPITFGVITADTLEQAIERAGTKHGNKGWEAALSAIEMANLFKSLR

SEQ ID NO: 4034 - protein, 1371 aa, Artificial Sequence
  SARS-CoV-2/Germany/BavPat1/2020__EPI_ISL_406862 spike protein (1-1211)(I714C_Y1110C) LumSynth construct
MFVFLVLLPLVSSQCVNLTTRTQLPPAYTNSFTRGVYYPDKVFRSSVLHSTQDLFLPFFSNVTWFHAIHVSGTNGTKRFDNPVLPFNDGVYFASTEKSNIIRGWIFGTTLDSKTQSLLIVNNATNVVIKVCEFQFCNDPFLGVYYHKNNKSWMESEFRVYSSANNCTFEYVSQPFLMDLEGKQGNFKNLREFVFKNIDGYFKIYSKHTPINLVRDLPQGFSALEPLVDLPIGINITRFQTLLALHRSYLTPGDSSSGWTAGAAAYYVGYLQPRTFLLKYNENGTITDAVDCALDPLSETKCTLKSFTVEKGIYQTSNFRVQPTESIVRFPNITNLCPFGEVFNATRFASVYAWNRKRISNCVADYSVLYNSASFSTFKCYGVSPTKLNDLCFTNVYADSFVIRGDEVRQIAPGQTGKIADYNYKLPDDFTGCVIAWNSNNLDSKVGGNYNYLYRLFRKSNLKPFERDISTEIYQAGSTPCNGVEGFNCYFPLQSYGFQPTNGVGYQPYRVVVLSFELLHAPATVCGPKKSTNLVKNKCVNFNFNGLTGTGVLTESNKKFLPFQQFGRDIADTTDAVRDPQTLEILDITPCSFGGVSVITPGTNTSNQVAVLYQGVNCTEVPVAIHADQLTPTWRVYSTGSNVFQTRAGCLIGAEHVNNSYECDIPIGAGICASYQTQTNSPRRARSVASQSIIAYTMSLGAENSVAYSNNSIACPTNFTISVTTEILPVSMTKTSVDCTMYICGDSTECSNLLLQYGSFCTQLNRALTGIAVEQDKNTQEVFAQVKQIYKTPPIKDFGGFNFSQILPDPSKPSKRSFIEDLLFNKVTLADAGFIKQYGDCLGDIAARDLICAQKFNGLTVLPPLLTDEMIAQYTSALLAGTITSGWTFGAGAALQIPFAMQMAYRFNGIGVTQNVLYENQKLIANQFNSAIGKIQDSLSSTASALGKLQDVVNQNAQALNTLVKQLSSNFGAISSVLNDILSRLDKVEAEVQIDRLITGRLQSLQTYVTQQLIRAAEIRASANLAATKMSECVLGQSKRVDFCGKGYHLMSFPQSAPHGVVFLHVTYVPAQEKNFTTAPAICHDGKAHFPREGVFVSNGTHWFVTQRNFCEPQIITTDNTFVSGNCDVVIGIVNNTVYDPLQPELDSFKEELDKYFKNHTSPDVDLGDISGINASVVNIQKEIDRLNEVAKNLNESLIDLQELGKYEQYIKGGGSGGGQIYEGKLTAEGLRFGIVASRFNHALVDRLVEGAIDAIVRHGGREEDITLVRVPGSWEIPVAAGELARKEDIDAVIAIGVLIRGATPHFDYIASEVSKGLADLSLELRKPITFGVITADTLEQAIERAGTKHGNKGWEAALSAIEMANLFKSLR

SEQ ID NO: 4035 - protein, 1371 aa, Artificial Sequence
  SARS-CoV-2/Wuhan/HBCDC-HB-02/2020__EPI_ISL_412978 spike protein (1-1211)(I714C_Y1110C) LumSynth construct
MFVFLVLLPLVSSQCVNLTTRTQLPPAYTNSFTRGVYYPDKVFRSSVLHSTQDLFLPFFSNVTWFHAIHVSGTNGTKRFDNPVLPFNDGVYFASTEKSNIIRGWIFGTTLDSKTQSLLIVNNATNVVIKVCEFQFCNDPFLGVYYHKNNKSWMESEFRVYSSANNCTFEYVSQPFLMDLEGKQGNFKNLREFVFKNIDGYFKIYSKHTPINLVRDLPQGFSALEPLVDLPIGINITRFQTLLALHRSYLTPGDSSSGWTAGAAAYYVGYLQPRTFLLKYNENGTITDAVDCALDPLSETKCTLKSFTVEKGIYQTSNFRVQPTESIVRFPNITNLCPFGEVFNATRFASVYAWNRKRISNCVADYSVLYNSASFSTFKCYGVSPTKLNDLCFTNVYADSFVIRGDEVRQIAPGQTGKIADYNYKLPDDFTGCVIAWNSNNLDSKVGGNYNYLYRLFRKSNLKPFERDISTEIYQAGSTPCNGVEGFNCYFPLQSYGFQPTNGVGYQPYRVVVLSFELLHAPATVCGPKKSTNLVKNKCVNFNFNGLTGTGVLTESNKKFLPFQQFGRDIADTTDAVRDPQTLEILDITPCSFGGVSVITPGTNTSNQVAVLYQDVNCTEVPVAIHADQLTPTWRVYSTGSNVFQTRAGCLIGAEHVNNSYECDIPIGAGICASYQTQTNSPRRARSVASQSIIAYTMSLGAENSVAYSNNSIACPTNFTISVTTEILPVSMTKTSVDCTMYICGDSTECSNFLLQYGSFCTQLNRALTGIAVEQDKNTQEVFAQVKQIYKTPPIKDFGGFNFSQILPDPSKPSKRSFIEDLLFNKVTLADAGFIKQYGDCLGDIAARDLICAQKFNGLTVLPPLLTDEMIAQYTSALLAGTITSGWTFGAGAALQIPFAMQMAYRFNGIGVTQNVLYENQKLIANQFNSAIGKIQDSLSSTASALGKLQDVVNQNAQALNTLVKQLSSNFGAISSVLNDILSRLDKVEAEVQIDRLITGRLQSLQTYVTQQLIRAAEIRASANLAATKMSECVLGQSKRVDFCGKGYHLMSFPQSAPHGVVFLHVTYVPAQEKNFTTAPAICHDGKAHFPREGVFVSNGTHWFVTQRNFCEPQIITTDNTFVSGNCDVVIGIVNNTVYDPLQPELDSFKEELDKYFKNHTSPDVDLGDISGINASVVNIQKEIDRLNEVAKNLNESLIDLQELGKYEQYIKGGGSGGGQIYEGKLTAEGLRFGIVASRFNHALVDRLVEGAIDAIVRHGGREEDITLVRVPGSWEIPVAAGELARKEDIDAVIAIGVLIRGATPHFDYIASEVSKGLADLSLELRKPITFGVITADTLEQAIERAGTKHGNKGWEAALSAIEMANLFKSLR

SEQ ID NO: 4036 - protein, 1371 aa, Artificial Sequence
  SARS-CoV-2/Australia/QLD02/2020__EPI_ISL_407896 spike protein (1-1211)(I714C_Y1110C) LumSynth construct
MFVFLVLLPLVSSQCVNLTTRTQLPPAYTNSFTRGVYYPDKVFRSSVLHSTQDLFLPFFSNVTWFHAIHVSGTNGTKRFDNPVLPFNDGVYFASTEKSNIIRGWIFGTTLDSKTQSLLIVNNATNVVIKVCEFQFCNDPFLGVYYHKNNKSWMESEFRVYSSANNCTFEYVSQPFLMDLEGKQGNFKNLREFVFKNIDGYFKIYSKHTPINLVRDLPQGFSALEPLVDLPIGINITRFQTLLALHRSYLTPGDSSSGWTAGAAAYYVGYLQPRTFLLKYNENGTITDAVDCALDPLSETKCTLKSFTVEKGIYQTSNFRVQPTESIVRFPNITNLCPFGEVFNATRFASVYAWNRKRISNCVADYSVLYNSASFSTFKCYGVSPTKLNDLCFTNVYADSFVIRGDEVRQIAPGQTGKIADYNYKLPDDFTGCVIAWNSNNLDSKVGGNYNYLYRLFRKSNLKPFERDISTEIYQAGSTPCNGVEGFNCYFPLQSYGFQPTNGVGYQPYRVVVLSFELLHAPATVCGPKKSTNLVKNKCVNFNFNGLTGTGVLTESNKKFLPFQQFGRDIADTTDAVRDPQTLEILDITPCSFGGVSVITPGTNTSNQVAVLYQDVNCTEVPVAIHADQLTPTWRVYSTGSNVFQTRAGCLIGAEHVNNSYECDIPIGAGICASYQTQTNSPRRARSVASQSIIAYTMSLGAENSVAYSNNSIACPTNFTISVTTEILPVSMTKTSVDCTMYICGDSTECSNLLLQYGSFCTQLNRALTGIAVEQDKNTQEVFAQVKQIYKTPPIKDFGGFNFSQILPDPSKPSKRSFIEDLLFNKVTLADAGFIKQYGDCLGDIAARDLICAQKFNGLTVLPPLLTDEMIAQYTSALLAGTITSGWTFGAGAALQIPFAMQMAYRFNGIGVTQNVLYENQKLIANQFNSAIGKIQDSLSSTASALGKLQDVVNQNAQALNTLVKQLSSNFGAISSVLNDILSRLDKVEAEVQIDRLITGRLQSLQTYVTQQLIRAAEIRASANLAATKMSECVLGQSKRVDFCGKGYHLMSFPQSAPHGVVFLHVTYVPAQEKNFTTAPAICHDGKAHFPREGVFVSNGTHWFVTQRNFCEPQIITTDNTFVSGNCDVVIGIVNNTVYDPLQLELDSFKEELDKYFKNHTSPDVDLGDISGINASVVNIQKEIDRLNEVAKNLNESLIDLQELGKYEQYIKGGGSGGGQIYEGKLTAEGLRFGIVASRFNHALVDRLVEGAIDAIVRHGGREEDITLVRVPGSWEIPVAAGELARKEDIDAVIAIGVLIRGATPHFDYIASEVSKGLADLSLELRKPITFGVITADTLEQAIERAGTKHGNKGWEAALSAIEMANLFKSLR

SEQ ID NO: 4037 - protein, 1371 aa, Artificial Sequence
  SARS-CoV-2/India/1-31/2020__EPI_ISL_413523 spike protein (1-1211)(I714C_Y1110C) LumSynth construct
MFVFLVLLPLVSSQCVNLTTRTQLPPAYTNSFTRGVYYPDKVFRSSVLHSTQDLFLPFFSNVTWFHAIHVSGTNGTKRFDNPVLPFNDGVYFASTEKSNIIRGWIFGTTLDSKTQSLLIVNNATNVVIKVCEFQFCNDPFLGVYYHKNNKSWMESEFRVYSSANNCTFEYVSQPFLMDLEGKQGNFKNLREFVFKNIDGYFKIYSKHTPINLVRDLPQGFSALEPLVDLPIGINITRFQTLLALHRSYLTPGDSSSGWTAGAAAYYVGYLQPRTFLLKYNENGTITDAVDCALDPLSETKCTLKSFTVEKGIYQTSNFRVQPTESIVRFPNITNLCPFGEVFNATRFASVYAWNRKRISNCVADYSVLYNSASFSTFKCYGVSPTKLNDLCFTNVYADSFVIRGDEVRQIAPGQTGKIADYNYKLPDDFTGCVIAWNSNNLDSKVGGNYNYLYRLFRKSNLKPFERDISTEIYQAGSTPCNGVEGFNCYFPLQSYGFQPTNGVGYQPYRVVVLSFELLHAPATVCGPKKSTNLVKNKCVNFNFNGLTGTGVLTESNKKFLPFQQFGRDIADTTDAVRDPQTLEILDITPCSFGGVSVITPGTNTSNQVAVLYQDVNCTEVPVAIHADQLTPTWRVYSTGSNVFQTRAGCLIGAEHVNNSYECDIPIGAGICASYQTQTNSPRRARSVASQSIIAYTMSLGAENSVAYSNNSIACPTNFTISVTTEILPVSMTKTSVDCTMYICGDSTECSNLLLQYGSFCTQLNRALTGIAVEQDKNTQEVFAQVKQIYKTPPIKDFGGFNFSQILPDPSKPSKRSFIEDLLFNKVTLADAGFIKQYGDCLGDIAARDLICAQKFNGLTVLPPLLTDEMIAQYTSALLAGTITSGWTFGAGAALQIPFAMQMAYRFNGIGVTQNVLYENQKLIANQFNSVIGKIQDSLSSTASALGKLQDVVNQNAQALNTLVKQLSSNFGAISSVLNDILSRLDKVEAEVQIDRLITGRLQSLQTYVTQQLIRAAEIRASANLAATKMSECVLGQSKRVDFCGKGYHLMSFPQSAPHGVVFLHVTYVPAQEKNFTTAPAICHDGKAHFPREGVFVSNGTHWFVTQRNFCEPQIITTDNTFVSGNCDVVIGIVNNTVYDPLQPELDSFKEELDKYFKNHTSPDVDLGDISGINASVVNIQKEIDRLNEVAKNLNESLIDLQELGKYEQYIKGGGSGGGQIYEGKLTAEGLRFGIVASRFNHALVDRLVEGAIDAIVRHGGREEDITLVRVPGSWEIPVAAGELARKEDIDAVIAIGVLIRGATPHFDYIASEVSKGLADLSLELRKPITFGVITADTLEQAIERAGTKHGNKGWEAALSAIEMANLFKSLR

SEQ ID NO: 4038 - protein, 1371 aa, Artificial Sequence
  SARS-CoV-2/Guangdong/GD2020087-P0008/2020__EPI_ISL_413863 spike protein (1-1211)(I714C_Y1110C) LumSynth construct
MFVFLVLLPLVSSQCVNLTTRTQLPPAYTNSFTRGVYYPDKVFRSSVLHSTQDLFLPFFSNVTWFHAIHVSGTNGTKRFDNPVLPFNDGVYFASTEKSNIIRGWIFGTTLDSKTQSLLIVNNATNVVIKVCEFQFCNDPFLGVYYHKNNKSWMESEFRVYSSANNCTFEYVSQPFLMDLEGKQGNFKNLREFVFKNIDGYFKIYSKHTPINLVRDLPQGFSALEPLVDLPIGINITRFQTLLALHRSYLTPGDSSSGWTAGAAAYYVGYLQPRTFLLKYNENGTITDAVDCALDPLSETKCTLKSFTVEKGIYQTSNFRVQPTESIVRFPNITNLCPFGEVFNATRFASVYAWNRKRISNCVADYSVLYNSASFSTFKCYGVSPTKLNDLCFTNVYADSFVIRGDEVREIAPGQTGKIADYNYKLPDDFTGCVIAWNSNNLDSKVGGNYNYLYRLFRKSNLKPFERDISTEIYQAGSTPCNGVEGFNCYFPLQSYGFQPTNGVGYQPYRVVVLSFELLHAPATVCGPKKSTNLVKNKCVNFNFNGLTGTGVLTESNKKFLPFQQFGRDIADTTDAVRDPQTLEILDITPCSFGGVSVITPGTNTSNQVAVLYQDVNCTEVPVAIHADQLTPTWRVYSTGSNVFQTRAGCLIGAEHVNNSYECDIPIGAGICASYQTQTNSPRRARSVASQSIIAYTMSLGAENSVAYSNNSIACPTNFTISVTTEILPVSMTKTSVDCTMYICGDSTECSNLLLQYGSFCTQLNRALTGIAVEQDKNTQEVFAQVKQIYKTPPIKDFGGFNFSQILPDPSKPSKRSFIEDLLFNKVTLADAGFIKQYGDCLGDIAARDLICAQKFNGLTVLPPLLTDEMIAQYTSALLAGTITSGWTFGAGAALQIPFAMQMAYRFNGIGVTQNVLYENQKLIANQFNSAIGKIQDSLSSTASALGKLQDVVNQNAQALNTLVKQLSSNFGAISSVLNDILSRLDKVEAEVQIDRLITGRLQSLQTYVTQQLIRAAEIRASANLAATKMSECVLGQSKRVDFCGKGYHLMSFPQSAPHGVVFLHVTYVPAQEKNFTTAPAICHDGKAHFPREGVFVSNGTHWFVTQRNFCEPQIITTDNTFVSGNCDVVIGIVNNTVYDPLQPELDSFKEELDKYFKNHTSPDVDLGDISGINASVVNIQKEIDRLNEVAKNLNESLIDLQELGKYEQYIKGGGSGGGQIYEGKLTAEGLRFGIVASRFNHALVDRLVEGAIDAIVRHGGREEDITLVRVPGSWEIPVAAGELARKEDIDAVIAIGVLIRGATPHFDYIASEVSKGLADLSLELRKPITFGVITADTLEQAIERAGTKHGNKGWEAALSAIEMANLFKSLR

SEQ ID NO: 4039 - protein, 1371 aa, Artificial Sequence
  SARS-CoV-2/Sweden/01/2020__EPI_ISL_411951 spike protein (1-1211)(I714C_Y1110C) LumSynth construct
MFVFLVLLPLVSSQCVNLTTRTQLPPAYTNSFTRGVYYPDKVFRSSVLHSTQDLFLPFFSNVTWFHAIHVSGTNGTKRFDNPVLPFNDGVYFASTEKSNIIRGWIFGTTLDSKTQSLLIVNNATNVVIKVCEFQFCNDPFLGVYYHKNNKSWMESEFRVYSSANNCTFEYVSQPFLMDLEGKQGNFKNLREFVFKNIDGYFKIYSKHTPINLVRDLPQGFSALEPLVDLPIGINITRFQTLLALHRSYLTPGDSSSGWTAGAAAYYVGYLQPRTFLLKYNENGTITDAVDCALDPLSETKCTLKSFTVEKGIYQTSNFRVQPTESIVRFPNITNLCPFGEVFNATRFASVYAWNRKRISNCVADYSVLYNSASFSTFKCYGVSPTKLNDLCFTNVYADSFVIRGDEVRQIAPGQTGKIADYNYKLPDDFTGCVIAWNSNNLDSKVGGNYNYLYRLFRKSNLKPFERDISTEIYQAGSTPCNGVEGFNCYFPLQSYGFQPTNGVGYQPYRVVVLSFELLHAPATVCGPKKSTNLVKNKCVNFNFNGLTGTGVLTESNKKFLPFQQFGRDIADTTDAVRDPQTLEILDITPCSFGGVSVITPGTNTSNQVAVLYQDVNCTEVPVAIHADQLTPTWRVYSTGSNVFQTRAGCLIGAEHVNNSYECDIPIGAGICASYQTQTNSPRRARSVASQSIIAYTMSLGAENSVAYSNNSIACPTNFTISVTTEILPVSMTKTSVDCTMYICGDSTECSNLLLQYGSFCTQLNRALTGIAVEQDKNTQEVFAQVKQIYKTPPIKDCGGFNFSQILPDPSKPSKRSFIEDLLFNKVTLADAGFIKQYGDCLGDIAARDLICAQKFNGLTVLPPLLTDEMIAQYTSALLAGTITSGWTFGAGAALQIPFAMQMAYRFNGIGVTQNVLYENQKLIANQFNSAIGKIQDSLSSTASALGKLQDVVNQNAQALNTLVKQLSSNFGAISSVLNDILSRLDKVEAEVQIDRLITGRLQSLQTYVTQQLIRAAEIRASANLAATKMSECVLGQSKRVDFCGKGYHLMSFPQSAPHGVVFLHVTYVPAQEKNFTTAPAICHDGKAHFPREGVFVSNGTHWFVTQRNFCEPQIITTDNTFVSGNCDVVIGIVNNTVYDPLQPELDSFKEELDKYFKNHTSPDVDLGDISGINASVVNIQKEIDRLNEVAKNLNESLIDLQELGKYEQYIKGGGSGGGQIYEGKLTAEGLRFGIVASRFNHALVDRLVEGAIDAIVRHGGREEDITLVRVPGSWEIPVAAGELARKEDIDAVIAIGVLIRGATPHFDYIASEVSKGLADLSLELRKPITFGVITADTLEQAIERAGTKHGNKGWEAALSAIEMANLFKSLR

SEQ ID NO: 4040 - protein, 1371 aa, Artificial Sequence
  SARS-CoV-2/Tianmen/HBCDC-HB-07/2020__EPI_ISL_412983 spike protein (1-1211)(I714C_Y1110C) LumSynth construct
MFVFLVLLPLVSSQCVNLTTRTQLPPAYTNSFTRGVYYPDKVFRSSVLHSTQDLFLPFFSNVTWFHAIHVSGTNGTKRFDNPVLPFNDGVYFASTEKSNIIRGWIFGTTLDSKTQSLLIVNNATNVVIKVCEFQFCNDPFLGVYYHKNNKSWMESEFRVYSSANNCTFEYVSQPFLMDLEGKQGNFKNLREFVFKNIDGYFKIYSKHTPINLVRDLPQGFSALEPLVDLPIGINITRFQTLLALHRSYLTPGDSSSGWTAGAAAYYVGYLQPRTFLLKYNENGTITDAVDCALDPLSETKCTLKSFTVEKGIYQTSNFRVQPTESIVRFPNITNLCPFGEVFNATRFASVYAWNRKRISNCVADYSVLYNSASFSTFKCYGVSPTKLNDLCFTNVYADSFVIRGDEVRQIAPGQTGKIADYNYKLPDDFTGCVIAWNSNNLDSKVGGNYNYLYRLFRKSNLKPFERDISTEIYQAGSTPCNGVEGFNCYFPLQSYGFQPTNGVGYQPYRVVVLSFELLHAPATVCGPKKSTNLVKNKCVNFNFNGLTGTGVLTESNKKFLPFQQFGRDIADTTDAVRDPQTLEILDITPCSFGGVSVITPGTNTSNQVAVLYQDLNCTEVPVAIHADQLTPTWRVYSTGSNVFQTRAGCLIGAEHVNNSYECDIPIGAGICASYQTQTNSPRRARSVASQSIIAYTMSLGAENSVAYSNNSIACPTNFTISVTTEILPVSMTKTSVDCTMYICGDSTECSNLLLQYGSFCTQLNRALTGIAVEQDKNTQEVFAQVKQIYKTPPIKDFGGFNFSQILPDPSKPSKRSFIEDLLFNKVTLADAGFIKQYGDCLGDIAARDLICAQKFNGLTVLPPLLTDEMIAQYTSALLAGTITSGWTFGAGAALQIPFAMQMAYRFNGIGVTQNVLYENQKLIANQFNSAIGKIQDSLSSTASALGKLQDVVNQNAQALNTLVKQLSSNFGAISSVLNDILSRLDKVEAEVQIDRLITGRLQSLQTYVTQQLIRAAEIRASANLAATKMSECVLGQSKRVDFCGKGYHLMSFPQSAPHGVVFLHVTYVPAQEKNFTTAPAICHDGKAHFPREGVFVSNGTHWFVTQRNFCEPQIITTDNTFVSGNCDVVIGIVNNTVYDPLQPELDSFKEELDKYFKNHTSPDVDLGDISGINASVVNIQKEIDRLNEVAKNLNESLIDLQELGKYEQYIKGGGSGGGQIYEGKLTAEGLRFGIVASRFNHALVDRLVEGAIDAIVRHGGREEDITLVRVPGSWEIPVAAGELARKEDIDAVIAIGVLIRGATPHFDYIASEVSKGLADLSLELRKPITFGVITADTLEQAIERAGTKHGNKGWEAALSAIEMANLFKSLR

SEQ ID NO: 4041 - protein, 1371 aa, Artificial Sequence
  SARS-CoV-2/Hong Kong/case42_VM20002493/2020__EPI_ISL_414527 spike protein (1-1211)(I714C_Y1110C) LumSynth construct
MFVFLVLLPLVSSQCVNLTTRTQLPPAYTNSFTRGVYYPDKVFRSSVLHSTQDLFLPFFSNVTWFHAIHVSGTNGTKRFDNPVLPFNDGVYFASTEKSNIIRGWIFGTTLDSKTQSLLIVNNATNVVIKVCEFQFCNDPFLGVYYHKNNKSWMESEFRVYSSANNCTFEYVSQPFLMDLEGKQGNFKNLREFVFKNIDGYFKIYSKHTPINLVRDLPQGFSALEPLVDLPIGINITRFQTLLALHRSYLTPGDSSSGWTAGAAAYYVGYLQPRTFLLKYNENGTITDAVDCALDPLSETKCTLKSFTVEKGIYQTSNFRVQPTESIVRFPNITNLCPFGEVFNATRFASVYAWNRKRISNCVADYSVLYNSASFSTFKCYGVSPTKLNDLCFTNVYADSFVIRGDEVRQIAPGQTGKIADYNYKLPDDFTGCVIAWNSNNLDSKVGGNYNYLYRLFRKSNLKPFERDISTEIYQAGSTPCNGVEGFNCYFPLQSYGFQPTNGVGYQPYRVVVLSFELLHAPATVCGPKKSTNLVKNKCVNFNFNGLTGTGVLTESNKKFLPFQQFGRDIADTTDAVRDPQTLEILDITPCSFGGVSVITPGTNTSNQVAVLYQDVNCTEVPVAIHADQLTPTWRVYSTGSNVFQTRAGCLIGAEHVNNSYECDIPIGAGICASYQTQTNSPRRARSVASQSIIAYTMSLGAENSVAYSNNSIACPTNFAISVTTEILPVSMTKTSVDCTMYICGDSTECSNLLLQYGSFCTQLNRALTGIAVEQDKNTQEVFAQVKQIYKTPPIKDFGGFNFSQILPDPSKPSKRSFIEDLLFNKVTLADAGFIKQYGDCLGDIAARDLICAQKFNGLTVLPPLLTDEMIAQYTSALLAGTITSGWTFGAGAALQIPFAMQMAYRFNGIGVTQNVLYENQKLIANQFNSAIGKIQDSLSSTASALGKLQDVVNQNAQALNTLVKQLSSNFGAISSVLNDILSRLDKVEAEVQIDRLITGRLQSLQTYVTQQLIRAAEIRASANLAATKMSECVLGQSKRVDFCGKGYHLMSFPQSAPHGVVFLHVTYVPAQEKNFTTAPAICHDGKAHFPREGVFVSNGTHWFVTQRNFCEPQIITTDNTFVSGNCDVVIGIVNNTVYDPLQPELDSFKEELDKYFKNHTSPDVDLGDISGINASVVNIQKEIDRLNEVAKNLNESLIDLQELGKYEQYIKGGGSGGGQIYEGKLTAEGLRFGIVASRFNHALVDRLVEGAIDAIVRHGGREEDITLVRVPGSWEIPVAAGELARKEDIDAVIAIGVLIRGATPHFDYIASEVSKGLADLSLELRKPITFGVITADTLEQAIERAGTKHGNKGWEAALSAIEMANLFKSLR

SEQ ID NO: 4042 - protein, 1371 aa, Artificial Sequence
  SARS-CoV-2/USA/CruiseA-23/2020__EPI_ISL_414482 spike protein (1-1211)(I714C_Y1110C) LumSynth construct
MFVFLVLLPLVSSQCVNLTTRTQLPPAYTNSFTRGVYYPDKVFRSSVLHSTQDLFLPFFSNVTWFHAIHVSGTNGTKRFDNPVLPFNDGVYFASTEKSNIIRGWIFGTTLDSKTQSLLIVNNATNVVIKVCEFQFCNDPFLGVYYHKNNKSWMESEFRVYSSANNCTFEYVSQPFLMDLEVKQGNFKNLREFVFKNIDGYFKIYSKHTPINLVRDLPQGFSALEPLVDLPIGINITRFQTLLALHRSYLTPGDSSSGWTAGAAAYYVGYLQPRTFLLKYNENGTITDAVDCALDPLSETKCTLKSFTVEKGIYQTSNFRVQPTESIVRFPNITNLCPFGEVFNATRFASVYAWNRKRISNCVADYSVLYNSASFSTFKCYGVSPTKLNDLCFTNVYADSFVIRGDEVRQIAPGQTGKIADYNYKLPDDFTGCVIAWNSNNLDSKVGGNYNYLYRLFRKSNLKPFERDISTEIYQAGSTPCNGVEGFNCYFPLQSYGFQPTNGVGYQPYRVVVLSFELLHAPATVCGPKKSTNLVKNKCVNFNFNGLTGTGVLTESNKKFLPFQQFGRDIADTTDAVRDPQTLEILDITPCSFGGVSVITPGTNTSNQVAVLYQDVNCTEVPVAIHADQLTPTWRVYSTGSNVFQTRAGCLIGAEHVNNSYECDIPIGAGICASYQTQTNSPRRARSVASQSIIAYTMSLGAENSVAYSNNSIACPTNFTISVTTEILPVSMTKTSVDCTMYICGDSTECSNLLLQYGSFCTQLNRALTGIAVEQDKNTQEVFAQVKQIYKTPPIKDFGGFNFSQILPDPSKPSKRSFIEDLLFNKVTLADAGFIKQYGDCLGDIAARDLICAQKFNGLTVLPPLLTDEMIAQYTSALLAGTITSGWTFGAGAALQIPFAMQMAYRFNGIGVTQNVLYENQKLIANQFNSAIGKIQDSLSSTASALGKLQDVVNQNAQALNTLVKQLSSNFGAISSVLNDILSRLDKVEAEVQIDRLITGRLQSLQTYVTQQLIRAAEIRASANLAATKMSECVLGQSKRVDFCGKGYHLMSFPQSAPHGVVFLHVTYVPAQEKNFTTAPAICHDGKAHFPREGVFVSNGTHWFVTQRNFCEPQIITTDNTFVSGNCDVVIGIVNNTVYDPLQPELDSFKEELDKYFKNHTSPDVDLGDISGINASVVNIQKEIDRLNEVAKNLNESLIDLQELGKYEQYIKGGGSGGGQIYEGKLTAEGLRFGIVASRFNHALVDRLVEGAIDAIVRHGGREEDITLVRVPGSWEIPVAAGELARKEDIDAVIAIGVLIRGATPHFDYIASEVSKGLADLSLELRKPITFGVITADTLEQAIERAGTKHGNKGWEAALSAIEMANLFKSLR

SEQ ID NO: 4043 - protein, 1371 aa, Artificial Sequence
  SARS-CoV-2/Hong Kong/case85_VM20002868/2020__EPI_ISL_414519 spike protein (1-1211)(I714C_Y1110C) LumSynth construct
MFVFLVLVPLVSSQCVNLTTRTQLPPAYTNSFTRGVYYPDKVFRSSVLHSTQDLFLPFFSNVTWFHAIHVSGTNGTKRFDNPVLPFNDGVYFASTEKSNIIRGWIFGTTLDSKTQSLLIVNNATNVVIKVCEFQFCNDPFLGVYYHKNNKSWMESEFRVYSSANNCTFEYVSQPFLMDLEGKQGNFKNLREFVFKNIDGYFKIYSKHTPINLVRDLPQGFSALEPLVDLPIGINITRFQTLLALHRSYLTPGDSSSGWTAGAAAYYVGYLQPRTFLLKYNENGTITDAVDCALDPLSETKCTLKSFTVEKGIYQTSNFRVQPTESIVRFPNITNLCPFGEVFNATRFASVYAWNRKRISNCVADYSVLYNSASFSTFKCYGVSPTKLNDLCFTNVYADSFVIRGDEVRQIAPGQTGKIADYNYKLPDDFTGCVIAWNSNNLDSKVGGNYNYLYRLFRKSNLKPFERDISTEIYQAGSTPCNGVEGFNCYFPLQSYGFQPTNGVGYQPYRVVVLSFELLHAPATVCGPKKSTNLVKNKCVNFNFNGLTGTGVLTESNKKFLPFQQFGRDIADTTDAVRDPQTLEILDITPCSFGGVSVITPGTNTSNQVAVLYQDVNCTEVPVAIHADQLTPTWRVYSTGSNVFQTRAGCLIGAEHVNNSYECDIPIGAGICASYQTQTNSPRRARSVASQSIIAYTMSLGAENSVAYSNNSIACPTNFTISVTTEILPVSMTKTSVDCTMYICGDSTECSNLLLQYGSFCTQLNRALTGIAVEQDKNTQEVFAQVKQIYKTPPIKDFGGFNFSQILPDPSKPSKRSFIEDLLFNKVTLADAGFIKQYGDCLGDIAARDLICAQKFNGLTVLPPLLTDEMIAQYTSALLAGTITSGWTFGAGAALQIPFAMQMAYRFNGIGVTQNVLYENQKLIANQFNSAIGKIQDSLSSTASALGKLQDVVNQNAQALNTLVKQLSSNFGAISSVLNDILSRLDKVEAEVQIDRLITGRLQSLQTYVTQQLIRAAEIRASANLAATKMSECVLGQSKRVDFCGKGYHLMSFPQSAPHGVVFLHVTYVPAQEKNFTTAPAICHDGKAHFPREGVFVSNGTHWFVTQRNFCEPQIITTDNTFVSGNCDVVIGIVNNTVYDPLQPELDSFKEELDKYFKNHTSPDVDLGDISGINASVVNIQKEIDRLNEVAKNLNESLIDLQELGKYEQYIKGGGSGGGQIYEGKLTAEGLRFGIVASRFNHALVDRLVEGAIDAIVRHGGREEDITLVRVPGSWEIPVAAGELARKEDIDAVIAIGVLIRGATPHFDYIASEVSKGLADLSLELRKPITFGVITADTLEQAIERAGTKHGNKGWEAALSAIEMANLFKSLR

SEQ ID NO: 4044 - protein, 1371 aa, Artificial Sequence; identical to SEQ ID NO: 4034
  SARS-CoV-2/England/200990660/2020__EPI_ISL_414523 spike protein (1-1211)(I714C_Y1110C) LumSynth construct

SEQ ID NO: 4045 - protein, 1371 aa, Artificial Sequence
  SARS-CoV-2/Australia/NSW09/2020__EPI_ISL_413595 spike protein (1-1211)(I714C_Y1110C) LumSynth construct
MFVFLVLLPLVSSQCVNLTTRTQLPPAYTNSFTRGVYYPDKVFRSSVLHSTQDLFLPFFSNVTWFHAIHVSGTNGTKRFDNPVLPFNDGVYFASTEKSNIIRGWIFGTTLDSKTQSLLIVNNATNVVIKVCEFQFCNDPFLGVYYHKNNKSWMESEFRVYSSANNCTFEYVSQPFLMDLEGKQGNFKNLREFVFKNIDGYFKIYSKHTPINLVRDLPQGFSALEPLVDLPIGINITRFQTLLALHRSYLTPGDSSSGWTAGAAAYYVGYLQPRTFLLKYNENGTITDAVDCALDPLSETKCTLKSFTVEKGIYQTSNFRVQPTESIVRFPNITNLCPFGEVFNATRFASVYAWNRKRISNCVADYSVLYNSASFSTFKCYGVSPTKLNDLCFTNVYADSFVIRGDEVRQIAPGQTGKIADYNYKLPDDFTGCVIAWNSNNLDSKVGGNYNYLYRLFRKSNLKPFERDISTEIYQAGSTPCNGVEGFNCYFPLQSYGFQPTNGVGYQPYRVVVLSFELLHAPATVCGPKKSTNLVKNKCVNFNFNGLTGTGVLTESNKKFLPFQQFGRDIADTTDAVRDPQTLEILDITPCSFGGVSVITPGTNTSNQVAVLYQDVNCTEVPVAIHADQLTPTWRVYSTGSNVFQTRAGCLIGAEHVNNSYECDIPIGAGICASYQTQTNSPRRARSVASQSIIAYTMSLGAENSVAYSNNSIACPTNFTISVTTEILPVSMTKTSVDCTMYICGDSTECSNLLLQYGSFCTQLNRALTGIAVEQDKNTQEVFAQVKQIYKTPPIKDFGGFNFSQILPDPSKPSKRSFIEDLLFNKVTLADAGFIKQYGDCLGDIAARDLICAQKFNGLTVLPPLLTDEMIAQYTSALLAGTITSGWTFGAGAALQIPFAMQMAYRFNGIGVTQNVLYENQKLIANQFNSAIGKIQDSLSFTASALGKLQDVVNQNAQALNTLVKQLSSNFGAISSVLNDILSRLDKVEAEVQIDRLITGRLQSLQTYVTQQLIRAAEIRASANLAATKMSECVLGQSKRVDFCGKGYHLMSFPQSAPHGVVFLHVTYVPAQEKNFTTAPAICHDGKAHFPREGVFVSNGTHWFVTQRNFCEPQIITTDNTFVSGNCDVVIGIVNNTVYDPLQPELDSFKEELDKYFKNHTSPDVDLGDISGINASVVNIQKEIDRLNEVAKNLNESLIDLQELGKYEQYIKGGGSGGGQIYEGKLTAEGLRFGIVASRFNHALVDRLVEGAIDAIVRHGGREEDITLVRVPGSWEIPVAAGELARKEDIDAVIAIGVLIRGATPHFDYIASEVSKGLADLSLELRKPITFGVITADTLEQAIERAGTKHGNKGWEAALSAIEMANLFKSLR

SEQ ID NO: 4046 - protein, 1371 aa, Artificial Sequence; identical to SEQ ID NO: 4026
  SARS-CoV-2/Australia/NSW10/2020__EPI_ISL_413596 spike protein (1-1211)(I714C_Y1110C) LumSynth construct

SEQ ID NO: 4047 - protein, 1371 aa, Artificial Sequence
  SARS-CoV-2/Switzerland/1000477797/2020__EPI_ISL_413023 spike protein (1-1211)(I714C_Y1110C) LumSynth construct
MFVFLVLLPLVSSQCVNLTTRTQLPPAYTNSFTRGVYYPDKVFRSSVLHSTQDLFLPFFSNVTWFHAIHVSGTNGTKRFDNPVLPFNDGVYFASTEKSNIIRGWIFGTTLDSKTQSLLIVNNATNVVIKVCEFQFCNDPFLGVYYHKNNKSWMESEFRVYSSANNCTFEYVSQPFLMDLEGKQGNFKNLREFVFKNIDGYFNIYSKHTPINLVRDLPQGFSALEPLVDLPIGINITRFQTLLALHRSYLTPGDSSSGWTAGAAAYYVGYLQPRTFLLKYNENGTITDAVDCALDPLSETKCTLKSFTVEKGIYQTSNFRVQPTESIVRFPNITNLCPFGEVFNATRFASVYAWNRKRISNCVADYSVLYNSASFSTFKCYGVSPTKLNDLCFTNVYADSFVIRGDEVRQIAPGQTGKIADYNYKLPDDFTGCVIAWNSNNLDSKVGGNYNYLYRLFRKSNLKPFERDISTEIYQAGSTPCNGVEGFNCYFPLQSYGFQPTNGVGYQPYRVVVLSFELLHAPATVCGPKKSTNLVKNKCVNFNFNGLTGTGVLTESNKKFLPFQQFGRDIADTTDAVRDPQTLEILDITPCSFGGVSVITPGTNTSNQVAVLYQGVNCTEVPVAIHADQLTPTWRVYSTGSNVFQTRAGCLIGAEHVNNSYECDIPIGAGICASYQTQTNSPRRARSVASQSIIAYTMSLGAENSVAYSNNSIACPTNFTISVTTEILPVSMTKTSVDCTMYICGDSTECSNLLLQYGSFCTQLNRALTGIAVEQDKNTQEVFAQVKQIYKTPPIKDFGGFNFSQILPDPSKPSKRSFIEDLLFNKVTLADAGFIKQYGDCLGDIAARDLICAQKFNGLTVLPPLLTDEMIAQYTSALLAGTITSGWTFGAGAALQIPFAMQMAYRFNGIGVTQNVLYENQKLIANQFNSAIGKIQDSLSSTASALGKLQDVVNQNAQALNTLVKQLSSNFGAISSVLNDILSRLDKVEAEVQIDRLITGRLQSLQTYVTQQLIRAAEIRASANLAATKMSECVLGQSKRVDFCGKGYHLMSFPQSAPHGVVFLHVTYVPAQEKNFTTAPAICHDGKAHFPREGVFVSNGTHWFVTQRNFCEPQIITTDNTFVSGNCDVVIGIVNNTVYDPLQPELDSFKEELDKYFKNHTSPDVDLGDISGINASVVNIQKEIDRLNEVAKNLNESLIDLQELGKYEQYIKGGGSGGGQIYEGKLTAEGLRFGIVASRFNHALVDRLVEGAIDAIVRHGGREEDITLVRVPGSWEIPVAAGELARKEDIDAVIAIGVLIRGATPHFDYIASEVSKGLADLSLELRKPITFGVITADTLEQAIERAGTKHGNKGWEAALSAIEMANLFKSLR

SEQ ID NO: 4048 - protein, 1371 aa, Artificial Sequence
  SARS-CoV-2/Belgium/BA-02291/2020__EPI_ISL_415159 spike protein (1-1211)(I714C_Y1110C) LumSynth construct
MFVFLVLLPLVSSQCVNLTTRTQLPPAYTNSFTRGVYYPDKVFRSSVLHSTQDLFLPFFSNVTWFHAIHVSGTNGTKRFDNPVLPFNDGVYFASTEKSNIIRGWIFGTTLDSKTQSLLIVNNATNVVIKVCEFQFCNDPFLGVYYHKNNKSWMESEFRVYSSANNCTFEYVSQPFLMDLEGKQGNFKNLREFVFKNIDGYFKIYSKHTPINLVRDLPQGFSALEPLVDLPIGINITRFQTLLALHRSYLTPGDSSSGWTAGAAAYYVGYLQPRTFLLKYNENGTITDAVDCALDPLSETKCTLKSFTVEKGIYQTSNFRVQPTESIVRFPNITNLCPFGEVFNATRFASVYAWNRKRISNCVADYSVLYNSASFSTFKCYGVSPTKLNDLCFTNVYADSFVIRGDEVRQIAPGQTGKIADYNYKLPDDFTGCVIAWNSNNLDSKVGGNYNYLYRLFRRSNLKPFERDISTEIYQAGSTPCNGVEGFNCYFPLQSYGFQPTNGVGYQPYRVVVLSFELLPAPATVCGPKKSTNLVKNKCVNFNFNGLTGTGVLTESNKKFLPFQQFGRDIADTTDAVRDPQTLEILDITPCSFGGVSVITPGTNTSNQVAVLYQGVNCTEVPVAIHADQLTPTWRVYSTGSNVFQTRAGCLIGAEHVNNSYECDIPIGAGICASYQTQTNSPRRARSVASQSIIAYTMSLGAENSVAYSNNSIACPTNFTISVTTEILPVSMTKTSVDCTMYICGDSTECSNLLLQYGSFCTQLNRALTGIAVEQDKNTQEVFAQVKQIYKTPPIKDFGGFNFSQILPDPSKPSKRSFIEDLLFNKVTLADAGFIKQYGDCLGDIAARDLICAQKFNGLTVLPPLLTDEMIAQYTSALLAGTITSGWTFGAGAALQIPFAMQMAYRFNGIGVTQNVLYENQKLIANQFNSAIGKIQDSLSSAAPALGKLQDVVNQNAQALNTLVKQLSSNFGAISSVLNDILSRLDKVEAEVQIDRLITGRLQSLQTYVTQQLIRAAEIRASANLAATKMSECVLGQSKRVDFCGKGYHLMSFPQSAPHGVVFLHVTYVPAQEKNFTTAPAICHDGKAHFPREGVFVSNGTHWFVTQRNFCEPQIITTDNTFVSGNCDVVIGIVNNTVYDPLQPELDSFKEELDKYFKNHTSPDVDLGDISGINASVVNIQKEIDRLNEVAKNLNESLIDLQELGKYEQYIKGGGSGGGQIYEGKLTAEGLRFGIVASRFNHALVDRLVEGAIDAIVRHGGREEDITLVRVPGSWEIPVAAGELARKEDIDAVIAIGVLIRGATPHFDYIASEVSKGLADLSLELRKPITFGVITADTLEQAIERAGTKHGNKGWEAALSAIEMANLFKSLR

SEQ ID NO: 4049 - protein, 1371 aa, Artificial Sequence
  SARS-CoV-2/USA/WA8-UW5/2020__EPI_ISL_413486 spike protein (1-1211)(I714C_Y1110C) LumSynth construct
MFVFLVLLPLVSSQCVNLTTRTQLPPAYTNSFTRGVYYPDKVFRSSVLHSTQDLFLPFFSNVTWFHAIHVSGTNGTKRFDNPVLPFNDGVYFASTEKSNIIRGWIFGTTLDSKTQSLLIVNNATNVVIKVCEFQFCNDPFLGVYYHKNNKSWMESEFRVYSSANNCTFEYVSQPFLMDLEGKQGNFKNLREFVFKNIDGYFKIYSKHTPINLVRDLPQGFSALEPLVDLPIGINITRFQTLLALHRSYLTPGDSSSGWTAGAAAYYVGYLQPRTFLLKYNENGTITDAVDCALDPLSETKCTLKSFTVEKGIYQTSNFRVQPTESIVRFPNITNLCPFGEVFNATRFASVYAWNRKRISNCVADYSVLYNSASFSTFKCYGVSPTKLNDLCFTNVYADSFVIRGDEVRQIAPGQTGKIADYNYKLPDDFTGCVIAWNSNNLDSKVGGNYNYLYRLFRKSNLKPFERDISTEIYQAGSTPCNGVEGFNCYFPLQSYGFQPTNGVGYQPYRVVVLSFELLHAPATVCGPKKSTNLVKNKCVNFNFNGLTGTGVLTESNKKFLPFQQFGRDIADTTDAVRDPQTLEILDITPCSFGGVSVITPGTNTSNQVAVLYQDVNCTEVPVAIHADQLTPTWRVYSTGSNVFQTRAGCLIGAEYVNNSYECDIPIGAGICASYQTQTNSPRRARSVASQSIIAYTMSLGAENSVAYSNNSIACPTNFTISVTTEILPVSMTKTSVDCTMYICGDSTECSNLLLQYGSFCTQLNRALTGIAVEQDKNTQEVFAQVKQIYKTPPIKDFGGFNFSQILPDPSKPSKRSFIEDLLFNKVTLADAGFIKQYGDCLGDIAARDLICAQKFNGLTVLPPLLTDEMIAQYTSALLAGTITSGWTFGAGAALQIPFAMQMAYRFNGIGVTQNVLYENQKLIANQFNSAIGKIQDSLSSTASALGKLQDVVNQNAQALNTLVKQLSSNFGAISSVLNDILSRLDKVEAEVQIDRLITGRLQSLQTYVTQQLIRAAEIRASANLAATKMSECVLGQSKRVDFCGKGYHLMSFPQSAPHGVVFLHVTYVPAQEKNFTTAPAICHDGKAHFPREGVFVSNGTHWFVTQRNFCEPQIITTDNTFVSGNCDVVIGIVNNTVYDPLQPELDSFKEELDKYFKNHTSPDVDLGDISGINASVVNIQKEIDRLNEVAKNLNESLIDLQELGKYEQYIKGGGSGGGQIYEGKLTAEGLRFGIVASRFNHALVDRLVEGAIDAIVRHGGREEDITLVRVPGSWEIPVAAGELARKEDIDAVIAIGVLIRGATPHFDYIASEVSKGLADLSLELRKPITFGVITADTLEQAIERAGTKHGNKGWEAALSAIEMANLFKSLR

SEQ ID NO: 4050 - protein, 1371 aa, Artificial Sequence
  SARS-CoV-2/England/20102000506/2020__EPI_ISL_415147 spike protein (1-1211)(I714C_Y1110C) LumSynth construct
MFVFLVLLPLVSSQCVNLTTRTQLPPAYTNSFTRGVYYPDKVFRSSVLHSTQDLFLPFFSNVTWFHAIHVSGTNGTKRFDNPVLPFNDGVYFASTEKSNIIRGWIFGTTLDSKTQSLLIVNNATNVVIKVCEFQFCNDPFLGVYYHKNNKSWMESEFRVYSSANNCTFEYVSQPFLMDLEGKQGNFKNLREFVFKNIDGYFKIYSKHTPINLVRDLPQGFSALEPLVDLPIGINITRFQTLLALHRSYLTPGDSSSGWTAGAAAYYVGYLQPRTFLLKYNENGTITDAVDCALDPLSETKCTLKSFTVEKGIYQTSNFRVQPTESIVRFPNITNLCPFGEVFNATRFASVYAWNRKRISNCVADYSVLYNSASFSTFKCYGVSPTKLNDLCFTNVYADSFVIRGDEVRQIAPGQTGKIADYNYKLPDDFTGCVIAWNSNNLDSKVGGNYNYLYRLFRKSNLKPFERDISTEIYQAGSTPCNGVEGFNCYFPLQSYGFQPTNGVGYQPYRVVVLSFELLHAPATVCGPKKSTNLVKNKCVNFNFNGLTGTGVLTESNKKFLPFQQFGRDIADTTDAVRDPQTLEILDITPCSFGGVSVITPGTNTSNQVAVLYQGVNCTEVPVAIHADQLTPTWRVYSTGSNVFQTRAGCLIGAEHVNNSYECDIPIGAGICASYQTQTNSPRRARSVASQSIIAYTMSLGAENSVAYSNNSIACPTNFTISVTTEILPVSMTKTSVDCTMYICGDSTECSNLLLQYGSFCTQLNRALTGIAVEQDKNTQEVFAQVKQIYKTPPIKDFGGFNFSQILPDPSKPSKRSFIEDLLFNKVTLADAGFIKQYGYCLGDIAARDLICAQKFNGLTVLPPLLTDEMIAQYTSALLAGTITSGWTFGAGAALQIPFAMQMAYRFNGIGVTQNVLYENQKLIANQFNSAIGKIQDSLSSTASALGKLQDVVNQNAQALNTLVKQLSSNFGAISSVLNDILSRLDKVEAEVQIDRLITGRLQSLQTYVTQQLIRAAEIRASANLAATKMSECVLGQSKRVDFCGKGYHLMSFPQSAPHGVVFLHVTYVPAQEKNFTTAPAICHDGKAHFPREGVFVSNGTHWFVTQRNFCEPQIITTDNTFVSGNCDVVIGIVNNTVYDPLQPELDSFKEELDKYFKNHTSPDVDLGDISGINASVVNIQKEIDRLNEVAKNLNESLIDLQELGKYEQYIKGGGSGGGQIYEGKLTAEGLRFGIVASRFNHALVDRLVEGAIDAIVRHGGREEDITLVRVPGSWEIPVAAGELARKEDIDAVIAIGVLIRGATPHFDYIASEVSKGLADLSLELRKPITFGVITADTLEQAIERAGTKHGNKGWEAALSAIEMANLFKSLR

SEQ ID NO: 4051 - protein, 1371 aa, Artificial Sequence
  SARS-CoV-2/Belgium/VAG-03013/2020__EPI_ISL_415155 spike protein (1-1211)(I714C_Y1110C) LumSynth construct
MFVFLVLLPLVSSQCVNLTTRTQLPPAYTNSFTRGVYYPDKVFRSSVLHSTQDLFLPFFSNVTWFHAIHVSGTNGTKRFDNPVLPFNDGVYFASTEKSNIIRGWIFGTTLDSKTQSLLIVNNATNVVIKVCEFQFCNDPFLGVYYHKNNKSWMESEFRVYSSANNCTFEYVSQPFLMDLEGKQGNFKNLREFVFKNIDGYFKIYSKHTPINLVRDLPQGFSALEPLVDLPIGINITRFQTLLALHRSYLTPGDSSSGWTAGAAAYYVGYLQPRTFLLKYNENGTITDAVDCALDPLSETKCTLKSFTVEKGIYQTSNFRVQPTESIVRFPNITNLCPFGEVFNATRFASVYAWNRKRISNCVADYSVLYNSASFSTFKCYGVSPTKLNDLCFTNVYADSFVIRGDEVRQIAPGQTGKIADYNYKLPDDFTGCVIAWNSNNLDSKVGGNYNYLYRLFRKSNLKPFERDISTEIYQAGSTPCNGVEGFNCYFPLQSYGFQPTNGVGYQPYRVVVLSFELLHAPATVCGPKKSTNLVKNKCVNFNFNGLTGTGVLTESNKKFLPFQQFGRDIADTTDAVRDPQTLEILDITPCSFGGVSVITPGTNTSNQVAVLYQGVNCTEVPVAIHADQLTPTWRVYSTGSNVFQTRAGCLIGAEHVNNSYECDIPIGAGICASYQTQTNSPRRARSVASQSIIAYTMSLGAENSVAYSNNSIACPTNFTISVTTEILPVSMTKTSVDCTMYICGDSTECSNLLLQYGSFCTQLNRALTGIAVEQDKNTQEVFAQVKQIYKTPPIKDFGGFNFSQILPDPSKPSKRSFIEDLLFNKVTLADAGFIKQYGDCLGDIAARDLICAQKFNGLTVLPPLLTDEMIAQYTSALLAGTITSGWTFGAGAALQIPFAMQMAYRFNGIGVTQNVLYENQKLIANQFNSAIGKIQDSLSSTATALGKLQDVVNQNAQALNTLVKQLSSNFGAISSVLNDILSRLDKVEAEVQIDRLITGRLQSLQTYVTQQLIRAAEIRASANLAATKMSECVLGQSKRVDFCGKGYHLMSFPQSAPHGVVFLHVTYVPAQEKNFTTAPAICHDGKAHFPREGVFVSNGTHWFVTQRNFCEPQIITTDNTFVSGNCDVVIGIVNNTVYDPLQPELDSFKEELDKYFKNHTSPDVDLGDISGINASVVNIQKEIDRLNEVAKNLNESLIDLQELGKYEQYIKGGGSGGGQIYEGKLTAEGLRFGIVASRFNHALVDRLVEGAIDAIVRHGGREEDITLVRVPGSWEIPVAAGELARKEDIDAVIAIGVLIRGATPHFDYIASEVSKGLADLSLELRKPITFGVITADTLEQAIERAGTKHGNKGWEAALSAIEMANLFKSLR

SEQ ID NO: 4052 - protein, 1371 aa, Artificial Sequence
  SARS-CoV-2/Belgium/BC-03016/2020__EPI_ISL_415157 spike protein (1-1211)(I714C_Y1110C) LumSynth construct
MFVFLVLLPLVSSQCVNLTTRTQLPPAYTNSFTRGVYYPDKVFRSSVLHSTQDLFLPFFSNVTWFHAIHVSGTNGTKRFDNPVLPFNDGVYFASTEKSNIIRGWIFGTTLDSKTQSLLIVNNATNVVIKVCEFQFCNDPFLGVYYHKNNKSWMESEFRVYSSANNCTFEYVSQPFLMDLEGKQGNFKNLREFVFKNIDGYFKIYSKHTPINLVRDLPQGFSALEPLVDLPIGINITRFQTLLALHRSYLTPGDSSSGWTAGAAAYYVGYLQPRTFLLKYNENGTITDAVDCALDPLSETKCTLKSFTVEKGIYQTSNFRVQPTESIVRFPNITNLCPFGEVFNATRFASVYAWNRKRISNCVADYSVLYNSASFSTFKCYGVSPTKLNDLCFTNVYADSFVIRGDEVRQIAPGQTGKIADYNYKLPDDFTGCVIAWNSNNLDSKVGGNYNYLYRLFRKSNLKPFERDISTEIYQAGSTPCNGVEGFNCYFPLQSYGFQPTNGVGYQPYRVVVLSFELLHAPATVCGPKKSTNLVKNKCVNFNFNGLTGTGVLTESNKKFLPFQQFGRDIADTTDAVRDPQTLEILDITPCSFGGVSVITPGTNTSNQVAVLYQGVNCTEVPVAIHADQLTPTWRVYSTGSNVFQTRAGCLIGAEHVNNSYECDIPIGAGICASYQTQTNSPRRARSVASQSIIAYTMSLGAENSVAYSNNSIACPTNFTISVTTEILPVSMTKTSVDCTMYICGDSTECSNLLLQYGSFCTQLNRALTGIAVEQDKNTQEVFAQVKQIYKTPPIKDFGGFNFSQILPDPSKPSKRSFIEDLLFNKVTLADAGFIKQYGDCLGDIAARDLICAQKFNGLTVLPPLLTDEMIAQYTSALLAGTITSGWTFGAGAALQIPFAMQMAYRFNGIGVTQNVLYENQKLIANQFNSAIGKIQDSLSSTAPALGKLQDVVNQNAQALNTLVKQLSSNFGAISSVLNDILSRLDKVEAEVQIDRLITGRLQSLQTYVTQQLIRAAEIRASANLAATKMSECVLGQSKRVDFCGKGYHLMSFPQSAPHGVVFLHVTYVPAQEKNFTTAPAICHDGKAHFPREGVFVSNGTHWFVTQRNFCEPQIITTDNTFVSGNCDVVIGIVNNTVYDPLQPELDSFKEELDKYFKNHTSPDVDLGDISGINASVVNIQKEIDRLNEVAKNLNESLIDLQELGKYEQYIKGGGSGGGQIYEGKLTAEGLRFGIVASRFNHALVDRLVEGAIDAIVRHGGREEDITLVRVPGSWEIPVAAGELARKEDIDAVIAIGVLIRGATPHFDYIASEVSKGLADLSLELRKPITFGVITADTLEQAIERAGTKHGNKGWEAALSAIEMANLFKSLR

SEQ ID NO: 4053 - protein, 1371 aa, Artificial Sequence
  SARS-CoV-2/Germany/BavPat3/2020__EPI_ISL_414521 spike protein (1-1211)(I714C_Y1110C) LumSynth construct
MFVFLVLLPLVSSQCVNLTTRTQLPPAYTNSFTRGVYYPDKVFRSSVLHSTQDLFLPFFSNVTWFHAIHVSGTNGTKRFDNPVLPFNDGVYFASTEKSNIIRGWIFGTTLDSKTQSLLIVNNATNVVIKVCEFQFCNDPFLGVYYHKNNKSWMESEFRVYSSANNCTFEYVSQPFLMDLEGKQGNFKNLREFVFKNIDGYFKIYSKHTPINLVRDLPQGFSALEPLVDLPIGINITRFQTLLALHRSYLTPGDSSSGWTAGAAAYYVGYLQPRTFLLKYNENGTITDAVDCALDPLSETKCTLKSFTVEKGIYQTSNFRVQPTESIVRFPNITNLCPFGEVFNATRFASVYAWNRKRISNCVADYSVLYNSASFSTFKCYGVSPTKLNDLCFTNVYADSFVIRGDEVRQIAPGQTGKIADYNYKLPDDFTGCVIAWNSNNLDSKVGGNYNYLYRLFRKSNLKPFERDISTEIYQAGSTPCNGVEGFNCYFPLQSYGFQPTNGVGYQPYRVVVLSFELLHAPATVCGPKKSTNLVKNKCVNFNFNGLTGTGVLTESNKKFLPFQQFGRDIADTTDAVRDPQTLEILDITPCSFGGVSVITPGTNTSNQVAVLYQDVNCTEVPVAIHADQLTPTWRVYSTGSNVFQTRAGCLIGAEHVNNSYECDIPIGAGICASYQTQTNSPRRARSVASQSIIAYTMSLGAENSVAYSNNSIACPTNFTISVTTEILPVSMTKTSVDCTMYICGDSTECSNLLLQYGSFCTQLNRALTGIAVEQDKNTQQVFAQVKQIYKTPPIKDFGGFNFSQILPDPSKPSKRSFIEDLLFNKVTLADAGFIKQYGDCLGDIAARDLICAQKFNGLTVLPPLLTDEMIAQYTSALLAGTITSGWTFGAGAALQIPFAMQMAYRFNGIGVTQNVLYENQKLIANQFNSAIGKIQDSLSSTASALGKLQDVVNQNAQALNTLVKQLSSNFGAISSVLNDILSRLDKVEAEVQIDRLITGRLQSLQTYVTQQLIRAAEIRASANLAATKMSECVLGQSKRVDFCGKGYHLMSFPQSAPHGVVFLHVTYVPAQEKNFTTAPAICHDGKAHFPREGVFVSNGTHWFVTQRNFCEPQIITTDNTFVSGNCDVVIGIVNNTVYDPLQPELDSFKEELDKYFKNHTSPDVDLGDISGINASVVNIQKEIDRLNEVAKNLNESLIDLQELGKYEQYIKGGGSGGGQIYEGKLTAEGLRFGIVASRFNHALVDRLVEGAIDAIVRHGGREEDITLVRVPGSWEIPVAAGELARKEDIDAVIAIGVLIRGATPHFDYIASEVSKGLADLSLELRKPITFGVITADTLEQAIERAGTKHGNKGWEAALSAIEMANLFKSLR

SEQ ID NO: 4054 - protein, 1371 aa, Artificial Sequence
  SARS-CoV-2/France/HF1805/2020__EPI_ISL_414628 spike protein (1-1211)(I714C_Y1110C) LumSynth construct
MFVFLVLLPLVSSQCVNLTTRTQLPPAYTNSFTRGVYYPDKVFRSSVLHSTQDLFLPFFSNVTWFHAIHVSGTNGTKRFDNPVLPFNDGVYFASTEKSNIIRGWIFGTTLDSKTQSLLIVNNATNVVIKVCEFQFCNDPFLGVYYHKNNKSWMESEFRVYSSANNCTFEYVSQPFLMDLEGKQGNFKNLREFVFKNIDGYFKIYSKHTPINLVRDLPQGFSALEPLVDLPIGINITRFQTLLALHRSYLTPGDSSSGWTAGAAAYYVGYLQPRTFLLKYNENGTITDAVDCALDPLSETKCTLKSFTVEKGIYQTSNFRVQPTESIVRFPNITNLCPFGEVFNATRFASVYAWNRKRISNCVADYSVLYNSASFSTFKCYGVSPTKLNDLCFTNVYADSFVIRGDEVRQIAPGQTGKIADYNYKLPDDFTGCVIAWNSNNLDSKVGGNYNYLYRLFRKSNLKPFERDISTEIYQAGSTPCNGVEGFNCYFPLQSYGFQPTNGVGYQPYRVVVLSFELLHAPATVCGPKKSTNLVKNKCVNFNFNGLTGTGVLTESNKKFLPFQQFGRDIADTTDAVRDPQTLEILDITPCSFGGVSVITPGTNTSNQVAVLYQGVNCTEVPVAIHADQLTPTWRVYSTGSNVFQTRAGCLIGAEHVNNSYECDIPIGAGICASYQTQTNSPRRARSVASQSIIAYTMSLGAENSVAYSNNSIACPTNFTISVTTEILPVSMTKTSVDCTMYICGDSTECSNLLLQYGSFCTQLNRALTGIAVEQDKNTQEVFAQVKQIYKTPPIKDFGGFNFSQILPDPSKPSKRSFIEDLLFNKVTLADAGFIKQYGDCLGDIAARDLICAQKFNGLTVLPPLLTDEMIAQYTSALLAGTITSGWTFGAGAALQIPFAMQMAYRFNGIGVTQNVLYENQKLIANQFNSAIGKIQDSLSSTASALGKLQDVVNQNAQALNTLVKQLSSNFGAISSVLNDILSRLDKVEAEVQIDRLITGRLQSLQTYVTQQLIRAAEIRASANLAATKMSECVLGQSKRVDFCGKGYHLMSFPQSAPHGVVFLHVTYVPAQEKNFTTAPAICHDGKAHFPREGVFVSNGTHWFVTQRNFCEPQIITTDNTFVSGNCDVVIGVVNNTVYDPLQPELDSFKEELDKYFKNHTSPDVDLGDISGINASVVNIQKEIDRLNEVAKNLNESLIDLQELGKYEQYIKGGGSGGGQIYEGKLTAEGLRFGIVASRFNHALVDRLVEGAIDAIVRHGGREEDITLVRVPGSWEIPVAAGELARKEDIDAVIAIGVLIRGATPHFDYIASEVSKGLADLSLELRKPITFGVITADTLEQAIERAGTKHGNKGWEAALSAIEMANLFKSLR

SEQ ID NO: 4055 - protein, 1371 aa, Artificial Sequence
  SARS-CoV-2/Netherlands/ZuidHolland_9/2020__EPI_ISL_414445 spike protein (1-1211)(I714C_Y1110C) LumSynth construct
MFVFLVLLPLVSSQCVNLTTRTQLPPAYTNSFTRGVYYPDKVFRSSVLHSTQDLFLPFFSNVTWFHAIHVSGTNGTKRFDNPVLPFNDGVYFASTEKSNIIRGWIFGTTLDSKTQSLLIVNNATNVVIKVCEFQFCNDPFLGVYYHKNNKSWMESEFRVYSSANNCTFEYVSQPFLMDLEGKQGNFKNLREFVFKNIDGYFKIYSKHTPINLVRDLPQGFSALEPLVDLPIGINITRFQTLLALHRSYLTPGDSSSGWTAGAAAYYVGYLQPRTFLLKYNENGTITDAVDCALDPLSETKCTLKSFTVEKGIYQTSNFRVQPTESIVRFPNITNLCPFGEVFNATRFASVYAWNRKRISNCVADYSVLYNSASFSTFKCYGVSPTKLNDLCFTNVYADSFVIRGDEVRQIAPGQTGKIADYNYKLPDDFTGCVIAWNSNNLDSKVGGNYNYLYRLFRKSNLKPFERDISTEIYQAGSTPCNGVEGFNCYFPLQSYGFQPTNGVGYQPYRVVVLSFELLHAPATVCGPKKSTNLVKNKCVNFNFNGLTGTGVLTESNKKFLPFQQFGRDIADTTDAVRDPQTLEILDITPCSFGGVSVITPGTNTSNQVAVLYQGVNCTEVPVAIHADQLTPTWRVYSTGSNVFQTRAGCLIGAEHVNNSYECDIPIGAGICASYQTQTNSPRRARSVASQSIIAYTMSLGAENSVAYSNNSIACPTNFTISVTTEILPVSMTKTSVDCTMYICGDSTECSNLLLQYGSFCTQLNRALTGIAVEQDKNTQEVFAQVKQIYKTPPIKDFGGFNFSQILPDPSKPSKRSFIEDLLFNKVTLADAGFIKQYGDCLGDIAARDLICVQKFNGLTVLPPLLTDEMIAQYTSALLAGTITSGWTFGAGAALQIPFAMQMAYRFNGIGVTQNVLYENQKLIANQFNSAIGKIQDSLSSTASALGKLQDVVNQNAQALNTLVKQLSSNFGAISSVLNDILSRLDKVEAEVQIDRLITGRLQSLQTYVTQQLIRAAEIRASANLAATKMSECVLGQSKRVDFCGKGYHLMSFPQSAPHGVVFLHVTYVPAQEKNFTTAPAICHDGKAHFPREGVFVSNGTHWFVTQRNFCEPQIITTDNTFVSGNCDVVIGIVNNTVYDPLQPELDSFKEELDKYFKNHTSPDVDLGDISGINASVVNIQKEIDRLNEVAKNLNESLIDLQELGKYEQYIKGGGSGGGQIYEGKLTAEGLRFGIVASRFNHALVDRLVEGAIDAIVRHGGREEDITLVRVPGSWEIPVAAGELARKEDIDAVIAIGVLIRGATPHFDYIASEVSKGLADLSLELRKPITFGVITADTLEQAIERAGTKHGNKGWEAALSAIEMANLFKSLR

SEQ ID NO: 4056 - protein, 1371 aa, Artificial Sequence
  SARS-CoV-2/Finland/FIN03032020A/2020__EPI_ISL_413602 spike protein (1-1211)(I714C_Y1110C) LumSynth construct
MFVFLVLLPLVSSQCVNLTTRTQLPPAYTNSFTRGVYYPDKVFRSSVLHSTQDLFLPFFSNVTWFHAIHVSGTNGTKRFDNPVLPFNDGVYFASTEKSNIIRGWIFGTTLDSKTQSLLIVNNATNVVIKVCEFQFCNDPFLGVYYHKNNKSWMESEFRVYSSANNCTFEYVSQPFLMDLEGKQGNFKNLREFVFKNIDGYFKIYSKHTPINLVRDLPQGFSALEPLVDLPIGINITRFQTLLALHRSYLTPGDSSSGWTAGAAAYYVGYLQPRTFLLKYNENGTITDAVDCALDPLSETKCTLKSFTVEKGIYQTSNFRVQPTESIVRFPNITNLCPFGEVFNATRFASVYAWNRKRISNCVADYSVLYNSASFSTFKCYGVSPTKLNDLCFTNVYADSFVIRGDEVRQIAPGQTGKIADYNYKLPDDFTGCVISWNSNNLDSKVGGNYNYLYRLFRKSNLKPFERDISTEIYQAGSTPCNGVEGFNCYFPLQSYGFQPTNGVGYQPYRVVVLSFELLHAPATVCGPKKSTNLVKNKCVNFNFNGLTGTGVLTESNKKFLPFQQFGRDIADTTDAVRDPQTLEILDITPCSFGGVSVITPGTNTSNQVAVLYQGVNCTEVPVAIHADQLTPTWRVYSTGSNVFQTRAGCLIGAEHVNNSYECDIPIGAGICASYQTQTNSPRRARSVASQSIIAYTMSLGAENSVAYSNNSIACPTNFTISVTTEILPVSMTKTSVDCTMYICGDSTECSNLLLQYGSFCTQLNRALTGIAVEQDKNTQEVFAQVKQIYKTPPIKDFGGFNFSQILPDPSKPSKRSFIEDLLFNKVTLADAGFIKQYGDCLGDIAARDLICAQKFNGLTVLPPLLTDEMIAQYTSALLAGTITSGWTFGAGAALQIPFAMQMAYRFNGIGVTQNVLYENQKLIANQFNSAIGKIQDSLSSTASALGKLQDVVNQNAQALNTLVKQLSSNFGAISSVLNDILSRLDKVEAEVQIDRLITGRLQSLQTYVTQQLIRAAEIRASANLAATKMSECVLGQSKRVDFCGKGYHLMSFPQSAPHGVVFLHVTYVPAQEKNFTTAPAICHDGKAHFPREGVFVSNGTHWFVTQRNFCEPQIITTDNTFVSGNCDVVIGIVNNTVYDPLQPELDSFKEELDKYFKNHTSPDVDLGDISGINASVVNIQKEIDRLNEVAKNLNESLIDLQELGKYEQYIKGGGSGGGQIYEGKLTAEGLRFGIVASRFNHALVDRLVEGAIDAIVRHGGREEDITLVRVPGSWEIPVAAGELARKEDIDAVIAIGVLIRGATPHFDYIASEVSKGLADLSLELRKPITFGVITADTLEQAIERAGTKHGNKGWEAALSAIEMANLFKSLR

SEQ ID NO: 4057 - protein, 1371 aa, Artificial Sequence
  SARS-CoV-2/France/GE1977/2020__EPI_ISL_414632 spike protein (1-1211)(I714C_Y1110C) LumSynth construct
MFVFLVLLPLVSSQCVNLTTRTQLPPAYTNSFTRGVYYPDKVFRSSVLHSTQDLFLPFFSNVTWFHAIHVSGTNGTKRFDNPVLPFNDGVYFASTEKSNIIRGWIFGTTLDSKTQSLLIVNNATNVVIKVCEFQFCNDPFLGVYYHKNNKSWMESEFRVYSSANNCTFEYVSQPFLMDLEGKQGNFKNLREFVFKNIDGYFKIYSKHTPINLVRDLPQGFSALEPLVDLPIGINITRFQTLLALHRSYLTPGDSSSGWTAGAAAYYVGYLQPRTFLLKYNENGTITDAVDCALDPLSETKCTLKSFTVEKGIYQTSNFRVQPTESIVRFPNITNLCPFGEVFNATRFASVYAWNRKRISNCVADYSVLYNSASFSTFKCYGVSPTKLNDLCFTNVYADSFVIRGDEVRQIAPGQTGKIADYNYKLPDDFTGCVIAWNSNNLDSKVGGNYNYLYRLFRKSNLKPFERDISTEIYQAGSTPCNGVEGFNCYFPLQSYGFQPTNGVGYQPYRVVVLSFELLHAPATVCGPKKSTNLVKNKCVNFNFNGLTGTGVLTESNKKFLPFQQFGRDIADTTDAVRDPQTLEILDITPCSFGGVSVITPGTNTSNQVAVLYQGVNCTEVPVAIHADQLTPTWRVYSTGSNVFQTRAGCLIGAEHVNNSYECDIPIGAGICASYQTQTNSPRRARSVASQSIIAYTMSLGAENSVAYSNNSIACPTNFTISVTTEILPVSMTKTSVDCTMYICGDSTECSNLLLQYGSFCTQLNRALTGIAVEQDKNTQEVFAQVKQIYKTPPIKDFGGFNFSQILPDPSKPSKRSFIEDLLFNKVTLADAGFIKQYGDCLGDIAARDLICAQKFNGLTVLPPLLTDEMIAQYTSALLAGTITSGWTFGAGAALQIPFAMQMAYRFNGIGVTQNVLYENQKLIANQFNSAIGKIQDSLFSTASALGKLQDVVNQNAQALNTLVKQLSSNFGAISSVLNDILSRLDKVEAEVQIDRLITGRLQSLQTYVTQQLIRAAEIRASANLAATKMSECVLGQSKRVDFCGKGYHLMSFPQSAPHGVVFLHVTYVPAQEKNFTTAPAICHDGKAHFPREGVFVSNGTHWFVTQRNFCEPQIITTDNTFVSGNCDVVIGIVNNTVYDPLQPELDSFKEELDKYFKNHTSPDVDLGDISGINASVVNIQKEIDRLNEVAKNLNESLIDLQELGKYEQYIKGGGSGGGQIYEGKLTAEGLRFGIVASRFNHALVDRLVEGAIDAIVRHGGREEDITLVRVPGSWEIPVAAGELARKEDIDAVIAIGVLIRGATPHFDYIASEVSKGLADLSLELRKPITFGVITADTLEQAIERAGTKHGNKGWEAALSAIEMANLFKSLR

SEQ ID NO: 4058 - protein, 1371 aa, Artificial Sequence
  SARS-CoV-2/Finland/FIN-313/2020__EPI_ISL_414641 spike protein (1-1211)(I714C_Y1110C) LumSynth construct
MFVFLVLLPLVSSQCVNLTTRTQLPPAYTNSFTRGVYYPDKVFRSSVLHSTQDLFLPFFSNVTWFHAIHVSGTNGTKRFDNPVLPFNDGVYFASTEKSNIIRGWIFGTTLDSKTQSLLIVNNATNVVIKVCEFQFCNDPFLGVYYHKNNKSWMESEFRVYSSANNCTFEYVSQPFLMDLEGKQGNFKNLREFVFKNIDGYFKIYSKHTPINLVRDLPQGFSALEPLVDLPIGINITRFKTLLALHRSYLTPGDSSSGWTAGAAAYYVGYLQPRTFLLKYNENGTITDAVDCALDPLSETKCTLKSFTVEKGIYQTSNFRVQPTESIVRFPNITNLCPFGEVFNATRFASVYAWNRKRISNCVADYSVLYNSASFSTFKCYGVSPTKLNDLCFTNVYADSFVIRGDEVRQIAPGQTGKIADYNYKLPDDFTGCVIAWNSNNLDSKVGGNYNYLYRLFRKSNLKPFERDISTEIYQAGSTPCNGVEGFNCYFPLQSYGFQPTNGVGYQPYRVVVLSFELLHAPATVCGPKKSTNLVKNKCVNFNFNGLTGTGVLTESNKKFLPFQQFGRDIADTTDAVRDPQTLEILDITPCSFGGVSVITPGTNTSNQVAVLYQGVNCTEVPVAIHADQLTPTWRVYSTGSNVFQTRAGCLIGAEHVNNSYECDIPIGAGICASYQTQTNSPRRARSVASQSIIAYTMSLGAENSVAYSNNSIACPTNFTISVTTEILPVSMTKTSVDCTMYICGDSTECSNLLLQYGSFCTQLNRALTGIAVEQDKNTQEVFAQVKQIYKTPPIKDFGGFNFSQILPDPSKPSKRSFIEDLLFNKVTLADAGFIKQYGDCLGDIAARDLICAQKFNGLTVLPPLLTDEMIAQYTSALLAGTITSGWTFGAGAALQIPFAMQMAYRFNGIGVTQNVLYENQKLIANQFNSAIGKIQDSLSSTASALGKLQDVVNQNAQALNTLVKQLSSNFGAISSVLNDILSRLDKVEAEVQIDRLITGRLQSLQTYVTQQLIRAAEIRASANLAATKMSECVLGQSKRVDFCGKGYHLMSFPQSAPHGVVFLHVTYVPAQEKNFTTAPAICHDGKAHFPREGVFVSNGTHWFVTQRNFCEPQIITTDNTFVSGNCDVVIGIVNNTVYDPLQPELDSFKEELDKYFKNHTSPDVDLGDISGINASVVNIQKEIDRLNEVAKNLNESLIDLQELGKYEQYIKGGGSGGGQIYEGKLTAEGLRFGIVASRFNHALVDRLVEGAIDAIVRHGGREEDITLVRVPGSWEIPVAAGELARKEDIDAVIAIGVLIRGATPHFDYIASEVSKGLADLSLELRKPITFGVITADTLEQAIERAGTKHGNKGWEAALSAIEMANLFKSLR

SEQ ID NO: 4059 - protein, 1371 aa, Artificial Sequence
  SARS-CoV-2/Netherlands/ZuidHolland_2/2020__EPI_ISL_414556 spike protein (1-1211)(I714C_Y1110C) LumSynth construct
MFVFLVLLPLVSSQCVNLTTRTQLPPAYTNSFTRGVYYPDKVFRSSVLHSTQDLFLPFFSNVTWFHAIHVSGTNGTKRFDNPVLPFNDGVYFASTEKSNIIRGWIFGTTLDSKTQSLLIVNNATNVVIKVCEFQFCNDPFLGVYYHKNNKSWMESEFRVYSSANNCTFEYVSQPFLMDLEGKQGNFKNLREFVFKNIDGYFKIYSKHTPINLVRDLPQGFSALEPLVDLPIGINITRFQTLLALHRSYLTPGDSSSGWTAGAAAYYVGYLQPRTFLLKYNENGTITDAVDCALDPLSETKCTLKSFTVEKGIYQTSNFRVQPTESIVRFPNITNLCPFGEVFNATRFASVYAWNRKRISNCVADYSVLYNSASFSTFKCYGVSPTKLNDLCFTNVYADSFVIRGDEVRQIAPGQTGKIADYNYKLPDDFTGCVIAWNSNNLDSKVGGNYNYLYRLFRKSNLKPFERDISTEIYQAGSTPCNGVEGFNCYFPLQSYGFQPTNGVGYQPYRVVVLSFELLHAPATVCGPKKSTNLVKNKCVNFNFNGLTGTGVLTESNKKFLPFQQFGRDIADTTDAVRDPQTLEILDITPCSFGGVSVITPGTNTSNQVAVLYQGVNCTEVPVAIHADQLTPTWRVYSTGSNVFQTRAGCLIGAEHVNNSYECDIPIGAGICASYQTQTNSPRRARSVASQSIIAYTMSLGAENSVAYSNNSIACPTNFTISVTTEILPVSMTKTSVDCTMYICGDSTECSNLLLQYGSFCTQLNRALTGIALEQDKNTQEVFAQVKQIYKTPPIKDFGGFNFSQILPDPSKPSKRSFIEDLLFNKVTLADAGFIKQYGDCLGDIAARDLICAQKFNGLTVLPPLLTDEMIAQYTSALLAGTITSGWTFGAGAALQIPFAMQMAYRFNGIGVTQNVLYENQKLIANQFNSAIGKIQDSLSSTASALGKLQDVVNQNAQALNTLVKQLSSNFGAISSVLNDILSRLDKVEAEVQIDRLITGRLQSLQTYVTQQLIRAAEIRASANLAATKMSECVLGQSKRVDFCGKGYHLMSFPQSAPHGVVFLHVTYVPAQEKNFTTAPAICHDGKAHFPREGVFVSNGTHWFVTQRNFCEPQIITTDNTFVSGNCDVVIGIVNNTVYDPLQPELDSFKEELDKYFKNHTSPDVDLGDISGINASVVNIQKEIDRLNEVAKNLNESLIDLQELGKYEQYIKGGGSGGGQIYEGKLTAEGLRFGIVASRFNHALVDRLVEGAIDAIVRHGGREEDITLVRVPGSWEIPVAAGELARKEDIDAVIAIGVLIRGATPHFDYIASEVSKGLADLSLELRKPITFGVITADTLEQAIERAGTKHGNKGWEAALSAIEMANLFKSLR

SEQ ID NO: 4060 - protein, 1371 aa, Artificial Sequence
  SARS-CoV-2/USA/WA-UW31/2020__EPI_ISL_414618 spike protein (1-1211)(I714C_Y1110C) LumSynth construct
MFVFLVLLPLVSSQCVNLTTRTQLPPAYTNSFTRGVYYPDKVFRSSVLHSTQDLFLPFFSNVTWFHAIHVSGTNGTKRFDNPVLPFNDGVYFASTEKSNIIRGWIFGTTLDSKTQSLLIVNNATNVVIKVCEFQFCNDPFLGVYYHKNNKSWMESEFRVYSSANNCTFEYVSQPFLMDLEGKQGNFKNLREFVFKNIDGYFKIYSKHTPINLVRDLPQGFSALEPLVDLPIGINITRFQTLLALHRSYLTPGDSSSGWTAGAAAYYVGYLQPRTFLLKYNENGTITDAVDCALDPLSETKCTLKSFTVEKGIYQTSNFRVQPTESIVRFPNITNLCPFGEVFNATRFASVYAWNRKRISNCVADYSVLYNSASFSTFKCYGVSPTKLNDLCFTNVYADSFVIRGDEVRQIAPGQTGKIADYNYKLPDDFTGCVIAWNSNNLDSKVGGNYNYLYRLFRKSNLKPFERDISTEIYQAGSTPCNGAEGFNCYFPLQSYGFQPTNGVGYQPYRVVVLSFELLHAPATVCGPKKSTNLVKNKCVNFNFNGLTGTGVLTESNKKFLPFQQFGRDIADTTDAVRDPQTLEILDITPCSFGGVSVITPGTNTSNQVAVLYQDVNCTEVPVAIHADQLTPTWRVYSTGSNVFQTRAGCLIGAEHVNNSYECDIPIGAGICASYQTQTNSPRRARSVASQSIIAYTMSLGAENSVAYSNNSIACPTNFTISVTTEILPVSMTKTSVDCTMYICGDSTECSNLLLQYGSFCTQLNRALTGIAVEQDKNTQEVFAQVKQIYKTPPIKDFGGFNFSQILPDPSKPSKRSFIEDLLFNKVTLADAGFIKQYGDCLGDIAARDLICAQKFNGLTVLPPLLTDEMIAQYTSALLAGTITSGWTFGAGAALQIPFAMQMAYRFNGIGVTQNVLYENQKLIANQFNSAIGKIQDSLSSTASALGKLQDVVNQNAQALNTLVKQLSSNFGAISSVLNDILSRLDKVEAEVQIDRLITGRLQSLQTYVTQQLIRAAEIRASANLAATKMSECVLGQSKRVDFCGKGYHLMSFPQSAPHGVVFLHVTYVPAQEKNFTTAPAICHDGKAHFPREGVFVSNGTHWFVTQRNFCEPQIITTDNTFVSGNCDVVIGIVNNTVYDPLQPELDSFKEELDKYFKNHTSPDVDLGDISGINASVVNIQKEIDRLNEVAKNLNESLIDLQELGKYEQYIKGGGSGGGQIYEGKLTAEGLRFGIVASRFNHALVDRLVEGAIDAIVRHGGREEDITLVRVPGSWEIPVAAGELARKEDIDAVIAIGVLIRGATPHFDYIASEVSKGLADLSLELRKPITFGVITADTLEQAIERAGTKHGNKGWEAALSAIEMANLFKSLR

SEQ ID NO: 4061 - protein, 1371 aa, Artificial Sequence
  SARS-CoV-2/South Korea/SNU01/2020__EPI_ISL_411929 spike protein (1-1211)(I714C_Y1110C) LumSynth construct
MFVFLVLLPLVSSQCVNLTTRTQLPPAYTNSFTRGVYYPDKVFRSSVLHSTQDLFLPFFSNVTWFHAIHVSGTNGTKRFDNPVLPFNDGVYFASTEKSNIIRGWIFGTTLDSKTQSLLIVNNATNVVIKVCEFQFCNDPFLGVYYHKNNKSWMESEFRVYSSANNCTFEYVSQPFLMDLEGKQGNFKNLREFVFKNIDGYFKIYSKHTPINLVRDLPQGFWALEPLVDLPIGINITRFQTLLALHRSYLTPGDSSSGWTAGAAAYYVGYLQPRTFLLKYNENGTITDAVDCALDPLSETKCTLKSFTVEKGIYQTSNFRVQPTESIVRFPNITNLCPFGEVFNATRFASVYAWNRKRISNCVADYSVLYNSASFSTFKCYGVSPTKLNDLCFTNVYADSFVIRGDEVRQIAPGQTGKIADYNYKLPDDFTGCVIAWNSNNLDSKVGGNYNYLYRLFRKSNLKPFERDISTEIYQAGSTPCNGVEGFNCYFPLQSYGFQPTNGVGYQPYRVVVLSFELLHAPATVCGPKKSTNLVKNKCVNFNFNGLTGTGVLTESNKKFLPFQQFGRDIADTTDAVRDPQTLEILDITPCSFGGVSVITPGTNTSNQVAVLYQDVNCTEVPVAIHADQLTPTWRVYSTGSNVFQTRAGCLIGAEHVNNSYECDIPIGAGICASYQTQTNSPRRARSVASQSIIAYTMSLGAENSVAYSNNSIACPTNFTISVTTEILPVSMTKTSVDCTMYICGDSTECSNLLLQYGSFCTQLNRALTGIAVEQDKNTQEVFAQVKQIYKTPPIKDFGGFNFSQILPDPSKPSKRSFIEDLLFNKVTLADAGFIKQYGDCLGDIAARDLICAQKFNGLTVLPPLLTDEMIAQYTSALLAGTITSGWTFGAGAALQIPFAMQMAYRFNGIGVTQNVLYENQKLIANQFNSAIGKIQDSLSSTASALGKLQDVVNQNAQALNTLVKQLSSNFGAISSVLNDILSRLDKVEAEVQIDRLITGRLQSLQTYVTQQLIRAAEIRASANLAATKMSECVLGQSKRVDFCGKGYHLMSFPQSAPHGVVFLHVTYVPAQEKNFTTAPAICHDGKAHFPREGVFVSNGTHWFVTQRNFCEPQIITTDNTFVSGNCDVVIGIVNNTVYDPLQPELDSFKEELDKYFKNHTSPDVDLGDISGINASVVNIQKEIDRLNEVAKNLNESLIDLQELGKYEQYIKGGGSGGGQIYEGKLTAEGLRFGIVASRFNHALVDRLVEGAIDAIVRHGGREEDITLVRVPGSWEIPVAAGELARKEDIDAVIAIGVLIRGATPHFDYIASEVSKGLADLSLELRKPITFGVITADTLEQAIERAGTKHGNKGWEAALSAIEMANLFKSLR

SEQ ID NO: 4062 - protein, 1371 aa, Artificial Sequence
  SARS-CoV-2/China/WF0004/2020__EPI_ISL_413694 spike protein (1-1211)(I714C_Y1110C) LumSynth construct
MFVFLVLLPLVSSQCVNLTTRTQLPPAYTNSFTRGVYYPDKVFRSSVLHSTQDLFLPFFSNVTWFHAIHVSGTNGTKRFDNPVLPFNDGVYFASTEKSNIIRGWIFGTTLDSKTQSLLIVNNATNVVIKVCEFQFCNDPFLGVYYHKNNKSWTESEFRVYSSANNCTFEYVSQPFLMDLEGKQGNFKNLREFVFKNIDGYFKIYSKHTPINLVRDLPQGFSALEPLVDLPIGINITRFQTLLALHRSYLTPGDSSSGWTAGAAAYYVGYLQPRTFLLKYNENGTITDAVDCALDPLSETKCTLKSFTVEKGIYQTSNFRVQPTESIVRFPNITNLCPFGEVFNATRFASVYAWNRKRISNCVADYSVLYNSASFSTFKCYGVSPTKLNDLCFTNVYADSFVIRGDEVRQIAPGQTGKIADYNYKLPDDFTGCVIAWNSNNLDSKVGGNYNYLYRLFRKSNLKPFERDISTEIYQAGSTPCNGVEGFNCYFPLQSYGFQPTNGVGYQPYRVVVLSFELLHAPATVCGPKKSTNLVKNKCVNFNFNGLTGTGVLTESNKKFLPFQQFGRDIADTTDAVRDPQTLEILDITPCSFGGVSVITPGTNTSNQVAVLYQDVNCTEVPVAIHADQLTPTWRVYSTGSNVFQTRAGCLIGAEHVNNSYECDIPIGAGICASYQTQTNSPRRARSVASQSIIAYTMSLGAENSVAYSNNSIACPTNFTISVTTEILPVSMTKTSVDCTMYICGDSTECSNLLLQYGSFCTQLNRALTGIAVEQDKNTQEVFAQVKQIYKTPPIKDFGGFNFSQILPDPSKPSKRSFIEDLLFNKVTLADAGFIKQYGDCLGDIAARDLICAQKFNGLTVLPPLLTDEMIAQYTSALLAGTITSGWTFGAGAALQIPFAMQMAYRFNGIGVTQNVLYENQKLIANQFNSAIGKIQDSLSSTASALGKLQDVVNQNAQALNTLVKQLSSNFGAISSVLNDILSRLDKVEAEVQIDRLITGRLQSLQTYVTQQLIRAAEIRASANLAATKMSECVLGQSKRFDFCGKGYHLMSFPQSAPHGVVFLHVTYVPAQEKNFTTAPAICHDGKAHFPREGVFVSNGTHWFVTQRNFCEPQIITTDNTFVSGNCDVVIGIVNNTVYDPLQPELDSFKEELDKYFKNHTSPDVDLGDISGINASVVNIQKEIDRLNEVAKNLNESLIDLQELGKYEQYIKGGGSGGGQIYEGKLTAEGLRFGIVASRFNHALVDRLVEGAIDAIVRHGGREEDITLVRVPGSWEIPVAAGELARKEDIDAVIAIGVLIRGATPHFDYIASEVSKGLADLSLELRKPITFGVITADTLEQAIERAGTKHGNKGWEAALSAIEMANLFKSLR

SEQ ID NO: 4063 - protein, 1371 aa, Artificial Sequence
  SARS-CoV-2/China/WF0028/2020__EPI_ISL_413791 spike protein (1-1211)(I714C_Y1110C) LumSynth construct
MFVFLVLLPLVSSQCVNLTTRTQLPPAYTNSFTRGVYYPDKVFRSSVLHSTQDLFLPFFSNVTWFHAIHVSGTNGTKRFDNPVLPFNDGVYFASTEKSNIIRGWIFGTTLDSKTQSLLIVNNATNVVIKVCEFQFCNDPFLGVYYHKNNKSWMESEFRVYSSANNCTFEYVSQPFLMDLEGKQGNFKNLREFVFKNIDGYFKIYSKHTPINLVRDLPQGFSALEPLVDLPIGINITRFQTLLALHRSYLTPGDSSSGWTAGAAAYYVGYLQPRTFLLKYNENGTITDAVDCALDPLSETKCTLKSFTVEKGIYQTSNFRVQPTESIVRFPNITNLCPFGEVFNATRFASVYAWNRKRISNCVADYSVLYNSASFSTFKCYGVSPTKLNDLCFTNVYADSFVIRGDEVRQIAPGQTGKIADYNYKLPDDFTGCVIAWNSNNLDSKVGGNYNYLYRLFRKSNLKPFERDISTEIYQAGSTPCNGVEGFNCYFPLQSYGFQPTNGVGYQPYRVVVLSFELLHAPATVCGPKKSTNLVKNKCVNFNFNGLTGTGVLTESNKKFLPFQQFGRDIADTTDAVRDPQTLEILDITPCSFGGVSVITPGTNTSNQVAVLYQDVNCTEVPVAIHADQLTPTWRVYSTGSNVFQTRAGCLIGAEHVNNSYECDIPIGAGICASYQTQTNSPRRARSVASQSIIAYTMSLGAENSVAYSNNSIACPTNFTISVTTEILPVSMTKTSVDCTMYICGDSTECSNLLLQYGSFCTQLNRALTGIAVEQDKNTQEVFAQVKQIYKTPPIKDFGGFNFSQILPDPSKPSKRSFIEDLLFNKVTLADAGFIKQYGDCLGDIAARDLICAQKFNGLTVLPPLLTDEMIAQYTSALLAGTITSGWTFGAGAALQIPFAMQMAYRFNGIGVTQNVLYENQKLIANQFNSAIGKIQDSLSSTASALGKLQDVVNQNAQALNTLVKQLSSNFGAISSVLNDILSRLDKVEAEVQIDRLITGRLQSLQTYVTQQLIRAAEIRASANLAATKMSECVLGQSKRVDFCGKGYHLMSFPQSAPHGVVFLHVTYVPAQEKNFTTAPAICHDGKAHFPREGVFVSNGTHWFVTQRNFCEPQIITTDNTFVSGNCDVVIGIVNNTVYDPLQPELESFKEELDKYFKNHTSPDVDLGDISGINASVVNIQKEIDRLNEVAKNLNESLIDLQELGKYEQYIKGGGSGGGQIYEGKLTAEGLRFGIVASRFNHALVDRLVEGAIDAIVRHGGREEDITLVRVPGSWEIPVAAGELARKEDIDAVIAIGVLIRGATPHFDYIASEVSKGLADLSLELRKPITFGVITADTLEQAIERAGTKHGNKGWEAALSAIEMANLFKSLR

SEQ ID NO: 4064 - protein, 1371 aa, Artificial Sequence
  SARS-CoV-2/2019-nCoV/USA-CruiseA-18/2020__MT159716.1 spike protein (1-1211)(I714C_Y1110C) LumSynth construct
MFVFLVLLPLVSSQCVNLTTRTQLPPAYTNSFTRGVYYPDKVFRSSVLHSTQDLFLPFFSNVTWFHAIHVSGTNGTKRFDNPVLPFNDGVYFASTEKSNIIRGWIFGTTLDSKTQSLLIVNNATNVVIKVCEFQFCNDPFLGVYYHKNNKSWMESELRVYSSANNCTFEYVSQPFLMDLEGKQGNFKNLREFVFKNIDGYFKIYSKHTPINLVRDLPQGFSALEPLVDLPIGINITRFQTLLALHRSYLTPGDSSSGWTAGAAAYYVGYLQPRTFLLKYNENGTITDAVDCALDPLSETKCTLKSFTVEKGIYQTSNFRVQPTESIVRFPNITNLCPFGEVFNATRFASVYAWNRKRISNCVADYSVLYNSASFSTFKCYGVSPTKLNDLCFTNVYADSFVIRGDEVRQIAPGQTGKIADYNYKLPDDFTGCVIAWNSNNLDSKVGGNYNYLYRLFRKSNLKPFERDISTEIYQAGSTPCNGVEGFNCYFPLQSYGFQPTNGVGYQPYRVVVLSFELLHAPATVCGPKKSTNLVKNKCVNFNFNGLTGTGVLTESNKKFLPFQQFGRDIADTTDAVRDPQTLEILDITPCSFGGVSVITPGTNTSNQVAVLYQDVNCTEVPVAIHADQLTPTWRVYSTGSNVFQTRAGCLIGAEHVNNSYECDIPIGAGICASYQTQTNSPRRARSVASQSIIAYTMSLGAENSVAYSNNSIACPTNFTISVTTEILPVSMTKTSVDCTMYICGDSTECSNLLLQYGSFCTQLNRALTGIAVEQDKNTQEVFAQVKQIYKTPPIKDFGGFNFSQILPDPSKPSKRSFIEDLLFNKVTLADAGFIKQYGDCLGDIAARDLICAQKFNGLTVLPPLLTDEMIAQYTSALLAGTITSGWTFGAGAALQIPFAMQMAYRFNGIGVTQNVLYENQKLIANQFNSAIGKIQDSLSSTASALGKLQDVVNQNAQALNTLVKQLSSNFGAISSVLNDILSRLDKVEAEVQIDRLITGRLQSLQTYVTQQLIRAAEIRASANLAATKMSECVLGQSKRVDFCGKGYHLMSFPQSAPHGVVFLHVTYVPAQEKNFTTAPAICHDGKAHFPREGVFVSNGTHWFVTQRNFCEPQIITTDNTFVSGNCDVVIGIVNNTVYDPLQPELDSFKEELDKYFKNHTSPDVDLGDISGINASVVNIQKEIDRLNEVAKNLNESLIDLQELGKYEQYIKGGGSGGGQIYEGKLTAEGLRFGIVASRFNHALVDRLVEGAIDAIVRHGGREEDITLVRVPGSWEIPVAAGELARKEDIDAVIAIGVLIRGATPHFDYIASEVSKGLADLSLELRKPITFGVITADTLEQAIERAGTKHGNKGWEAALSAIEMANLFKSLR

SEQ ID NO: 4065 - protein, 1371 aa, Artificial Sequence
  SARS-CoV-2/SARS-CoV-2/Yunnan-01/human/2020/CHN__MT049951.1 spike protein (1-1211)(I714C_Y1110C) LumSynth construct
MFVFLVLLPLVSSQCVNLTTRTQLPPANTNSFTRGVYYPDKVFRSSVLHSTQDLFLPFFSNVTWFHAIHVSGTNGTKRFDNPVLPFNDGVYFASTEKSNIIRGWIFGTTLDSKTQSLLIVNNATNVVIKVCEFQFCNDPFLGVYYHKNNKSWMESEFRVYSSANNCTFEYVSQPFLMDLEGKQGNFKNLREFVFKNIDGYFKIYSKHTPINLVRDLPQGFSALEPLVDLPIGINITRFQTLLALHRSYLTPGDSSSGWTAGAAAYYVGYLQPRTFLLKYNENGTITDAVDCALDPLSETKCTLKSFTVEKGIYQTSNFRVQPTESIVRFPNITNLCPFGEVFNATRFASVYAWNRKRISNCVADYSVLYNSASFSTFKCYGVSPTKLNDLCFTNVYADSFVIRGDEVRQIAPGQTGKIADYNYKLPDDFTGCVIAWNSNNLDSKVGGNYNYLYRLFRKSNLKPFERDISTEIYQAGSTPCNGVEGFNCYFPLQSYGFQPTNGVGYQPYRVVVLSFELLHAPATVCGPKKSTNLVKNKCVNFNFNGLTGTGVLTESNKKFLPFQQFGRDIADTTDAVRDPQTLEILDITPCSFGGVSVITPGTNTSNQVAVLYQDVNCTEVPVAIHADQLTPTWRVYSTGSNVFQTRAGCLIGAEHVNNSYECDIPIGAGICASYQTQTNSPRRARSVASQSIIAYTMSLGAENSVAYSNNSIACPTNFTISVTTEILPVSMTKTSVDCTMYICGDSTECSNLLLQYGSFCTQLNRALTGIAVEQDKNTQEVFAQVKQIYKTPPIKDFGGFNFSQILPDPSKPSKRSFIEDLLFNKVTLADAGFIKQYGDCLGDIAARDLICAQKFNGLTVLPPLLTDEMIAQYTSALLAGTITSGWTFGAGAALQIPFAMQMAYRFNGIGVTQNVLYENQKLIANQFNSAIGKIQDSLSSTASALGKLQDVVNQNAQALNTLVKQLSSNFGAISSVLNDILSRLDKVEAEVQIDRLITGRLQSLQTYVTQQLIRAAEIRASANLAATKMSECVLGQSKRVDFCGKGYHLMSFPQSAPHGVVFLHVTYVPAQEKNFTTAPAICHDGKAHFPREGVFVSNGTHWFVTQRNFCEPQIITTDNTFVSGNCDVVIGIVNNTVYDPLQPELDSFKEELDKYFKNHTSPDVDLGDISGINASVVNIQKEIDRLNEVAKNLNESLIDLQELGKYEQYIKGGGSGGGQIYEGKLTAEGLRFGIVASRFNHALVDRLVEGAIDAIVRHGGREEDITLVRVPGSWEIPVAAGELARKEDIDAVIAIGVLIRGATPHFDYIASEVSKGLADLSLELRKPITFGVITADTLEQAIERAGTKHGNKGWEAALSAIEMANLFKSLR

SEQ ID NO: 4066 - protein, 1371 aa, Artificial Sequence
  SARS-CoV-2/USA/WA-UW292/2020__EPI_ISL_418077 spike protein (1-1211)(I714C_Y1110C) LumSynth construct
MFVFLVLLPLVSSQCVNLTTRTQLPPAYTNSFTRGVYYPDKVFRSSVLHSTQDLFLPFFSNVTWFHAIHVSGTNGTKRFDNPVLPFNDGVYFASTEKSNIIRGWIFGTTLDSKTQSLLIVNNATNVVIKVCEFQFCNDPFLGVYYHKNNKSWMESEFRVYSSANNCTFEYVSQPFLMDLEGKQGNFKNLREFVFKNIDGYFKIYSKHTPINLVRDLPQGFSALEPLVDLPIGINITRFQTLLALHRSYLTPGDSSSGWTAGAAAYYVGYLQPRTFLLKYNENGTITDAVDCALDPLSETKCTLKSFTVEKGIYQTSNFRVQPTESIVRFPNITNLCPFGEVFNATRFASVYAWNRKRISNCVADYSVLYNSASFSTFKCYGVSPTKLNDLCFTNVYADSFVIRGDEVRQIAPGQTGKIADYNYKLPDDFTGCVIAWNSNNLDSKVGGNYNYLYRLFRKSNLKPFERDISTEIYQASSTPCNGVEGFNCYFPLQSYGFQPTNGVGYQPYRVVVLSFELLHAPATVCGPKKSTNLVKNKCVNFNFNGLTGTGVLTESNKKFLPFQQFGRDIADTTDAVRDPQTLEILDITPCSFGGVSVITPGTNTSNQVAVLYQDVNCTEVPVAIHADQLTPTWRVYSTGSNVFQTRAGCLIGAEHVNNSYECDIPIGAGICASYQTQTNSPRRARSVASQSIIAYTMSLGAENSVAYSNNSIACPTNFTISVTTEILPVSMTKTSVDCTMYICGDSTECSNLLLQYGSFCTQLNRALTGIAVEQDKNTQEVFAQVKQIYKTPPIKDFGGFNFSQILPDPSKPSKRSFIEDLLFNKVTLADAGFIKQYGDCLGDIAARDLICAQKFNGLTVLPPLLTDEMIAQYTSALLAGTITSGWTFGAGAALQIPFAMQMAYRFNGIGVTQNVLYENQKLIANQFNSAIGKIQDSLSSTASALGKLQDVVNQNAQALNTLVKQLSSNFGAISSVLNDILSRLDKVEAEVQIDRLITGRLQSLQTYVTQQLIRAAEIRASANLAATKMSECVLGQSKRVDFCGKGYHLMSFPQSAPHGVVFLHVTYVPAQEKNFTTAPAICHDGKAHFPREGVFVSNGTHWFVTQRNFCEPQIITTDNTFVSGNCDVVIGIVNNTVYDPLQPELDSFKEELDKYFKNHTSPDVDLGDISGINASVVNIQKEIDRLNEVAKNLNESLIDLQELGKYEQYIKGGGSGGGQIYEGKLTAEGLRFGIVASRFNHALVDRLVEGAIDAIVRHGGREEDITLVRVPGSWEIPVAAGELARKEDIDAVIAIGVLIRGATPHFDYIASEVSKGLADLSLELRKPITFGVITADTLEQAIERAGTKHGNKGWEAALSAIEMANLFKSLR

SEQ ID NO: 4067 - protein, 1371 aa, Artificial Sequence
  SARS-CoV-2/Iceland/192/2020__EPI_ISL_417819 spike protein (1-1211)(I714C_Y1110C) LumSynth construct
MFVFFVLLPLVSSQCVNLTTRTQLPPAYTNSFTRGVYYPDKVFRSSVLHSTQDLFLPFFSNVTWFHAIHVSGTNGTKRFDNPVLPFNDGVYFASTEKSNIIRGWIFGTTLDSKTQSLLIVNNATNVVIKVCEFQFCNDPFLGVYYHKNNKSWMESEFRVYSSANNCTFEYVSQPFLMDLEGKQGNFKNLREFVFKNIDGYFKIYSKHTPINLVRDLPQGFSALEPLVDLPIGINITRFQTLLALHRSYLTPGDSSSGWTAGAAAYYVGYLQPRTFLLKYNENGTITDAVDCALDPLSETKCTLKSFTVEKGIYQTSNFRVQPTESIVRFPNITNLCPFGEVFNATRFASVYAWNRKRISNCVADYSVLYNSASFSTFKCYGVSPTKLNDLCFTNVYADSFVIRGDEVRQIAPGQTGKIADYNYKLPDDFTGCVIAWNSNNLDSKVGGNYNYLYRLFRKSNLKPFERDISTEIYQAGSTPCNGVEGFNCYFPLQSYGFQPTNGVGYQPYRVVVLSFELLHAPATVCGPKKSTNLVKNKCVNFNFNGLTGTGVLTESNKKFLPFQQFGRDIADTTDAVRDPQTLEILDITPCSFGGVSVITPGTNTSNQVAVLYQGVNCTEVPVAIHADQLTPTWRVYSTGSNVFQTRAGCLIGAEHVNNSYECDIPIGAGICASYQTQTNSPRRARSVASQSIIAYTMSLGAENSVAYSNNSIACPTNFTISVTTEILPVSMTKTSVDCTMYICGDSTECSNLLLQYGSFCTQLNRALTGIAVEQDKNTQEVFAQVKQIYKTPPIKDFGGFNFSQILPDPSKPSKRSFIEDLLFNKVTLADAGFIKQYGDCLGDIAARDLICAQKFNGLTVLPPLLTDEMIAQYTSALLAGTITSGWTFGAGAALQIPFAMQMAYRFNGIGVTQNVLYENQKLIANQFNSAIGKIQDSLSSTASALGKLQDVVNQNAQALNTLVKQLSSNFGAISSVLNDILSRLDKVEAEVQIDRLITGRLQSLQTYVTQQLIRAAEIRASANLAATKMSECVLGQSKRVDFCGKGYHLMSFPQSAPHGVVFLHVTYVPAQEKNFTTAPAICHDGKAHFPREGVFVSNGTHWFVTQRNFCEPQIITTDNTFVSGNCDVVIGIVNNTVYDPLQPELDSFKEELDKYFKNHTSPDVDLGDISGINASVVNIQKEIDRLNEVAKNLNESLIDLQELGKYEQYIKGGGSGGGQIYEGKLTAEGLRFGIVASRFNHALVDRLVEGAIDAIVRHGGREEDITLVRVPGSWEIPVAAGELARKEDIDAVIAIGVLIRGATPHFDYIASEVSKGLADLSLELRKPITFGVITADTLEQAIERAGTKHGNKGWEAALSAIEMANLFKSLR

SEQ ID NO: 4068 - protein, 1371 aa, Artificial Sequence
  SARS-CoV-2/Belgium/ULG-6939/2020__EPI_ISL_417020 spike protein (1-1211)(I714C_Y1110C) LumSynth construct
MFVFLVLLPLVSSQCVNLTTRTQLPPAYTNSFTRGVYYPDKVFRSSVLHSTQDLFLPFFSNVTWFHAIHVSGTNGTKRFDNPVLPFNDGVYFASTEKSNIIRGWIFGTTLDSKTQSLLIVNNATNVVIKVCEFQFCNDPFLGVYYHKNNKSWMESEFRVYSSANNCTFEYVSQPFLMDLEGKQGNFKNLREFVFKNIDGYFKIYSKHTPINLVRDLPQGFSALEPLVDLPIGINITRFQTLLALHRSYLTPGDSSSGWTAGAAAYYVGYLQPRTFLLKYNENGTITDAVDCALDPLSETKCTLKSFTVEKGIYQTSNFRVQPTESIVRFPNITNLCPFGEVFNATRFASVYAWNRKRISNCVADYSVLYNSASFSTFKCYGVSPTKLNDLCFTNVYADSFVIRGDEVRQIAPGQTGKIADYNYKLPDDFTGCVIAWNSNNLDSKVGGNYNYLYRLFRKSNLKPFERDISTEIYQAGSTPCNGVEGFNCYFPLQSYGFQPTNGVGYQPYRVVVLSFELLHAPATVCGPKKSTNLVKNKCVNFNFNGLTGTGVLTESNKKFLPFQQFGRDIADTTDAVRDPQTLEILDITPCSFGGVSVITPGTNTSNQVAVLYQGVNCTEVPVAIHADQLTPTWRVYSTGSNVFQTRAGCLIGAEHVNNSYECDIPIGAGICASYQTQTNSPRRARSVASQSIIAYTMSLGAENSVVYSNNSIACPTNFTISVTTEILPVSMTKTSVDCTMYICGDSTECSNLLLQYGSFCTQLNRALTGIAVEQDKNTQEVFAQVKQIYKTPPIKDFGGFNFSQILPDPSKPSKRSFIEDLLFNKVTLADAGFIKQYGDCLGDIAARDLICAQKFNGLTVLPPLLTDEMIAQYTSALLAGTITSGWTFGAGAALQIPFAMQMAYRFNGIGVTQNVLYENQKLIANQFNSAIGKIQDSLSSTASALGKLQDVVNQNAQALNTLVKQLSSNFGAISSVLNDILSRLDKVEAEVQIDRLITGRLQSLQTYVTQQLIRAAEIRASANLAATKMSECVLGQSKRVDFCGKGYHLMSFPQSAPHGVVFLHVTYVPAQEKNFTTAPAICHDGKAHFPREGVFVSNGTHWFVTQRNFCEPQIITTDNTFVSGNCDVVIGIVNNTVYDPLQPELDSFKEELDKYFKNHTSPDVDLGDISGINASVVNIQKEIDRLNEVAKNLNESLIDLQELGKYEQYIKGGGSGGGQIYEGKLTAEGLRFGIVASRFNHALVDRLVEGAIDAIVRHGGREEDITLVRVPGSWEIPVAAGELARKEDIDAVIAIGVLIRGATPHFDYIASEVSKGLADLSLELRKPITFGVITADTLEQAIERAGTKHGNKGWEAALSAIEMANLFKSLR

SEQ ID NO: 4069 - protein, 1371 aa, Artificial Sequence
  SARS-CoV-2/France/HF2496/2020__EPI_ISL_418231 spike protein (1-1211)(I714C_Y1110C) LumSynth construct
MFVFLVLLPLVSSQCVNLTTRTQLPPAYTNSFTRGVYYPDKVFRSSVLHSTQDLFLPFFSNVTWFHAIHVSGTNGTKRFDNPVLPFNDGVYFASTEKSNIIRGWIFGTTLDSKTQSLLIVNNATNVVIKVCEFQFCNDPFLGVYYHKNNKSWMESEFRVYSSANNCTFEYVSQPFLMDLEGKQGNFKNLREFVFKNIDGYFKIYSKHTPINLVRDLPQGFSALEPLVDLPIGINITRFQTLLALHRSYLTPGDSSSGWTAGAAAYYVGYLQPRTFLLKYNENGTITDAVDCALDPLSETKCTLKSFTVEKGIYQTSNFRVQPTESIVRFPNITNLCPFGEVFNATRFASVYAWNRKRISNCVADYSVLYNSASFSTFKCYGVSPTKLNDLCFTNVYADSFVIRGDEVRQIAPGQTGKIADYNYKLPDDFTGCVIAWNSNNLDSKVGGNYNYLYRLFRKSNLKPFERDISTEIYQAGSTPCNGVEGFNCYFPLQSYGFQPTNGVGYQPYRVVVLSFELLHAPATVCGPKKSTNLVKNKCVNFNFNGLTGTGVLTESNKKFLPFQQFGRDIADTTDAVRDPQTLEILDITPCSFGGVSVITPGTNTSNQVAVLYQGVNCTEVPVAIHADQLTPTWRVYSTGSNVFQTRAGCLIGAEHVNNSYECDIPIGAGICASYQTQTNSPRRARSVASQSIIAYTMSLGAENSVAYSNNSIACPTNFTISVTTEILPVSMTKTSVDCTMYICGDSTECSNLLLQYGSFCTQLNRALTGIAVEQDKNTQEVFAQVKQIYKTPPIKDFGGFNFSQILPDPSKPSKRSFIEDLLFNKVTLADAGFIKQYGDCLGDIVARDLICAQKFNGLTVLPPLLTDEMIAQYTSALLAGTITSGWTFGAGAALQIPFAMQMAYRFNGIGVTQNVLYENQKLIANQFNSAIGKIQDSLSSTASALGKLQDVVNQNAQALNTLVKQLSSNFGAISSVLNDILSRLDKVEAEVQIDRLITGRLQSLQTYVTQQLIRAAEIRASANLAATKMSECVLGQSKRVDFCGKGYHLMSFPQSAPHGVVFLHVTYVPAQEKNFTTAPAICHDGKAHFPREGVFVSNGTHWFVTQRNFCEPQIITTDNTFVSGNCDVVIGIVNNTVYDPLQPELDSFKEELDKYFKNHTSPDVDLGDISGINASVVNIQKEIDRLNEVAKNLNESLIDLQELGKYEQYIKGGGSGGGQIYEGKLTAEGLRFGIVASRFNHALVDRLVEGAIDAIVRHGGREEDITLVRVPGSWEIPVAAGELARKEDIDAVIAIGVLIRGATPHFDYIASEVSKGLADLSLELRKPITFGVITADTLEQAIERAGTKHGNKGWEAALSAIEMANLFKSLR

SEQ ID NO: 4070 - protein, 1371 aa, Artificial Sequence
  SARS-CoV-2/USA/WA-UW291/2020__EPI_ISL_418076 spike protein (1-1211)(I714C_Y1110C) LumSynth construct
MFVFLVLLPLVSSQCVNLTTRTQLPPAYTNSFTRGVYYPDKVFRSSVLHSTQDLFLPFFSNVTWFHAIHVSGTNGTKRFDNPVLPFNDGVYFASTEKSNIIRGWIFGTTLDSKTQSLLIVNNATNVVIKVCEFQFCNDPFLGVYYHKNNKSWMESEFRVYSSANNCTFEYVSQPFLMDLEGKQGNFKNLREFVFKNIDGYFKIYSKHTPINLVRDLPQGFSALEPLVDLPIGINITRFQTLLALHRSYLTPGDSSSGWTAGAAAYYVGYLQPRTFLLKYNENGTITDAVDCALDPLSETKCTLKSFTVEKGIYQTSNFRVQPTESIVRFPNITNLCPFGEVFNATRFASVYAWNRKRISNCVADYSVLYNSASFSTFKCYGVSPTKLNDLCFTNVYADSFVIRGDEVRQIAPGQTGKIADYNYKLPDDFTGCVIAWNSNNLDSKVGGNYNYLYRLFRKSNLKPFERDISTEIYQAGSTPCNGVEGFNCYFPLQSYGFQPTNGVGYQPYRVVVLSFELLHAPATVCGPKKSTNLVKNKCVNFNFNGLTGTGVLTESNKKFLPFQQFGRDIADTTDAVRDPQTLEILDITPCSFGGVSVITPGTNTSNQVAVLYQGVNCTEVPVAIHADQLTPTWRVYSTGSNVFQTRAGCLIGAEHVNNSYECDIPIGAGICASYQTQTNSPRRARSVASQSIIAYTMSLGAENSVAYSNNSIACPTNFTISVTTEILPVSMTKTSVDCTMYICGDSTECSNLLLQYGSFCTQLNRALTGIAVEQDKNTQEVFAQVKQIYKTPPIKDFGGFNFSQILPDPSKPSKRSFIEDLLFNKVTLADAGFIKQYGDCLGDIAARDLICAQKFNGLTVLPPLLTDEMIAQYTSALLAGTITSGWTFGAGAALQIPFAMQMAYRFNGIGVTQNVLYENQKLIANQFNSAIGKIQYSLSSTASALGKLQDVVNQNAQALNTLVKQLSSNFGAISSVLNDILSRLDKVEAEVQIDRLITGRLQSLQTYVTQQLIRAAEIRASANLAATKMSECVLGQSKRVDFCGKGYHLMSFPQSAPHGVVFLHVTYVPAQEKNFTTAPAICHDGKAHFPREGVFVSNGTHWFVTQRNFCEPQIITTDNTFVSGNCDVVIGIVNNTVYDPLQPELDSFKEELDKYFKNHTSPDVDLGDISGINASVVNIQKEIDRLNEVAKNLNESLIDLQELGKYEQYIKGGGSGGGQIYEGKLTAEGLRFGIVASRFNHALVDRLVEGAIDAIVRHGGREEDITLVRVPGSWEIPVAAGELARKEDIDAVIAIGVLIRGATPHFDYIASEVSKGLADLSLELRKPITFGVITADTLEQAIERAGTKHGNKGWEAALSAIEMANLFKSLR

SEQ ID NO: 4071 - protein, 1371 aa, Artificial Sequence; identical to SEQ ID NO: 4034
  SARS-CoV-2/Portugal/PT0034/2020__EPI_ISL_418019 spike protein (1-1211)(I714C_Y1110C) LumSynth construct

SEQ ID NO: 4072 - protein, 1371 aa, Artificial Sequence
  SARS-CoV-2/Iceland/202/2020__EPI_ISL_417750 spike protein (1-1211)(I714C_Y1110C) LumSynth construct
MFVFLVLLPLVSSQCVNLTTRTQLPPAYTNSFTRGVYYPDKVFRSSVLHSTQDLFLPFFSNVTWFHAIHVSGTNGTKRFDNPVLPFNDGVYFASTEKSNIIRGWIFGTTLDSKTQSLLIVNNATNVVIKVCEFQFCNDPFLGVYYHKNNKSWMESEFRVYSSANNCTFEYVSQPFLMDLEGKQGNFKNLREFVFKNIDGYFKIYSKHTPINLVRDLPQGFSALEPLVDLPIGINITRFQTLLALHRSYLTPGDSSSGWTAGAAAYYVGYLQPRTFLLKYNENGTITDAVDCALDPLSETKCTLKSFTVEKGIYQTSNFRVQPTESIVRFPNITNLCPFGEVFNATRFASVYAWNRKRISNCVADYSVLYNSASFSTFKCYGVSPTKLNDLCFTNVYADSFVIRGDEVRQIAPGQTGKIADYNYKLPDDFTGCVIAWNSNNLDSKVGGNYNYLYRLFRKSNLKPFERDISTEIYQAGSTPCNGVEGFNCYFPLQSYGFQPTNGVGYQPYRVVVLSFELLHAPATVCGPKKSTNLVKNKCVNFNFNGLTGTGVLTESNKKFLPFQQFGRDIADTTDAVRDPQTLEILDITPCSFGGVSVITPGTNTSNQVAVLYQDVNCTEVPVAIHADQLTPTWRVYSTGSNVFQTRAGCLIGAEHVNNSYECDIPIGAGICASYQTQTNSPRRARSVASQSIIAYTMSLGAENSVAYSNNSIACPTNFTISVTTEILPVSMTKTSVDCTMYICGDSTECSNLLLQYGSFCTQLNRALTGIAVEQDKNTQEVFAQVKQIYKTPPIKDFGGFNFSQILPDPSKPSKRSFIEDLLFNKVTLADAGFIKQYGDCLGDIAARDLICAQKFNGLTVLPPLLTDEMIAQYTSALLAGTITSGWTFGAGAALQIPFAMQMAYRFNGIGVTQNVLYENQKLIANQFNSAIGKIQDSLSSTASALGKLQDVVNQNAQALNTLVKQLSSNFGAISSVLNDILSRLDKVEAEVQIDRLITGRLQSLQTYVTQQLIRAAEIRASANLAATKMSECVLGQSKRVDFCGKGYHLMSFPQSAPHGVVFLHVTYVPAQEKNFTTAPAICHDGKAHFPREGVFVSNGTHWFVTQRNFCEPQIITTDNTFVSGNCDVVIGIVNNTVYDPLQPELDSFKEELDKYFKNHTSPDVDLGDIPGINASVVNIQKEIDRLNEVAKNLNESLIDLQELGKYEQYIKGGGSGGGQIYEGKLTAEGLRFGIVASRFNHALVDRLVEGAIDAIVRHGGREEDITLVRVPGSWEIPVAAGELARKEDIDAVIAIGVLIRGATPHFDYIASEVSKGLADLSLELRKPITFGVITADTLEQAIERAGTKHGNKGWEAALSAIEMANLFKSLR

SEQ ID NO: 4073 - protein, 1371 aa, Artificial Sequence
  SARS-CoV-2/USA/WA-UW261/2020__EPI_ISL_418046 spike protein (1-1211)(I714C_Y1110C) LumSynth construct
MFVFLVLLPLVSSQCVNLTTRTQLPPAYTNSFTRGVYYPDKVFRSSVLHSTQDLFLPFFSNVTWFHAIHVSGTNGTKRFDNPVLPFNDGVYFASTEKSNIIRGWIFGTTLDSKTQSLLIVNNATNVVIKVCEFQFCNDPFLGVYYHKNNKSWMESEFRVYSSANNCTFEYVSQPFLMDLEGKQGNFKNLREFVFKNIDGYFKIYSKHTPINLVRDLPQGFSALEPLVDLPIGINITRFQTLLALHRSYLTPGDSSSGWTAGAAAYYVGYLQPRTFLLKYNENGTITDAVDCALDPLSETKCTLKSFTVEKGIYQTSNFRVQPTESIVRFPNITNLCPFGEVFNATRFTSVYAWNRKRISNCVADYSVLYNSASFSTFKCYGVSPTKLNDLCFTNVYADSFVIRGDEVRQIAPGQTGKIADYNYKLPDDFTGCVIAWNSNNLDSKVGGNYNYLYRLFRKSNLKPFERDISTEIYQAGSTPCNGVEGFNCYFPLQSYGFQPTNGVGYQPYRVVVLSFELLHAPATVCGPKKSTNLVKNKCVNFNFNGLTGTGVLTESNKKFLPFQQFGRDIADTTDAVRDPQTLEILDITPCSFGGVSVITPGTNTSNQVAVLYQDVNCTEVPVAIHADQLTPTWRVYSTGSNVFQTRAGCLIGAEHVNNSYECDIPIGAGICASYQTQTNSPRRARSVASQSIIAYTMSLGAENSVAYSNNSIACPTNFTISVTTEILPVSMTKTSVDCTMYICGDSTECSNLLLQYGSFCTQLNRALTGIAVEQDKNTQEVFAQVKQIYKTPPIKDFGGFNFSQILPDPSKPSKRSFIEDLLFNKVTLADAGFIKQYGDCLGDIAARDLICAQKFNGLTVLPPLLTDEMIAQYTSALLAGTITSGWTFGAGAALQIPFAMQMAYRFNGIGVTQNVLYENQKLIANQFNSAIGKIQDSLSSTASALGKLQDVVNQNAQALNTLVKQLSSNFGAISSVLNDILSRLDKVEAEVQIDRLITGRLQSLQTYVTQQLIRAAEIRASANLAATKMSECVLGQSKRVDFCGKGYHLMSFPQSAPHGVVFLHVTYVPAQEKNFTTAPAICHDGKAHFPREGVFVSNGTHWFVTQRNFCEPQIITTDNTFVSGNCDVVIGIVNNTVYDPLQPELDSFKEELDKYFKNHTSPDVDLGDISGINASVVNIQKEIDRLNEVAKNLNESLIDLQELGKYEQYIKGGGSGGGQIYEGKLTAEGLRFGIVASRFNHALVDRLVEGAIDAIVRHGGREEDITLVRVPGSWEIPVAAGELARKEDIDAVIAIGVLIRGATPHFDYIASEVSKGLADLSLELRKPITFGVITADTLEQAIERAGTKHGNKGWEAALSAIEMANLFKSLR

SEQ ID NO: 4074 - protein, 1371 aa, Artificial Sequence
  SARS-CoV-2/Portugal/PT0035/2020__EPI_ISL_418020 spike protein (1-1211)(I714C_Y1110C) LumSynth construct
MFVFLVLLPLVSSQCVNLTTRTQLPPAYTNSFTRGVYYPDKVFRSSVLHSTQDLFLPFFSNVTWFHAIHVSGTNGTKRFDNPVLPFNDGVYFASTEKSNIIRGWIFGTTLDSKTQSLLIVNNATNVVIKVCEFQFCNDPFLGVYYHKNNKSWMESEFRVYSSANNCTFEYVSQPFLMDLEGKQGNFKNLREFVFKNIDGYFKIYSKHTPINLVRDLPQGFSALEPLVDLPIGINITRFQTLLALHRSYLTPGDSSSGWTAGAAAYYVGYLQPRTFLLKYNENGTITDAVDCALDPLSETKCTLKSFTVEKGIYQTSNFRVQPTESIVRFPNITNLCPFGEVFNATRFASVYAWNRKRISNCVADYSVLYNSASFSTFKCYGVSPTKLNDLCFTNVYADSFVIRGDEVRQIAPGQTGKIADYNYKLPDDFTGCVIAWNSNNLDSKVGGNYNYLYRLFRKSNLKPFERDISTEIYQAGSTPCNGVEGFNCYFPLQSYGFQPTNGVGYQPYRVVVLSFELLHAPATVCGPKKSTNLVKNKCVNFNFNGLTGTGVLTESNKKFLPFQQFGRDIADTTDAVRDPQTLEILDITPCSFGGVSVITPGTNTSNQVAVLYQDVNCTEVPVAIHADQLTPTWRVYSTGSNVFQTRAGCLIGAEHVNNSYECDIPIGAGICASYQTQTNSPRRARSVASQSIIAYTMSLGAENSVAYSNNSIACPTNFTISVTTEILPVSMTKTSVDCTMYICGDSTECSNLLLQYGSFCTQLNRALTGIAVEQDKNTQEVFAQVKQIYKTPPIKDFGGFNFSQILPDPSKPSKRSFIEDLLFNKVTLADAGFIKQYGDCLGDISARDLICAQKFNGLTVLPPLLTDEMIAQYTSALLAGTITSGWTFGAGAALQIPFAMQMAYRFNGIGVTQNVLYENQKLIANQFNSAIGKIQDSLSSTASALGKLQDVVNQNAQALNTLVKQLSSNFGAISSVLNDILSRLDKVEAEVQIDRLITGRLQSLQTYVTQQLIRAAEIRASANLAATKMSECVLGQSKRVDFCGKGYHLMSFPQSAPHGVVFLHVTYVPAQEKNFTTAPAICHDGKAHFPREGVFVSNGTHWFVTQRNFCEPQIITTDNTFVSGNCDVVIGIVNNTVYDPLQPELDSFKEELDKYFKNHTSPDVDLGDISGINASVVNIQKEIDRLNEVAKNLNESLIDLQELGKYEQYIKGGGSGGGQIYEGKLTAEGLRFGIVASRFNHALVDRLVEGAIDAIVRHGGREEDITLVRVPGSWEIPVAAGELARKEDIDAVIAIGVLIRGATPHFDYIASEVSKGLADLSLELRKPITFGVITADTLEQAIERAGTKHGNKGWEAALSAIEMANLFKSLR

SEQ ID NO: 4075 - protein, 1371 aa, Artificial Sequence
  SARS-CoV-2/USA/NY-NYUMC7/2020__EPI_ISL_418192 spike protein (1-1211)(I714C_Y1110C) LumSynth construct
MFVFLVLLPLVSSQCVNLTTRTQLPPAYTNSFTRGVYYPDKVFRSSVLHSTQDLFLPFFSNVTWFHAIHVSGTNGTKRFDNPVLPFNDGVYFASTEKSNIIRGWIFGTTLDSKTQSLLIVNNATNVVIKVCEFQFCNDPFLGVYHHKNNKSWMESEFRVYSSANNCTFEYVSQPFLMDLEGKQGNFKNLREFVFKNIDGYFKIYSKHTPINLVRDLPQGFSALEPLVDLPIGINITRFQTLLALHRSYLTPGDSSSGWTAGAAAYYVGYLQPRTFLLKYNENGTITDAVDCALDPLSETKCTLKSFTVEKGIYQTSNFRVQPTESIVRFPNITNLCPFGEVFNATRFASVYAWNRKRISNCVADYSVLYNSASFSTFKCYGVSPTKLNDLCFTNVYADSFVIRGDEVRQIAPGQTGKIADYNYKLPDDFTGCVIAWNSNNLDSKVGGNYNYLYRLFRKSNLKPFERDISTEIYQAGSTPCNGVEGFNCYFPLQSYGFQPTNGVGYQPYRVVVLSFELLHAPATVCGPKKSTNLVKNKCVNFNFNGLTGTGVLTESNKKFLPFQQFGRDIADTTDAVRDPQTLEILDITPCSFGGVSVITPGTNTSNQVAVLYQGVNCTEVPVAIHADQLTPTWRVYSTGSNVFQTRAGCLIGAEHVNNSYECDIPIGAGICASYQTQTNSPRRARSVASQSIIAYTMSLGAENSVAYSNNSIACPTNFTISVTTEILPVSMTKTSVDCTMYICGDSTECSNLLLQYGSFCTQLNRALTGIAVEQDKNTQEVFAQVKQIYKTPPIKDFGGFNFSQILPDPSKPSKRSFIEDLLFNKVTLADAGFIKQYGDCLGDIAARDLICAQKFNGLTVLPPLLTDEMIAQYTSALLAGTITSGWTFGAGAALQIPFAMQMAYRFNGIGVTQNVLYENQKLIANQFNSAIGKIQDSLSSTASALGKLQDVVNQNAQALNTLVKQLSSNFGAISSVLNDILSRLDKVEAEVQIDRLITGRLQSLQTYVTQQLIRAAEIRASANLAATKMSECVLGQSKRVDFCGKGYHLMSFPQSAPHGVVFLHVTYVPAQEKNFTTAPAICHDGKAHFPREGVFVSNGTHWFVTQRNFCEPQIITTDNTFVSGNCDVVIGIVNNTVYDPLQPELDSFKEELDKYFKNHTSPDVDLGDISGINASVVNIQKEIDRLNEVAKNLNESLIDLQELGKYEQYIKGGGSGGGQIYEGKLTAEGLRFGIVASRFNHALVDRLVEGAIDAIVRHGGREEDITLVRVPGSWEIPVAAGELARKEDIDAVIAIGVLIRGATPHFDYIASEVSKGLADLSLELRKPITFGVITADTLEQAIERAGTKHGNKGWEAALSAIEMANLFKSLR

SEQ ID NO: 4076 - protein, 1371 aa, Artificial Sequence
  SARS-CoV-2/Iceland/189/2020__EPI_ISL_417709 spike protein (1-1211)(I714C_Y1110C) LumSynth construct
MFVFLVLLPLVSSQCVNLTTRTQLPPAYTNSFTRGVYYPDKVFRSSVLHSTQDLFLPFFSNVTWFHAIHVSGTNGTKRFDNPVLPFNDGVYFASTEKSNIIRGWIFGTTLDSKTQSLLIVNNATNVVIKVCEFQFCNDPFLGVYYHKNNKSWMESEFRVYSSANNCTFEYVSQPFLMDLEGKQGNFKNLREFVFKNIDGYFKIYSKHTPINLVRDLPQGFSALEPLVDLPIGINITRFQTLLALHRSYLTPGDSSSGWTAGAAAYYVGYLQPRTFLLKYNENGTITDAVDCALDPLSETKCTLKSFTVEKGIYQTSNFRVQPTESIVRFPNITNLCPFGEVFNATRFASVYAWNRKRISNCVADYSVLYNSASFSTFKCYGVSPTKLNDLCFTNVYADSFVIRGDEVRQIAPGQTGKIADYNYKLPDDFTGCVIAWNSNNLDSKVGGNYNYLYRLFRKSNLKPFERDISTEIYQAGSTPCNGVEGFNCYFPLQSYGFQPTNGVGYQPYRVVVLSFELLHAPATVCGPKKSTNLVKNKCVNFNFNGLTGTGVLTESNKKFLPFQQFGRDIADTTDAVRDPQTLEILDITPCSFGGVSVITPGTNTSNQVAVLYQGVNCTEVPVAIHADQLTPTWRVYSTGSNVFQTRAGCLIGAEHVNNSYECDIPIGAGICASYQTQTNSPRRARSVASQSIIAYTMSLGAENSVAYSNNSIACPTNFTISVTTEILPVSMTKTSVDCTMYICGDSTECSNLLLQYGSFCTQLNRALTGIAVEQDKNTQEVFAQVKQIYKTPPIKDFGGFNFSQILPDPSKPSKRSFIEDLLFNKVTLADAGFTKQYGDCLGDIAARDLICAQKFNGLTVLPPLLTDEMIAQYTSALLAGTITSGWTFGAGAALQIPFAMQMAYRFNGIGVTQNVLYENQKLIANQFNSAIGKIQDSLSSTASALGKLQDVVNQNAQALNTLVKQLSSNFGAISSVLNDILSRLDKVEAEVQIDRLITGRLQSLQTYVTQQLIRAAEIRASANLAATKMSECVLGQSKRVDFCGKGYHLMSFPQSAPHGVVFLHVTYVPAQEKNFTTAPAICHDGKAHFPREGVFVSNGTHWFVTQRNFCEPQIITTDNTFVSGNCDVVIGIVNNTVYDPLQPELDSFKEELDKYFKNHTSPDVDLGDISGINASVVNIQKEIDRLNEVAKNLNESLIDLQELGKYEQYIKGGGSGGGQIYEGKLTAEGLRFGIVASRFNHALVDRLVEGAIDAIVRHGGREEDITLVRVPGSWEIPVAAGELARKEDIDAVIAIGVLIRGATPHFDYIASEVSKGLADLSLELRKPITFGVITADTLEQAIERAGTKHGNKGWEAALSAIEMANLFKSLR

SEQ ID NO: 4077 - protein, 1371 aa, Artificial Sequence
  SARS-CoV-2/Australia/NSW56/2020__EPI_ISL_417408 spike protein (1-1211)(I714C_Y1110C) LumSynth construct
MFVFLVLLPLVSSQCVNLTTRTQLPPAYTNSFTRGVYYPDKVFRSSVLHSTQDLFLPFFSNVTWFHAIHVSGTNGTKRFDNPVLPFNDGVYFASTEKSNIIRGWIFGTTLDSKTQSLLIVNNATNVVIKVCEFQFCNDPFLGVYYHKNNKSWMESEFRVYSSANNCTFEYVSQPFLMDLEGKQGNFKNLREFVFKNIDGYFKIYSKHTPINLVRDLPQGFSALEPLVDLPIGINITRFQTLLALHRSYLTPGDSSSGWTAGAAAYYVGYLQPRTFLLKYNENGTITDAVDCALDPLSETKCTLKSFTVEKGIYQTSNFRVQPTESIVRFPNITNLCPFGEVFNATRFASVYAWNRKRISNCVADYSVLYNSASFSTFKCYGVSPTKLNDLCFTNVYADSFVIRGDEVRQIAPGQTGKIADYNYKLPDDFTGCVIAWNSNNLDSKVGGNYNYLYRLFRKSNLKPFERDISTEIYQAGSTPCNGVEGFNCYFPLQSYGFQPTNGVGYQPYRVVVLSFELLHAPATVCGPKKSTNLVKNKCVNFNFNGLTGTGVLTESNKKFLPFQQFGRDIADTTDAVRDPQTLEILDITPCSFGGVSVITPGTNTSNQVAVLYQDVNCTEVPVAIHADQLTPTWRVYSTGSNVFQTRAGCLIGAEHVNNSYECDIPIGAGICASYQTQTNSPRRARSVASQSIIAYTMSLGAENSVAYSNNSIACPTNFTISVTTEILPVSMTKTSVDCTMYICGDSTECSNLLLQYGSFCTQLNRALTGIAVEQDKNTQEVFAQVKQIYKTPPIKDFGGFNFSQILPDSSKPSKRSFIEDLLFNKVTLADAGFIKQYGDCLGDIAARDLICAQKFNGLTVLPPLLTDEMIAQYTSALLAGTITSGWTFGAGAALQIPFAMQMAYRFNGIGVTQNVLYENQKLIANQFNSAIGKIQDSLSSTASALGKLQDVVNQNAQALNTLVKQLSSNFGAISSVLNDILSRLDKVEAEVQIDRLITGRLQSLQTYVTQQLIRAAEIRASANLAATKMSECVLGQSKRVDFCGKGYHLMSFPQSAPHGVVFLHVTYVPAQEKNFTTAPAICHDGKAHFPREGVFVSNGTHWFVTQRNFCEPQIITTDNTFVSGNCDVVIGIVNNTVYDPLQPELDSFKEELDKYFKNHTSPDVDLGDISGINASVVNIQKEIDRLNEVAKNLNESLIDLQELGKYEQYIKGGGSGGGQIYEGKLTAEGLRFGIVASRFNHALVDRLVEGAIDAIVRHGGREEDITLVRVPGSWEIPVAAGELARKEDIDAVIAIGVLIRGATPHFDYIASEVSKGLADLSLELRKPITFGVITADTLEQAIERAGTKHGNKGWEAALSAIEMANLFKSLR

SEQ ID NO: 4078 - protein, 1371 aa, Artificial Sequence
  SARS-CoV-2/Iceland/280/2020__EPI_ISL_417608 spike protein (1-1211)(I714C_Y1110C) LumSynth construct
MFVFLVLLPLVSSQCVNLTTRTQLPPAYTNSFTRGVYYPDKVFRSSVLHSTQDLFLPFFSNVTWFHAIHVSGTNGTKRFDNPVLPFNDGVYFASTEKSNIIRGWIFGTTLDSKTQSLLIVNNATNVVIKVCEFQFCNDPFLGVYYHKNNKSWMESEFRVYSSANNCTFEYVSQPFLMDLEGKQGNFKNLREFVFKNIDGYFKIYSKHTPINLVRDLPQGFSALEPLVDLPIGINITRFQTLLALHRSYLTPGDSSSGWTAGAAAYYVGYLQPRTFLLKYNENGTITDAVDCALDPLSETKCTLKSFTVEKGIYQTSNFRVQPTESIVRFPNITNLCPFGEVFNATRFASVYAWNRKRISNCVADYSVLYNSASFSTFKCYGVSPTKLNDLCFTNVYADSFVIRGDEVRQIAPGQTGKIADYNYKLPDDFTGCVIAWNSNNLDSKVGGNYNYLYRLFRKSNLKPFERDISTEIYQAGSTPCNGVEGFNCYFPLQSYGFQPTNGVGYQPYRVVVLSFELLHAPATVCGPKKSTNLVKNKCVNFNFNGLTGTGVLTESNKKFLPFQQFGRDIADTTDAVRDPQTLEILDITPCSFGGVSVITPGTNTSNQVAVLYQGVNCTEVPVAIHADQLTPTWRVYSTGSNVFQTRAGCLIGAEHVNNSYECDIPIGAGICASYHTQTNSPRRARSVASQSIIAYTMSLGAENSVAYSNNSIACPTNFTISVTTEILPVSMTKTSVDCTMYICGDSTECSNLLLQYGSFCTQLNRALTGIAVEQDKNTQEVFAQVKQIYKTPPIKDFGGFNFSQILPDPSKPSKRSFIEDLLFNKVTLADAGFIKQYGDCLGDIAARDLICAQKFNGLTVLPPLLTDEMIAQYTSALLAGTITSGWTFGAGAALQIPFAMQMAYRFNGIGVTQNVLYENQKLIANQFNSAIGKIQDSLSSTASALGKLQDVVNQNAQALNTLVKQLSSNFGAISSVLNDILSRLDKVEAEVQIDRLITGRLQSLQTYVTQQLIRAAEIRASANLAATKMSECVLGQSKRVDFCGKGYHLMSFPQSAPHGVVFLHVTYVPAQEKNFTTAPAICHDGKAHFPREGVFVSNGTHWFVTQRNFCEPQIITTDNTFVSGNCDVVIGIVNNTVYDPLQPELDSFKEELDKYFKNHTSPDVDLGDISGINASVVNIQKEIDRLNEVAKNLNESLIDLQELGKYEQYIKGGGSGGGQIYEGKLTAEGLRFGIVASRFNHALVDRLVEGAIDAIVRHGGREEDITLVRVPGSWEIPVAAGELARKEDIDAVIAIGVLIRGATPHFDYIASEVSKGLADLSLELRKPITFGVITADTLEQAIERAGTKHGNKGWEAALSAIEMANLFKSLR

SEQ ID NO: 4079 - protein, 1371 aa, Artificial Sequence; identical to SEQ ID NO: 4034
  SARS-CoV-2/Iceland/247/2020__EPI_ISL_417575 spike protein (1-1211)(I714C_Y1110C) LumSynth construct

SEQ ID NO: 4080 - protein, 1371 aa, Artificial Sequence
  SARS-CoV-2/Iceland/238/2020__EPI_ISL_417566 spike protein (1-1211)(I714C_Y1110C) LumSynth construct
MFVFLVLLPLVSSQCVNLTTRTQLPPAYTNSFTRGVYYPDKVFRSSVLHSTQDLFLPFFSNVTWFHAIHVSGTNGTKRFDNPVLPFNDGVYFASTEKSNIIRGWIFGTTLDSKTQSLLIVNNATNVVIKVCEFQFCNDPFLGVYYHKNNKSWMESEFRVYSSANNCTFEYVSQPFLMDLEGKQGNFKNLREFVFKNIDGYFKIYSKHTPINLVRDLPQGFSALEPLVDLPIGINITRFQTLLALHRSYLTPGDSSSGWTAGAAAYYVGYLQPRTFLLKYNENGTITDAVDCALDPLSETKCTLKSFTVEKGIYQTSNFRVQPTESIVRFPNITNLCPFGEVFNATRFASVYAWNRKRISNCVADYSVLYNSASFSTFKCYGVSPTKLNDLCFTNVYADSFVIRGDEVRQIAPGQTGKIADYNYKLPDDFTGCVIAWNSNNLDSKVGGNYNYLYRLFRKSNLKPFERDISTEIYQAGSTPCNGVEGFNCYFPLQSYGFQPTNGVGYQPYRVVVLSFELLHAPATVCGPKKSTNLVKNKCVNFNFNGLTGTGVLTESNKKFLPFQQFGRDIADTTDAVRDPQTLEILDITPCSFGGVSVITPGTNTSNQVAVLYQGVNCTEVPVAIHADQLTPTWRVYSTGSNVFQTRAGCLIGAEHVNNSYECDIPIGAGICASYQTQTNSPRRARSVASQSIIAYTMSLGAENSVAYSNNSIACPTNFTISVTTEILPVSMTKTSVDCTMYICGDSTECSNLLLQYGSFCTQLNRALTGIAVEQDKNTQEVFAQVKQIYKTPPIKDFGGFNFSQILPDPSKPSKRSFIEDLLFNKVTLADVGFIKQYGDCLGDIAARDLICAQKFNGLTVLPPLLTDEMIAQYTSALLAGTITSGWTFGAGAALQIPFAMQMAYRFNGIGVTQNVLYENQKLIANQFNSAIGKIQDSLSSTASALGKLQDVVNQNAQALNTLVKQLSSNFGAISSVLNDILSRLDKVEAEVQIDRLITGRLQSLQTYVTQQLIRAAEIRASANLAATKMSECVLGQSKRVDFCGKGYHLMSFPQSAPHGVVFLHVTYVPAQEKNFTTAPAICHDGKAHFPREGVFVSNGTHWFVTQRNFCEPQIITTDNTFVSGNCDVVIGIVNNTVYDPLQPELDSFKEELDKYFKNHTSPDVDLGDISGINASVVNIQKEIDRLNEVAKNLNESLIDLQELGKYEQYIKGGGSGGGQIYEGKLTAEGLRFGIVASRFNHALVDRLVEGAIDAIVRHGGREEDITLVRVPGSWEIPVAAGELARKEDIDAVIAIGVLIRGATPHFDYIASEVSKGLADLSLELRKPITFGVITADTLEQAIERAGTKHGNKGWEAALSAIEMANLFKSLR

SEQ ID NO: 4081 - protein, 1371 aa, Artificial Sequence
  SARS-CoV-2/Greece/16/2020__EPI_ISL_418265 spike protein (1-1211)(I714C_Y1110C) LumSynth construct
MFVFLVLLPLVSSQCVNLTTRTQLPPAYTNSFTRGVYYPDKVFRSSVLHSTQDLFLPFFSNVTWFHAIHVSGTNGTKRFDNPVLPFNDGVYFASTEKSNIIRGWIFGTTLDSKTQSLLIVNNATNVVIKVCEFQFCNDPFLGVYYHKNNKSWMESEFRVYSSANNCTFEYVSQPFLMDLEGKQGNFKNLREFVFKNVDGYFKIYSKHTPINLVRDLPQGFSALEPLVDLPIGINITRFQTLLALHRSYLTPGDSSSGWTAGAAAYYVGYLQPRTFLLKYNENGTITDAVDCALDPLSETKCTLKSFTVEKGIYQTSNFRVQPTESIVRFPNITNLCPFGEVFNATRFASVYAWNRKRISNCVADYSVLYNSASFSTFKCYGVSPTKLNDLCFTNVYADSFVIRGDEVRQIAPGQTGKIADYNYKLPDDFTGCVIAWNSNNLDSKVGGNYNYLYRLFRKSNLKPFERDISTEIYQAGSTPCNGVEGFNCYFPLQSYGFQPTNGVGYQPYRVVVLSFELLHAPATVCGPKKSTNLVKNKCVNFNFNGLTGTGVLTESNKKFLPFQQFGRDIADTTDAVRDPQTLEILDITPCSFGGVSVITPGTNTSNQVAVLYQDVNCTEVPVAIHADQLTPTWRVYSTGSNVFQTRAGCLIGAEHVNNSYECDIPIGAGICASYQTQTNSPRRARSVASQSIIAYTMSLGAENSVAYSNNSIACPTNFTISVTTEILPVSMTKTSVDCTMYICGDSTECSNLLLQYGSFCTQLNRALTGIAVEQDKNTQEVFAQVKQIYKTPPIKDFGGFNFSQILPDPSKPSKRSFIEDLLFNKVTLADAGFIKQYGDCLGDIAARDLICAQKFNGLTVLPPLLTDEMIAQYTSALLAGTITSGWTFGAGAALQIPFAMQMAYRFNGIGVTQNVLYENQKLIANQFNSAIGKIQDSLSSTASALGKLQDVVNQNAQALNTLVKQLSSNFGAISSVLNDILSRLDKVEAEVQIDRLITGRLQSLQTYVTQQLIRAAEIRASANLAATKMSECVLGQSKRVDFCGKGYHLMSFPQSAPHGVVFLHVTYVPAQEKNFTTAPAICHDGKAHFPREGVFVSNGTHWFVTQRNFCEPQIITTDNTFVSGNCDVVIGIVNNTVYDPLQPELDSFKEELDKYFKNHTSPDVDLGDISGINASVVNIQKEIDRLNEVAKNLNESLIDLQELGKYEQYIKGGGSGGGQIYEGKLTAEGLRFGIVASRFNHALVDRLVEGAIDAIVRHGGREEDITLVRVPGSWEIPVAAGELARKEDIDAVIAIGVLIRGATPHFDYIASEVSKGLADLSLELRKPITFGVITADTLEQAIERAGTKHGNKGWEAALSAIEMANLFKSLR

SEQ ID NO: 4082 - protein, 1371 aa, Artificial Sequence
  SARS-CoV-2/Iceland/319/2020__EPI_ISL_417648 spike protein (1-1211)(I714C_Y1110C) LumSynth construct
MFVFLVLLPLVSSQCVNLTTRTQLPPAYTNSFTRGVYYPDKVFRSSVLHSTQDLFLPFFSNVTWFHAIHVSGTNGTKRFDNPVLPFNDGVYFASTEKSNIIRGWIFGTTLDSKTQSLLIVNNATNVVIKVCEFQFCNDPFLGVYYHKNNKSWMESEFRVYSSANNCTFEYVSQPFLIDLEGKQGNFKNLREFVFKNIDGYFKIYSKHTPINLVRDLPQGFSALEPLVDLPIGINITRFQTLLALHRSYLTPGDSSSGWTAGAAAYYVGYLQPRTFLLKYNENGTITDAVDCALDPLSETKCTLKSFTVEKGIYQTSNFRVQPTESIVRFPNITNLCPFGEVFNATRFASVYAWNRKRISNCVADYSVLYNSASFSTFKCYGVSPTKLNDLCFTNVYADSFVIRGDEVRQIAPGQTGKIADYNYKLPDDFTGCVIAWNSNNLDSKVGGNYNYLYRLFRKSNLKPFERDISTEIYQAGSTPCNGVEGFNCYFPLQSYGFQPTNGVGYQPYRVVVLSFELLHAPATVCGPKKSTNLVKNKCVNFNFNGLTGTGVLTESNKKFLPFQQFGRDIADTTDAVRDPQTLEILDITPCSFGGVSVITPGTNTSNQVAVLYQGVNCTEVPVAIHADQLTPTWRVYSTGSNVFQTRAGCLIGAEHVNNSYECDIPIGAGICASYQTQTNSPRRARSVASQSIIAYTMSLGAENSVAYSNNSIACPTNFTISVTTEILPVSMTKTSVDCTMYICGDSTECSNLLLQYGSFCTQLNRALTGIAVEQDKNTQEVFAQVKQIYKTPPIKDFGGFNFSQILPDPSKPSKRSFIEDLLFNKVTLADAGFIKQYGDCLGDIAARDLICAQKFNGLTVLPPLLTDEMIAQYTSALLAGTITSGWTFGAGAALQIPFAMQMAYRFNGIGVTQNVLYENQKLIANQFNSAIGKIQDSLSSTASALGKLQDVVNQNAQALNTLVKQLSSNFGAISSVLNDILSRLDKVEAEVQIDRLITGRLQSLQTYVTQQLIRAAEIRASANLAATKMSECVLGQSKRVDFCGKGYHLMSFPQSAPHGVVFLHVTYVPAQEKNFTTAPAICHDGKAHFPREGVFVSNGTHWFVTQRNFCEPQIITTDNTFVSGNCDVVIGIVNNTVYDPLQPELDSFKEELDKYFKNHTSPDVDLGDISGINASVVNIQKEIDRLNEVAKNLNESLIDLQELGKYEQYIKGGGSGGGQIYEGKLTAEGLRFGIVASRFNHALVDRLVEGAIDAIVRHGGREEDITLVRVPGSWEIPVAAGELARKEDIDAVIAIGVLIRGATPHFDYIASEVSKGLADLSLELRKPITFGVITADTLEQAIERAGTKHGNKGWEAALSAIEMANLFKSLR

SEQ ID NO: 4083 - protein, 1371 aa, Artificial Sequence
  SARS-CoV-2/Congo/94/2020__EPI_ISL_417947 spike protein (1-1211)(I714C_Y1110C) LumSynth construct
MFVFLVLLPLVSSQCVNLTTRTQLPPAYTNSFTRGVYYPDKVFRSSVLHSTQDLFLPFFSNVTWFHAIHVSGTNGTKRFDNPVLPFNDGVYFASTEKSNIIRGWIFGTTLDSKTQSLLIVNNATNVVIKVCEFQFCNDPFLGVYYHKNNKSWMESEFRVYSSANNCTFEYVSQPFLMDLEGKQGNFKNLREFVFKNIDGYFKIYSKHTPINLVRDLPQGFSALEPLVDLPIGINITRFQTLLALHRSYLTPGDSSSGWTAGAAAYYVGYLQPRTFLLKYNENGTITDAVDCALDPLSETKCTLKSFTVEKGIYQTSNFRVQPTESIVRFPNITNLCPFGEVFNATRFASVYAWNRKRISNCVADYSVLYNSASFSTFKCYGVSPTKLNDLCFTNVYADSFVIRGDEVRQIAPGQTGKIADYNYKLPDDFTGCVIAWNSNNLDSKVGGNYNYLYRLFRKSNLKPFERDISTEIYQAGSTPCNGVEGFNCYFPLQSYGFQPTNGVGYQPYRVVVLSFELLHAPATVCGPKKSTNLVKNKCVNFNFNGLTGTGVLTESNKKFLPFQQFGRDIADTTDAVRDPQTLEILDITPCSFGGVSVITPGTNTSNQVAVLYQGVNCTEVPVAIHADQLTPTWRVYSTGSNVFQTRAGCLIGAEHVNNSYECDIPIGAGICASYQTQTNSPRRARSVASQSIIAYTMSLGAENSVAYSNNSIACPTNFTISVTTEILPVSMTKTSVDCTMYICGDSTECSNLLLQYGSFCTQLNRALTGIAVEQDKNTQEVFAQVKQIYKTPPIKDFGGFNFSQILPDPSKPSKRSFIEDILFNKVTLADAGFIKQYGDCLGDIAARDLICAQKFNGLTVLPPLLTDEMIAQYTSALLAGTITSGWTFGAGAALQIPFAMQMAYRFNGIGVTQNVLYENQKLIANQFNSAIGKIQDSLSSTASALGKLQDVVNQNAQALNTLVKQLSSNFGAISSVLNDILSRLDKVEAEVQIDRLITGRLQSLQTYVTQQLIRAAEIRASANLAATKMSECVLGQSKRVDFCGKGYHLMSFPQSAPHGVVFLHVTYVPAQEKNFTTAPAICHDGKAHFPREGVFVSNGTHWFVTQRNFCEPQIITTDNTFVSGNCDVVIGIVNNTVYDPLQPELDSFKEELDKYFKNHTSPDVDLGDISGINASVVNIQKEIDRLNEVAKNLNESLIDLQELGKYEQYIKGGGSGGGQIYEGKLTAEGLRFGIVASRFNHALVDRLVEGAIDAIVRHGGREEDITLVRVPGSWEIPVAAGELARKEDIDAVIAIGVLIRGATPHFDYIASEVSKGLADLSLELRKPITFGVITADTLEQAIERAGTKHGNKGWEAALSAIEMANLFKSLR

SEQ ID NO: 4084 - protein, 1371 aa, Artificial Sequence
  SARS-CoV-2/Congo/158/2020__EPI_ISL_417950 spike protein (1-1211)(I714C_Y1110C) LumSynth construct
MFVFLVLLPLVSSQCVNLTTRTQLPPAYTNSFTRGVYYPDKVFRSSVLHSTQDLFLPFFSNVTWFHAIHVSGTNGTKRFDNPVLPFNDGVYFASTEKSNIIRGWIFGTTLDSKTQSLLIVNNATNVVIKVCEFQFCNDPFLGVYYHKNNKSWMESEFRVYSSANNCTFEYVSQPFLMDLEGKQGNFKNLREFVFKNIDGYFKIYSKHTPINLVRDLPQGFSALEPLVDLPIGINITRFQTLLALHRSYLTPGDSSSGWTAGAAAYYVGYLQPRTFLLKYNENGTITDAVDCALDPLSETKCTLKSFTVEKGIYQTSNFRVQPTESIVRFPNITNLCPFGEVFNATRFASVYAWNRKRISNCVADYSVLYNSASFSTFKCYGVSPTKLNDLCFTNVYADSFVIRGDEVRQIAPGQTGKIADYNYKLPDDFTGCVIAWNSNNLDSKVGGNYNYLYRLFRKSNLKPFERDISTEIYQAGSTPCNGVEGFNCYFPLQSYGFQPTNGVGYQPYRVVVLSFELLHAPATVCGPKKSTNLVKNKCVNFNFNGLTGTGVLTESNKKFLPFQQFGRDIADTTDAVRDPQTLEILDITPCSFGGVSVITPGTNTSNQVAVLYQDVNCTEVPVAIHADQLTPTWRVYSTGSNVFQTRAGCLIGAEHVNNSYECDIPIGAGICASYQTQTNSPRRARSVASQSIIAYTMSLGAENSVAYSNNSIACPTNFTISVTTEILPVSMTKTSVDCTMYICGDSTECSNLLLQYGSFCTQLNRALTGIAVEQDKNTQEVFAQVKQIYKTPPIKDFGGFNFSQILPDPSKPSKRSFIEDLLFNKVTLADAGFIKQYGDCLGDIAARDLICAQKFNGLTVLPPLLTDEMIAQYTSALLAGTITSGWTFGAGAALQIPFAMQMAYRFNGIGVTQNVLYENQKLIANQFNSAIGKIQDSLSSTASALGKLQDVVNQNAQALNTLVKQLSSNFGAISSVLNDILSRLDKVEAEVQIDRLITGRLQSLQTYVTQQLIRAAEIRASANLAATKMSECVLGQSKRVDFCGKGYHLMSFPQSAPHGVVFLHVTYVPAQEKNFTTAPAICHDGKAHFPREGVFVSNGTHWFVTQRNFCEPQIITTDNTFLSGNCDVVIGIVNNTVYDPLQPELDSFKEELDKYFKNHTSPDVDLGDISGINASVVNIQKEIDRLNEVAKNLNESLIDLQELGKYEQYIKGGGSGGGQIYEGKLTAEGLRFGIVASRFNHALVDRLVEGAIDAIVRHGGREEDITLVRVPGSWEIPVAAGELARKEDIDAVIAIGVLIRGATPHFDYIASEVSKGLADLSLELRKPITFGVITADTLEQAIERAGTKHGNKGWEAALSAIEMANLFKSLR

SEQ ID NO: 4085 - protein, 1371 aa, Artificial Sequence
  SARS-CoV-2/USA/UT-00034/2020__EPI_ISL_417977 spike protein (1-1211)(I714C_Y1110C) LumSynth construct
MFVFLVLLPLVSSQCVNLTTRTQLPPAYTNSFTRGVYYPDKVFRSSVLHSTQDLFLPFFSNVTWFHAIHVSGTNGTKRFDNPVLPFNDGVYFASTEKSNIIRGWIFGTTLDSKTQSLLIVNNATNVVIKVCEFQFCNDPFLGVYYYKNNKSWMESEFRVYSSANNCTFEYVSQPFLMDLEGKQGNFKNLREFVFKNIDGYFKIYSKHTPINLVRDLPQGFSALEPLVDLPIGINITRFQTLLALHRSYLTPGDSSSGWTAGAAAYYVGYLQPRTFLLKYNENGTITDAVDCALDPLSETKCTLKSFTVEKGIYQTSNFRVQPTESIVRFPNITNLCPFGEVFNATRFASVYAWNRKRISNCVADYSVLYNSASFSTFKCYGVSPTKLNDLCFTNVYADSFVIRGDEVRQIAPGQTGKIADYNYKLPDDFTGCVIAWNSNNLDSKVGGNYNYLYRLFRKSNLKPFERDISTEIYQAGSTPCNGVEGFNCYFPLQSYGFQPTNGVGYQPYRVVVLSFELLHAPATVCGPKKSTNLVKNKCVNFNFNGLTGTGVLTESNKKFLPFQQFGRDIADTTDAVRDPQTLEILDITPCSFGGVSVITPGTNTSNQVAVLYQGVNCTEVPVAIHADQLTPTWRVYSTGSNVFQTRAGCLIGAEHVNNSYECDIPIGAGICASYQTQTNSPRRARSVASQSIIAYTMSLGAENSVAYSNNSIACPTNFTISVTTEILPVSMTKTSVDCTMYICGDSTECSNLLLQYGSFCTQLNRALTGIAVEQDKNTQEVFAQVKQIYKTPPIKDFGGFNFSQILPDPSKPSKRSFIEDLLFNKVTLADAGFIKQYGDCLGDIAARDLICAQKFNGLTVLPPLLTDEMIAQYTSALLAGTITSGWTFGAGAALQIPFAMQMAYRFNGIGVTQNVLYENQKLIANQFNSAIGKIQDSLSSTASALGKLQDVVNQNAQALNTLVKQLSSNFGAISSVLNDILSRLDKVEAEVQIDRLITGRLQSLQTYVTQQLIRAAEIRASANLAATKMSECVLGQSKRVDFCGKGYHLMSFPQSAPHGVVFLHVTYVPAQEKNFTTAPAICHDGKAHFPREGVFVSNGTHWFVTQRNFCEPQIITTDNTFVSGNCDVVIGIVNNTVYDPLQPELDSFKEELDKYFKNHTSPDVDLGDISGINASVVNIQKEIDRLNEVAKNLNESLIDLQELGKYEQYIKGGGSGGGQIYEGKLTAEGLRFGIVASRFNHALVDRLVEGAIDAIVRHGGREEDITLVRVPGSWEIPVAAGELARKEDIDAVIAIGVLIRGATPHFDYIASEVSKGLADLSLELRKPITFGVITADTLEQAIERAGTKHGNKGWEAALSAIEMANLFKSLR

SEQ ID NO: 4086 - protein, 1371 aa, Artificial Sequence
  SARS-CoV-2/USA/UT-00033/2020__EPI_ISL_417976 spike protein (1-1211)(I714C_Y1110C) LumSynth construct
MFVFLVLLPLVSSQCVNLTTRTQLPPAYTNSFTRGVYYPDKVFRSSVLHSTQDLFLPFFSNVTWFHAIHVSGTNGTKRFDNPVLPFNDGVYFASTEKSNIIRGWIFGTTLDSKTQSLLIVNNATNVVIKVCEFQFCNDPFLGVYYHKNNKSWMESEFRVYSSANNCTFEYVSQPFLMDLEGKQGNFKNLREFVFKNIDGYFKIYSKHTPINLVRDLPQGFSALEPLVDLPIGINITRFQTLLALHRSYLTPGDSSSGLTAGAAAYYVGYLQPRTFLLKYNENGTITDAVDCALDPLSETKCTLKSFTVEKGIYQTSNFRVQPTESIVRFPNITNLCPFGEVFNATRFASVYAWNRKRISNCVADYSVLYNSASFSTFKCYGVSPTKLNDLCFTNVYADSFVIRGDEVRQIAPGQTGKIADYNYKLPDDFTGCVIAWNSNNLDSKVGGNYNYLYRLFRKSNLKPFERDISTEIYQAGSTPCNGVEGFNCYFPLQSYGFQPTNGVGYQPYRVVVLSFELLHAPATVCGPKKSTNLVKNKCVNFNFNGLTGTGVLTESNKKFLPFQQFGRDIADTTDAVRDPQTLEILDITPCSFGGVSVITPGTNTSNQVAVLYQGVNCTEVPVAIHADQLTPTWRVYSTGSNVFQTRAGCLIGAEHVNNSYECDIPIGAGICASYQTQTNSPRRARSVASQSIIAYTMSLGAENSVAYSNNSIACPTNFTISVTTEILPVSMTKTSVDCTMYICGDSTECSNLLLQYGSFCTQLNRALTGIAVEQDKNTQEVFAQVKQIYKTPPIKDFGGFNFSQILPDPSKPSKRSFIEDLLFNKVTLADAGFIKQYGDCLGDIAARDLICAQKFNGLTVLPPLLTDEMIAQYTSALLAGTITSGWTFGAGAALQIPFAMQMAYRFNGIGVTQNVLYENQKLIANQFNSAIGKIQDSLSSTASALGKLQDVVNQNAQALNTLVKQLSSNFGAISSVLNDILSRLDKVEAEVQIDRLITGRLQSLQTYVTQQLIRAAEIRASANLAATKMSECVLGQSKRVDFCGKGYHLMSFPQSAPHGVVFLHVTYVPAQEKNFTTAPAICHDGKAHFPREGVFVSNGTHWFVTQRNFCEPQIITTDNTFVSGNCDVVIGIVNNTVYDPLQPELDSFKEELDKYFKNHTSPDVDLGDISGINASVVNIQKEIDRLNEVAKNLNESLIDLQELGKYEQYIKGGGSGGGQIYEGKLTAEGLRFGIVASRFNHALVDRLVEGAIDAIVRHGGREEDITLVRVPGSWEIPVAAGELARKEDIDAVIAIGVLIRGATPHFDYIASEVSKGLADLSLELRKPITFGVITADTLEQAIERAGTKHGNKGWEAALSAIEMANLFKSLR

SEQ ID NO: 4087 - protein, 1371 aa, Artificial Sequence
  SARS-CoV-2/USA/WI-13/2020__EPI_ISL_417516 spike protein (1-1211)(I714C_Y1110C) LumSynth construct
MFVFLVLLPLVSSQCVNLTTRTQLPPAYTNSFTRGVYYPDKVFRSSVLHSTQDLFLPFFSNVTWFHAIHVSGTNGTKRFDNPVLPFNDGVYFASTEKSNIIRGWIFGTTLDSKTQSLLIVNNATNVVIKVCEFQFCNDPFLGVYYHKNNKSWMESEFRVYSSANNCTFEYVSQPFLMDLEGKQGNFKNLREFVFKNIDGYFKIYSKHTPINLVRDLPQGFSALEPLVDLPIGINITRFQTLLALHRSYLTPGDSSSGWTAGAAAYYVGYLQPRTFLLKYNENGTITDAVDCALDPLSETKCTLKSFTVEKGIYQTSNFRVLPTESIVRFPNITNLCPFGEVFNATRFASVYAWNRKRISNCVADYSVLYNSASFSTFKCYGVSPTKLNDLCFTNVYADSFVIRGDEVRQIAPGQTGKIADYNYKLPDDFTGCVIAWNSNNLDSKVGGNYNYLYRLFRKSNLKPFERDISTEIYQAGSTPCNGVEGFNCYFPLQSYGFQPTNGVGYQPYRVVVLSFELLHAPATVCGPKKSTNLVKNKCVNFNFNGLTGTGVLTESNKKFLPFQQFGRDIADTTDAVRDPQTLEILDITPCSFGGVSVITPGTNTSNQVAVLYQGVNCTEVPVAIHADQLTPTWRVYSTGSNVFQTRAGCLIGAEHVNNSYECDIPIGAGICASYQTQTNSPRRARSVASQSIIAYTMSLGAENSVAYSNNSIACPTNFTISVTTEILPVSMTKTSVDCTMYICGDSTECSNLLLQYGSFCTQLNRALTGIAVEQDKNTQEVFAQVKQIYKTPPIKDFGGFNFSQILPDPSKPSKRSFIEDLLFNKVTLADAGFIKQYGDCLGDIAARDLICAQKFNGLTVLPPLLTDEMIAQYTSALLAGTITSGWTFGAGAALQIPFAMQMAYRFNGIGVTQNVLYENQKLIANQFNSAIGKIQDSLSSTASALGKLQDVVNQNAQALNTLVKQLSSNFGAISSVLNDILSRLDKVEAEVQIDRLITGRLQSLQTYVTQQLIRAAEIRASANLAATKMSECVLGQSKRVDFCGKGYHLMSFPQSAPHGVVFLHVTYVPAQEKNFTTAPAICHDGKAHFPREGVFVSNGTHWFVTQRNFCEPQIITTDNTFVSGNCDVVIGIVNNTVYDPLQPELDSFKEELDKYFKNHTSPDVDLGDISGINASVVNIQKEIDRLNEVAKNLNESLIDLQELGKYEQYIKGGGSGGGQIYEGKLTAEGLRFGIVASRFNHALVDRLVEGAIDAIVRHGGREEDITLVRVPGSWEIPVAAGELARKEDIDAVIAIGVLIRGATPHFDYIASEVSKGLADLSLELRKPITFGVITADTLEQAIERAGTKHGNKGWEAALSAIEMANLFKSLR

SEQ ID NO: 4088 - protein, 1370 aa, Artificial Sequence
  SARS-CoV-2/India/1-27/2020__EPI_ISL_413522 spike protein (1-1210)(I713C_Y1109C) LumSynth construct
MFVFLVLLPLVSSQCVNLTTRTQLPPAYTNSFTRGVYYPDKVFRSSVLHSTQDLFLPFFSNVTWFHAIHVSGTNGTKRFDNPVLPFNDGVYFASTEKSNIIRGWIFGTTLDSKTQSLLIVNNATNVVIKVCEFQFCNDPFLGVYHKNNKSWMESEFRVYSSANNCTFEYVSQPFLMDLEGKQGNFKNLREFVFKNIDGYFKIYSKHTPINLVRDLPQGFSALEPLVDLPIGINITRFQTLLALHRSYLTPGDSSSGWTAGAAAYYVGYLQPRTFLLKYNENGTITDAVDCALDPLSETKCTLKSFTVEKGIYQTSNFRVQPTESIVRFPNITNLCPFGEVFNATRFASVYAWNRKRISNCVADYSVLYNSASFSTFKCYGVSPTKLNDLCFTNVYADSFVIRGDEVIQIAPGQTGKIADYNYKLPDDFTGCVIAWNSNNLDSKVGGNYNYLYRLFRKSNLKPFERDISTEIYQAGSTPCNGVEGFNCYFPLQSYGFQPTNGVGYQPYRVVVLSFELLHAPATVCGPKKSTNLVKNKCVNFNFNGLTGTGVLTESNKKFLPFQQFGRDIADTTDAVRDPQTLEILDITPCSFGGVSVITPGTNTSNQVAVLYQDVNCTEVPVAIHADQLTPTWRVYSTGSNVFQTRAGCLIGAEHVNNSYECDIPIGAGICASYQTQTNSPRRARSVASQSIIAYTMSLGAENSVAYSNNSIACPTNFTISVTTEILPVSMTKTSVDCTMYICGDSTECSNLLLQYGSFCTQLNRALTGIAVEQDKNTQEVFAQVKQIYKTPPIKDFGGFNFSQILPDPSKPSKRSFIEDLLFNKVTLADAGFIKQYGDCLGDIAARDLICAQKFNGLTVLPPLLTDEMIAQYTSALLAGTITSGWTFGAGAALQIPFAMQMAYRFNGIGVTQNVLYENQKLIANQFNSAIGKIQDSLSSTASALGKLQDVVNQNAQALNTLVKQLSSNFGAISSVLNDILSRLDKVEAEVQIDRLITGRLQSLQTYVTQQLIRAAEIRASANLAATKMSECVLGQSKRVDFCGKGYHLMSFPQSAPHGVVFLHVTYVPAQEKNFTTAPAICHDGKAHFPREGVFVSNGTHWFVTQRNFCEPQIITTDNTFVSGNCDVVIGIVNNTVYDPLQPELDSFKEELDKYFKNHTSPDVDLGDISGINASVVNIQKEIDRLNEVAKNLNESLIDLQELGKYEQYIKGGGSGGGQIYEGKLTAEGLRFGIVASRFNHALVDRLVEGAIDAIVRHGGREEDITLVRVPGSWEIPVAAGELARKEDIDAVIAIGVLIRGATPHFDYIASEVSKGLADLSLELRKPITFGVITADTLEQAIERAGTKHGNKGWEAALSAIEMANLFKSLR

SEQ ID NO: 4089 - protein, 1365 aa, Artificial Sequence
  SARS-CoV-2/pangolin/Guangxi/P4L/2017__EPI_ISL_410538 spike protein (1-1205)(I708C_Y1104C) LumSynth construct
MFVFLFVLPLVSSQCVNLTTRTGIPPGYTNSSTRGVYYPDKVFRSSILHLTQDLFLPFFSNVTWFNTINYQGGFKKFDNPVLPFNDGVYFASTEKSNIIRGWIFGTTLDARTQSLLIVNNATNVVIKVCEFQFCTDPFLGVYYHNNNKTWVENEFRVYSSANNCTFEYISQPFLMDLEGKQGNFKNLREFVFKNVDGYFKIYSKHTPIDLVRDLPRGFAALEPLVDLPIGINITRFQTLLALHRSYLTPGNLESGWTTGAAAYYVGYLQQRTFLLSYNQNGTITDAVDCSLDPLSETKCTLKSLTVEKGIYQTSNFRVQPTISIVRFPNITNLCPFGEVFNASKFASVYAWNRKRISNCVADYSVLYNSTSFSTFKCYGVSPTKLNDLCFTNVYADSFVVKGDEVRQIAPGQTGVIADYNYKLPDDFTGCVIAWNSVKQDALTGGNYGYLYRLFRKSKLKPFERDISTEIYQAGSTPCNGQVGLNCYYPLERYGFHPTTGVNYQPFRVVVLSFELLNGPATVCGPKLSTTLVKDKCVNFNFNGLTGTGVLTTSKKQFLPFQQFGRDISDTTDAVRDPQTLEILDITPCSFGGVSVITPGTNTSNQVAVLYQDVNCTEVPMAIHAEQLTPAWRVYSAGANVFQTRAGCLVGAEHVNNSYECDIPVGAGICASYHSMSSLRSVNQRSIIAYTMSLGAENSVAYSNNSIACPTNFTISVTTEILPVSMTKTSVDCTMYICGDSIECSNLLLQYGSFCTQLNRALTGIAVEQDKNTQEVFAQVKQIYKTPPIKDFGGFNFSQILPDPSKPSKRSFIEDLLFNKVTLADAGFIKQYGDCLGDIAARDLICAQKFNGLTVLPPLLTDEMIAQYTSALLAGTITSGWTFGAGAALQIPFAMQMAYRFNGIGVTQNVLYENQKLIANQFNSAIGKIQDSLSSTASALGKLQDVVNQNAQALNTLVKQLSSNFGAISSVLNDILSRLDKVEAEVQIDRLITGRLQSLQTYVTQQLIRAAEIRASANLAATKMSECVLGQSKRVDFCGKGYHLMSFPQSAPHGVVFLHVTYVPAQEKNFTTAPAICHEGKAHFPREGVFVSNGTHWFITQRNFCEPQIITTDNTFVSGSCDVVIGIVNNTVYDPLQPELDSFKEELDKYFKNHTSPDVDLGDISGINASVVNIQKEIDRLNEVAKNLNESPIDLQELGKYEQYIKGGGSGGGQIYEGKLTAEGLRFGIVASRFNHALVDRLVEGAIDAIVRHGGREEDITLVRVPGSWEIPVAAGELARKEDIDAVIAIGVLIRGATPHFDYIASEVSKGLADLSLELRKPITFGVITADTLEQAIERAGTKHGNKGWEAALSAIEMANLFKSLR

SEQ ID NO: 4090 - protein, 1365 aa, Artificial Sequence
  SARS-CoV-2/pangolin/Guangxi/P5L/2017__EPI_ISL_410540 spike protein (1-1205)(I708C_Y1104C) LumSynth construct
MFVFLFVLPLVSSQCVNLTTRTGIPPGYTNSSTRGVYYPDKVFRSSILHLTQDLFLPFFSNVTWFNTINYQGGFKKFDNPVLPFNDGVYFASTEKSNIIRGWIFGTTLDARTQSLLIVNNATNVVIKVCEFQFCTDPFLGVYYHNNNKTWVENEFRVYSSANNCTFEYISQPFLMDLEGKQGNFKNLREFVFKNVDGYFKIYSKHTPIDLVRDLPRGFAALEPLVDLPIGINITRFQTLLALHRSYLTPGKLESGWTTGAAAYYVGYLQQRTFLLSYNQNGTITDAVDCSLDPLSETKCTLKSLTVEKGIYQTSNFRVQPTISIVRFPNITNLCPFGEVFNASKFASVYAWNRKRISNCVADYSVLYNSTSFSTFKCYGVSPTKLNDLCFTNVYADSFVVKGDEVRQIAPGQTGVIADYNYKLPDDFTGCVIAWNSVKQDALTGGNYGYLYRLFRKSKLKPFERDISTEIYQAGSTPCNGQVGLNCYYPLERYGFHPTTGVNYQPFRVVVLSFELLNGPATVCGPKLSTTLVKDKCVNFNFNGLTGTGVLTTSKKQFLPFQQFGRDISDTTDAVRDPQTLEILDITPCSFGGVSVITPGTNTSNQVAVLYQDVNCTEVPMAIHAEQLTPAWRVYSAGANVFQTRAGCLVGAEHVNNSYECDIPVGAGICASYHSMSSFRSVNQRSIIAYTMSLGAENSVAYSNNSIACPTNFTISVTTEILPVSMTKTSVDCTMYICGDSIECSNLLLQYGSFCTQLNRALTGIAVEQDKNTQEVFAQVKQIYKTPPIKDFGGFNFSQILPDPSKPSKRSFIEDLLFNKVTLADAGFIKQYGDCLGDIAARDLICAQKFNGLTVLPPLLTDEMIAQYTSALLAGTITSGWTFGAGAALQIPFAMQMAYRFNGIGVTQNVLYENQKLIANQFNSAIGKIQDSLSSTASALGKLQDVVNQNAQALNTLVKQLSSNFGAISSVLNDILSRLDKVEAEVQIDRLITGRLQSLQTYVTQQLIRAAEIRASANLAATKMSECVLGQSKRVDFCGKGYHLMSFPQSAPHGVVFLHVTYVPAQEKNFTTAPAICHEGKAHFPREGVFVSNGTHWFITQRNFCEPQIITTDNTFVSGSCDVVIGIVNNTVYDPLQPELDSFKEELDKYFKNHTSPDVDLGDISGINASVVNIQKEIDRLNEVAKNLNESLIDLQELGKYEQYIKGGGSGGGQIYEGKLTAEGLRFGIVASRFNHALVDRLVEGAIDAIVRHGGREEDITLVRVPGSWEIPVAAGELARKEDIDAVIAIGVLIRGATPHFDYIASEVSKGLADLSLELRKPITFGVITADTLEQAIERAGTKHGNKGWEAALSAIEMANLFKSLR

SEQ ID NO: 4091 - protein, 1365 aa, Artificial Sequence
  SARS-CoV-2/pangolin/Guangxi/P5E/2017__EPI_ISL_410541 spike protein (1-1205)(I708C_Y1104C) LumSynth construct
MFVFLFVLPLVSSQCVNLTTRTGIPPGYTNSSTRGVYYPDKVFRSSILHLTQDLFLPFFSNVTWFNTITYQGGSKKFDNPVLPFNDGVYFASTEKSNIIRGWIFGTTLDARTQSLLIVNNATNVVIKVCEFQFCTDPFLGVYYHNNNKTWVENEFRVYSSANNCTFEYISQPFLMDLEGKQGNFKNLREFVFKNVDGYFKIYSKHTPIDLVRDLPRGFAALEPLVDLPIGINITRFQTLLALHRSYLTPGKLESGWTTGAAAYYVGYLQQRTFLLSYNQNGTITDAVDCSLDPLSETKCTLKSLTVEKGIYQTSNFRVQPTISIVRFPNITNLCPFGEVFNASKFASVYAWNRKRISNCVADYSVLYNSTSFSTFKCYGVSPTKLNDLCFTNVYADSFVVKGDEVRQIAPGQTGVIADYNYKLPDDFTGCVIAWNSVKQDALTGDNYGYLYRLFRKSKLKPFERDISTEIYQAGSTPCNGQVGLNCYYPLERYGFHPTTGVNYQPFRVVVLSFELLNGPATVCGPKLSTTLVKDKCVNFNFNGLTGTGVLTTSKKQFLPFQQFGRDISDTTDAVRDPQTLEILDITPCSFGGVSVITPGTNTSNQVAVLYQDVNCTEVPMAIHAEQLTPAWRVYSAGANVFQTRAGCLVGAEHVNNSYECDIPVGAGICASYHSMSSFRSVNQRSIIAYTMSLGAENSVAYSNNSIACPTNFTISVTTEILPVSMTKTSVDCTMYICGDSIECSNLLLQYGSFCTQLNRALTGIAVEQDKNTQEVFAQVKQIYKTPPIKDFGGFNFSQILPDPSKPSKRSFIEDLLFNKVTLADAGFIKQYGDCLGDIAARDLICAQKFNGLTVLPPLLTDEMIAQYTSALLAGTITSGWTFGAGAALQIPFAMQMAYRFNGIGVTQNVLYENQKLIANQFNSAIGKIQDSLSSTASALGKLQDVVNQNAQALNTLVKQLSSNFGAISSVLNDILSRLDKVEAEVQIDRLITGRLQSLQTYVTQQLIRAAEIRASANLAATKMSECVLGQSKRVDFCGKGYHLMSFPQSAPHGVVFLHVTYVPAQEKNFTTAPAICHEGKAHFPREGVFVSNGTHWFITQRNFCEPQIITTDNTFVSGSCDVVIGIVNNTVYDPLQPELDSFKEELDKYFKNHTSPDVDLGDISGINASVVNIQKEIDRLNEVAKNLNESLIDLQELGKYEQYIKGGGSGGGQIYEGKLTAEGLRFGIVASRFNHALVDRLVEGAIDAIVRHGGREEDITLVRVPGSWEIPVAAGELARKEDIDAVIAIGVLIRGATPHFDYIASEVSKGLADLSLELRKPITFGVITADTLEQAIERAGTKHGNKGWEAALSAIEMANLFKSLR

SEQ ID NO: 4092 - protein, 1363 aa, Artificial Sequence
  SARS-CoV-2/pangolin/Guangxi/P1E/2017__EPI_ISL_410539 spike protein (1-1203)(I706C_Y1102C) LumSynth construct
MFVFLFVLPLVSSQCVNLTTRTGIQPGYTNSSTRGVYYPDKVFRSSILHLTQDLFLPFFSNVTWFNTINYQGGFKKFDNPVLPFNDGVYFASTEKSNIIRGWIFGTTLDARTQSLLIVNNATNVVIKVCEFQFCTDPFLGVYYHNNNKTWVENEFRVYSSANNCTFEYISQPFLMDLEGKQGNFKNLREFVFKNVDGYFKIYSKHTPIDLVRDLPRGFAALEPLVDLPIGINITRFQTLLALHRSYLTPGKLESGWTTGAAAYYVGYLQQRTFLLSYNQNGTITDAVDCSLDPLSETKCTLKSLTVEKGIYQTSNFRVQPTISIVRFPNITNLCPFGEVFNASKFASVYAWNRKRISNCVADYSVLYNSTSFSTFKCYGVSPTKLNDLCFTNVYADSFVVKGDEVRQIAPGQTGVIADYNYKLPDDFTGCVIAWNSVKQDALTGGNYLYRLFRKSKLKPFERDISTEIYQAGSTPCNGQVGLNCYYPLERYGFHPTTGVNYQPFRVVVLSFELLNGPATVCGPKLSTTLVKDKCVNFNFNGLTGTGVLTTSKKQFLPFQQFGRDISDTTDAVRDPQTLEILDITPCSFGGVSVITPGTNTSNQVAVLYQDVNCTEVPMAIHAEQLTPAWRVYSAGANVFQTRAGCLVGAEHVNNSYECDIPVGAGICASYHSMSSLRSVNQRSIIAYTMSLGAENSVAYSNNSIACPTNFTISVTTEILPVSMTKTSVDCTMYICGDSIECSNLLLQYGSFCTQLNRALTGIAVEQDKNTQEVFAQVKQIYKTPPIKDFGGFNFSQILPDPSKPSKRSFIEDLLFNKVTLADAGFIKQYGDCLGDIAARDLICAQKFNGLTVLPPLLTDEMIAQYTSALLAGTITSGWTFGAGAALQIPFAMQMAYRFNGIGVTQNVLYENQKLIANQFNSAIGKIQDSLSSTASALGKLQDVVNQNAQALNTLVKQLSSNFGAISSVLNDILSRLDKVEAEVQIDRLITGRLQSLQTYVTQQLIRAAEIRASANLAATKMSECVLGQSKRVDFCGKGYHLMSFPQSAPHGVVFLHVTYVPAQEKNFTTAPAICHEGKAHFPREGVFVSNGTHWFITQRNFCEPQIITTDNTFVSGSCDVVIGIVNNTVYDPLQPELDSFKEELDKYFKNHTSPDVDLGDISGINASVVNIQKEIDRLNEVAKNLNESLIDLQELGKYEQYIKGGGSGGGQIYEGKLTAEGLRFGIVASRFNHALVDRLVEGAIDAIVRHGGREEDITLVRVPGSWEIPVAAGELARKEDIDAVIAIGVLIRGATPHFDYIASEVSKGLADLSLELRKPITFGVITADTLEQAIERAGTKHGNKGWEAALSAIEMANLFKSLR

SEQ ID NO: 4093 - protein, 1371 aa, Artificial Sequence
  SARS-CoV-2/Wuhan/WIV05/2019__EPI_ISL_402128 spike protein (1-1211)(P715C_P1069C) LumSynth construct
MFVFLVLLPLVSSQCVNLTTRTQLPPAYTNSFTRGVYYPDKVFRSSVLHSTQDLFLPFFSNVTWFHAIHVSGTNGTKRFDNPVLPFNDGVYFASTEKSNIIRGWIFGTTLDSKTQSLLIVNNATNVVIKVCEFQFCNDPFLGVYYHKNNKSWMESEFRVYSSANNCTFEYVSQPFLMDLEGKQGNFKNLREFVFKNIDGYFKIYSKHTPINLVRDLPQGFSALEPLVDLPIGINITRFQTLLALHRSYLTPGDSSSGWTAGAAAYYVGYLQPRTFLLKYNENGTITDAVDCALDPLSETKCTLKSFTVEKGIYQTSNFRVQPTESIVRFPNITNLCPFGEVFNATRFASVYAWNRKRISNCVADYSVLYNSASFSTFKCYGVSPTKLNDLCFTNVYADSFVIRGDEVRQIAPGQTGKIADYNYKLPDDFTGCVIAWNSNNLDSKVGGNYNYLYRLFRKSNLKPFERDISTEIYQAGSTPCNGVEGFNCYFPLQSYGFQPTNGVGYQPYRVVVLSFELLHAPATVCGPKKSTNLVKNKCVNFNFNGLTGTGVLTESNKKFLPFQQFGRDIADTTDAVRDPQTLEILDITPCSFGGVSVITPGTNTSNQVAVLYQDVNCTEVPVAIHADQLTPTWRVYSTGSNVFQTRAGCLIGAEHVNNSYECDIPIGAGICASYQTQTNSPRRARSVASQSIIAYTMSLGAENSVAYSNNSIAICTNFTISVTTEILPVSMTKTSVDCTMYICGDSTECSNLLLQYGSFCTQLNRALTGIAVEQDKNTQEVFAQVKQIYKTPPIKDFGGFNFSQILPDPSKPSKRSFIEDLLFNKVTLADAGFIKQYGDCLGDIAARDLICAQKFNGLTVLPPLLTDEMIAQYTSALLAGTITSGWTFGAGAALQIPFAMQMAYRFNGIGVTQNVLYENQKLIANQFNSAIGKIQDSLSSTASALGKLQDVVNQNAQALNTLVKQLSSNFGAISSVLNDILSRLDKVEAEVQIDRLITGRLQSLQTYVTQQLIRAAEIRASANLAATKMSECVLGQSKRVDFCGKGYHLMSFPQSAPHGVVFLHVTYVCAQEKNFTTAPAICHDGKAHFPREGVFVSNGTHWFVTQRNFYEPQIITTDNTFVSGNCDVVIGIVNNTVYDPLQPELDSFKEELDKYFKNHTSPDVDLGDISGINASVVNIQKEIDRLNEVAKNLNESLIDLQELGKYEQYIKGGGSGGGQIYEGKLTAEGLRFGIVASRFNHALVDRLVEGAIDAIVRHGGREEDITLVRVPGSWEIPVAAGELARKEDIDAVIAIGVLIRGATPHFDYIASEVSKGLADLSLELRKPITFGVITADTLEQAIERAGTKHGNKGWEAALSAIEMANLFKSLR

SEQ ID NO: 4094 - protein, 1367 aa, Artificial Sequence
  SARS-CoV-2/bat/Yunnan/RaTG13/2013__EPI_ISL_402131 spike protein (1-1207)(P711C_P1065C) LumSynth construct
MFVFLVLLPLVSSQCVNLTTRTQLPPAYTNSSTRGVYYPDKVFRSSVLHLTQDLFLPFFSNVTWFHAIHVSGTNGIKRFDNPVLPFNDGVYFASTEKSNIIRGWIFGTTLDSKTQSLLIVNNATNVVIKVCEFQFCNDPFLGVYYHKNNKSWMESEFRVYSSANNCTFEYVSQPFLMDLEGKQGNFKNLREFVFKNIDGYFKIYSKHTPINLVRDLPPGFSALEPLVDLPIGINITRFQTLLALHRSYLTPGDSSSGWTAGAAAYYVGYLQPRTFLLKYNENGTITDAVDCALDPLSETKCTLKSFTVEKGIYQTSNFRVQPTDSIVRFPNITNLCPFGEVFNATTFASVYAWNRKRISNCVADYSVLYNSTSFSTFKCYGVSPTKLNDLCFTNVYADSFVITGDEVRQIAPGQTGKIADYNYKLPDDFTGCVIAWNSKHIDAKEGGNFNYLYRLFRKANLKPFERDISTEIYQAGSKPCNGQTGLNCYYPLYRYGFYPTDGVGHQPYRVVVLSFELLNAPATVCGPKKSTNLVKNKCVNFNFNGLTGTGVLTESNKKFLPFQQFGRDIADTTDAVRDPQTLEILDITPCSFGGVSVITPGTNASNQVAVLYQDVNCTEVPVAIHADQLTPTWRVYSTGSNVFQTRAGCLIGAEHVNNSYECDIPIGAGICASYQTQTNSRSVASQSIIAYTMSLGAENSVAYSNNSIAICTNFTISVTTEILPVSMTKTSVDCTMYICGDSTECSNLLLQYGSFCTQLNRALTGIAVEQDKNTQEVFAQVKQIYKTPPIKDFGGFNFSQILPDPSKPSKRSFIEDLLFNKVTLADAGFIKQYGDCLGDIAARDLICAQKFNGLTVLPPLLTDEMIAQYTSALLAGTITSGWTFGAGAALQIPFAMQMAYRFNGIGVTQNVLYENQKLIANQFNSAIGKIQDSLSSTASALGKLQDVVNQNAQALNTLVKQLSSNFGAISSVLNDILSRLDKVEAEVQIDRLITGRLQSLQTYVTQQLIRAAEIRASANLAATKMSECVLGQSKRVDFCGKGYHLMSFPQSAPHGVVFLHVTYVCAQEKNFTTAPAICHDGKAHFPREGVFVSNGTHWFVTQRNFYEPQIITTDNTFVSGSCDVVIGIVNNTVYDPLQPELDSFKEELDKYFKNHTSPDVDLGDISGINASVVNIQKEIDRLNEVAKNLNESLIDLQELGKYEQYIKGGGSGGGQIYEGKLTAEGLRFGIVASRFNHALVDRLVEGAIDAIVRHGGREEDITLVRVPGSWEIPVAAGELARKEDIDAVIAIGVLIRGATPHFDYIASEVSKGLADLSLELRKPITFGVITADTLEQAIERAGTKHGNKGWEAALSAIEMANLFKSLR

SEQ ID NO: 4095 - protein, 1371 aa, Artificial Sequence
  SARS-CoV-2/Wuhan/HBCDC-HB-01/2019__EPI_ISL_402132 spike protein (1-1211)(P715C_P1069C) LumSynth construct
MFVFLVLLPLVSSQCVNLTTRTQLPPAYTNSITRGVYYPDKVFRSSVLHSTQDLFLPFFSNVTWFHAIHVSGTNGTKRFDNPVLPFNDGVYFASTEKSNIIRGWIFGTTLDSKTQSLLIVNNATNVVIKVCEFQFCNDPFLGVYYHKNNKSWMESEFRVYSSANNCTFEYVSQPFLMDLEGKQGNFKNLREFVFKNIDGYFKIYSKHTPINLVRDLPQGFSALEPLVDLPIGINITRFQTLLALHRSYLTPGDSSSGWTAGAAAYYVGYLQPRTFLLKYNENGTITDAVDCALDPLSETKCTLKSFTVEKGIYQTSNFRVQPTESIVRFPNITNLCPFGEVFNATRFASVYAWNRKRISNCVADYSVLYNSASFSTFKCYGVSPTKLNDLCFTNVYADSFVIRGDEVRQIAPGQTGKIADYNYKLPDDFTGCVIAWNSNNLDSKVGGNYNYLYRLFRKSNLKPFERDISTEIYQAGSTPCNGVEGFNCYFPLQSYGFQPTNGVGYQPYRVVVLSFELLHAPATVCGPKKSTNLVKNKCVNFNFNGLTGTGVLTESNKKFLPFQQFGRDIADTTDAVRDPQTLEILDITPCSFGGVSVITPGTNTSNQVAVLYQDVNCTEVPVAIHADQLTPTWRVYSTGSNVFQTRAGCLIGAEHVNNSYECDIPIGAGICASYQTQTNSPRRARSVASQSIIAYTMSLGAENSVAYSNNSIAICTNFTISVTTEILPVSMTKTSVDCTMYICGDSTECSNLLLQYGSFCTQLNRALTGIAVEQDKNTQEVFAQVKQIYKTPPIKDFGGFNFSQILPDPSKPSKRSFIEDLLFNKVTLADAGFIKQYGDCLGDIAARDLICAQKFNGLTVLPPLLTDEMIAQYTSALLAGTITSGWTFGAGAALQIPFAMQMAYRFNGIGVTQNVLYENQKLIANQFNSAIGKIQDSLSSTASALGKLQDVVNQNAQALNTLVKQLSSNFGAISSVLNDILSRLDKVEAEVQIDRLITGRLQSLQTYVTQQLIRAAEIRASANLAATKMSECVLGQSKRVDFCGKGYHLMSFPQSAPHGVVFLHVTYVCAQEKNFTTAPAICHDGKAHFPREGVFVSNGTHWFVTQRNFYEPQIITTDNTFVSGNCDVVIGIVNNTVYDPLQPELDSFKEELDKYFKNHTSPDVDLGDISGINASVVNIQKEIDRLNEVAKNLNESLIDLQELGKYEQYIKGGGSGGGQIYEGKLTAEGLRFGIVASRFNHALVDRLVEGAIDAIVRHGGREEDITLVRVPGSWEIPVAAGELARKEDIDAVIAIGVLIRGATPHFDYIASEVSKGLADLSLELRKPITFGVITADTLEQAIERAGTKHGNKGWEAALSAIEMANLFKSLR

SEQ ID NO: 4096 - protein, 1371 aa, Artificial Sequence
  SARS-CoV-2/Guangdong/20SF028/2020__EPI_ISL_403936 spike protein (1-1211)(P715C_P1069C) LumSynth construct
MFVFLVLLPLVSSQCVNLTTRTQLPPAYTNSFTRGVYYPDKVFRSSVLYSTQDLFLPFFSNVTWFHAIHVSGTNGTKRFDNPVLPFNDGVYFASTEKSNIIRGWIFGTTLDSKTQSLLIVNNATNVVIKVCEFQFCNDPFLGVYYHKNNKSWMESEFRVYSSANNCTFEYVSQPFLMDLEGKQGNFKNLREFVFKNIDGYFKIYSKHTPINLVRDLPQGFSALEPLVDLPIGINITRFQTLLALHRSYLTPGDSSSGWTAGAAAYYVGYLQPRTFLLKYNENGTITDAVDCALDPLSETKCTLKSFTVEKGIYQTSNFRVQPTESIVRFPNITNLCPFGEVFNATRFASVYAWNRKRISNCVADYSVLYNSASFSTFKCYGVSPTKLNDLCFTNVYADSFVIRGDEVRQIAPGQTGKIADYNYKLPDDFTGCVIAWNSNNLDSKVGGNYNYLYRLFRKSNLKPFERDISTEIYQAGSTPCNGVEGFNCYFPLQSYGFQPTNGVGYQPYRVVVLSFELLHAPATVCGPKKSTNLVKNKCVNFNFNGLTGTGVLTESNKKFLPFQQFGRDIADTTDAVRDPQTLEILDITPCSFGGVSVITPGTNTSNQVAVLYQDVNCTEVPVAIHADQLTPTWRVYSTGSNVFQTRAGCLIGAEHVNNSYECDIPIGAGICASYQTQTNSPRRARSVASQSIIAYTMSLGAENSVAYSNNSIAICTNFTISVTTEILPVSMTKTSVDCTMYICGDSTECSNLLLQYGSFCTQLNRALTGIAVEQDKNTQEVFAQVKQIYKTPPIKDFGGFNFSQILPDPSKPSKRSFIEDLLFNKVTLADAGFIKQYGDCLGDIAARDLICAQKFNGLTVLPPLLTDEMIAQYTSALLAGTITSGWTFGAGAALQIPFAMQMAYRFNGIGVTQNVLYENQKLIANQFNSAIGKIQDSLSSTASALGKLQDVVNQNAQALNTLVKQLSSNFGAISSVLNDILSRLDKVEAEVQIDRLITGRLQSLQTYVTQQLIRAAEIRASANLAATKMSECVLGQSKRVDFCGKGYHLMSFPQSAPHGVVFLHVTYVCAQEKNFTTAPAICHDGKAHFPREGVFVSNGTHWFVTQRNFYEPQIITTDNTFVSGNCDVVIGIVNNTVYDPLQPELDSFKEELDKYFKNHTSPDVDLGDISGINASVVNIQKEIDRLNEVAKNLNESLIDLQELGKYEQYIKGGGSGGGQIYEGKLTAEGLRFGIVASRFNHALVDRLVEGAIDAIVRHGGREEDITLVRVPGSWEIPVAAGELARKEDIDAVIAIGVLIRGATPHFDYIASEVSKGLADLSLELRKPITFGVITADTLEQAIERAGTKHGNKGWEAALSAIEMANLFKSLR

SEQ ID NO: 4097 - protein, 1371 aa, Artificial Sequence
  SARS-CoV-2/Shenzhen/SZTH-001/2020__EPI_ISL_406592 spike protein (1-1211)(P715C_P1069C) LumSynth construct
MFVFLVLLPLVSSQCVNLTTRTQLPPAYTNSFTRGVYYPDKVFRSSVLHSTQDLFLPFFSNVTWFHAIHVSGTNGTKRFDNPVLPFNDGVYFASTEKSNIIRGWIFGTTLDSKTQSLLIVNNATNVVIKVCEFQFCNDPFLGVYYHKNNKSWMESEFRVYSSANNCTFEYVSQPFLMDLEGKQGNFKNLREFVFKNIDGYFKIYSKHTPINLVRDLPQGFSALEPLVDLPIGINITRFQTLLALHRSYLTPGDSSSGWTAGAAAYYVGYLQPRTFLLKYNENGTITDAVDCALDPLSETKCTLKSFTVEKGIYQTSNFRVQPTESIVRFPNITNLCPFGEVFNATRFASVYAWNRKRISNCVADYSVLYNSASFSTFKCYGVSPTKLNDLCFTNVYADSFVIRGDEVRQIAPGQTGKIADYNYKLPDDFTGCVIAWNSNNLDSKVGGNYNYLYRLFRKSNLKPFERDISTEIYQAGSTPCNGVEGFNCYFPLQSYGFQPTNGVGYQPYRVVVLSFELLHAPATVCGPKKSTNLVKNKCVNFNFNGLTGTGVLTESNKKFLPFQQFGRDIADTTDAVRDPQTLEILDITPCSFGGVSVITPGTNTSNQVAVLYQDVNCTEVPVAIHADQLTPTWRVYSTGSNVFQTRAGCLIGAEHVNNSYECDIPIGAGICASYQTQTNSPRRARSVASQSIIAYTMSLGAENSVAYSNNSIAICTNFTISVTTEILPVSMTKTSVDCTMYICGDSTECSNLLLQYGSFCTQLNRALTGIAVEQDKNTQEVFAQVKQIYKTPPIKDFGGFNFSQILPDPSKPSKRSFIEDLLFNKVTLADAGFIKQYGDCLGDIAARDLICAQKFNGLTVLPPLLTDEMIAQYTSALLAGTITSGWTFGAGAALQIPFAMQMAYRFNGIGVTQNVLYENQKLIANQFNSAIGKIQDSLSSTASALGKLQDVVNQNAQALNTLVKQLSSNFGAISSVLNDILSRLDKVEAEVQIDRLITGRLQSLQTYVTQQLIRAAEIRASANLAATKMSECVLGQSKRVDFCGKGYHLMSFPQSAPHGVVFLHVTYVCAQEKNFTTAPAICHDGKAHFPREGVFVSNGTHWFVTQRNFYEPQIITTDNTFVSGNCDVLIGIVNNTVYDPLQPELDSFKEELDKYFKNHTSPDVDLGDISGINASVVNIQKEIDRLNEVAKNLNESLIDLQELGKYEQYIKGGGSGGGQIYEGKLTAEGLRFGIVASRFNHALVDRLVEGAIDAIVRHGGREEDITLVRVPGSWEIPVAAGELARKEDIDAVIAIGVLIRGATPHFDYIASEVSKGLADLSLELRKPITFGVITADTLEQAIERAGTKHGNKGWEAALSAIEMANLFKSLR

SEQ ID NO: 4098 - protein, 1371 aa, Artificial Sequence
  SARS-CoV-2/Shenzhen/SZTH-004/2020__EPI_ISL_406595 spike protein (1-1211)(P715C_P1069C) LumSynth construct
MFVFLVLLPLVSSQCVNLTTRTQLPPAYTNSFTRGVYYPDKVFRSSVLHSTQDLFLPFFSNVTWFHAIHVSGTNGTKRFDNPVLPFNDGVYFASTEKSNIIRGWIFGTTLDSKTQSLLIVNNATNVVIKVCEFQFCNDPFLGVYYHKNNKSWMESEFRVYSSANNCTFEYVSQPFLMDLEGKQGNFKNLREFVFKNIDGYFKIYSKHTPINLVRDLPQGFSALEPLVDLPIGINITRFQTLLALHRSYLTPGDSSSGWTAGAAAYYVGYLQPRTFLLKYNENGTITDAVDCALDPLSETKCTLKSFTVEKGIYQTSNFRVQPTESIVRFPNITNLCPFGEVFNATRFASVYAWDRKRISNCVAYYSVLYNSASFSTFKCYGVSPTKLNDLCFTNVYADSFVIRGDEVRQIAPGQTGKIADYNYKLPDDFTGCVIAWNSNNLDSKVGGNYNYLYRLFRKSNLKPFERDISTEIYQAGSTPCNGVEGFNCYFPLQSYGFQPTNGVGYQPYRVVVLSFELLHAPATVCGPKKSTNLVKNKCVNFNFNGLTGTGVLTESNKKFLPFQQFGRDIADTTDAVRDPQTLEILDITPCSFGGVSVITPGTNTSNQVAVLYQDVNCTEVPVAIHADQLTPTWRVYSTGSNVFQTRAGCLIGAEHVNNSYECDIPIGAGICASYQTQTNSPRRARSVASQSIIAYTMSLGAENSVAYSNNSIAICTNFTISVTTEILPVSMTKTSVDCTMYICGDSTECSNLLLQYGSFCTQLNRALTGIAVEQDKNTQEVFAQVKQIYKTPPIKDFGGFNFSQILPDPSKPSKRSFIEDLLFNKVTLADAGFIKQYGDCLGDIAARDLICAQKFNGLTVLPPLLTDEMIAQYTSALLAGTITSGWTFGAGAALQIPFAMQMAYRFNGIGVTQNVLYENQKLIANQFNSAIGKIQDSLSSTASALGKLQDVVNQNAQALNTLVKQLSSNFGAISSVLNDILSRLDKVEAEVQIDRLITGRLQSLQTYVTQQLIRAAEIRASANLAATKMSECVLGQSKRVDFCGKGYHLMSFPQSAPHGVVFLHVTYVCAQEKNFTTAPAICHDGKAHFPREGVFVSNGTHWFVTQRNFYEPQIITTDNTFVSGNCDVVIGIVNNTVYDPLQPELDSFKEELDKYFKNHTSPDVDLGDISGINASVVNIQKEIDRLNEVAKNLNESLIDLQELGKYEQYIKGGGSGGGQIYEGKLTAEGLRFGIVASRFNHALVDRLVEGAIDAIVRHGGREEDITLVRVPGSWEIPVAAGELARKEDIDAVIAIGVLIRGATPHFDYIASEVSKGLADLSLELRKPITFGVITADTLEQAIERAGTKHGNKGWEAALSAIEMANLFKSLR

SEQ ID NO: 4099 - protein, 1371 aa, Artificial Sequence
  SARS-CoV-2/France/IDF0372/2020__EPI_ISL_406596 spike protein (1-1211)(P715C_P1069C) LumSynth construct
MFVFLVLLPLVSSQCVNLTTRTQLPPAYTNSFTRGVYYPDKVFRSSVLHSTQDLFLPFFSNVTWFHAIHVSGTNGTKRFDNPVLPFNDGVYFASTEKSNIIRGWIFGTTLDSKTQSLLIVNNATNVVIKVCEFQFCNDPFLGVYYHKNNKSWMESEFRVYSSANNCTFEYVSQPFLMDLEGKQGNFKNLREFVFKNIDGYFKIYSKHTPINLVRDLPQGFSALEPLVDLPIGINITRFQTLLALHRSYLTPGDSSSGWTAGAAAYYVGYLQPRTFLLKYNENGTITDAVDCALDPLSETKCTLKSFTVEKGIYQTSNFRVQPTESIVRFPNITNLCPFGEVFNATRFASVYAWNRKRISNCVADYSFLYNSASFSTFKCYGVSPTKLNDLCFTNVYADSFVIRGDEVRQIAPGQTGKIADYNYKLPDDFTGCVIAWNSNNLDSKVGGNYNYLYRLFRKSNLKPFERDISTEIYQAGSTPCNGVEGFNCYFPLQSYGFQPTNGVGYQPYRVVVLSFELLHAPATVCGPKKSTNLVKNKCVNFNFNGLTGTGVLTESNKKFLPFQQFGRDIADTTDAVRDPQTLEILDITPCSFGGVSVITPGTNTSNQVAVLYQDVNCTEVPVAIHADQLTPTWRVYSTGSNVFQTRAGCLIGAEHVNNSYECDIPIGAGICASYQTQTNSPRRARSVASQSIIAYTMSLGAENSVAYSNNSIAICTNFTISVTTEILPVSMTKTSVDCTMYICGDSTECSNLLLQYGSFCTQLNRALTGIAVEQDKNTQEVFAQVKQIYKTPPIKDFGGFNFSQILPDPSKPSKRSFIEDLLFNKVTLADAGFIKQYGDCLGDIAARDLICAQKFNGLTVLPPLLTDEMIAQYTSALLAGTITSGWTFGAGAALQIPFAMQMAYRFNGIGVTQNVLYENQKLIANQFNSAIGKIQDSLSSTASALGKLQDVVNQNAQALNTLVKQLSSNFGAISSVLNDILSRLDKVEAEVQIDRLITGRLQSLQTYVTQQLIRAAEIRASANLAATKMSECVLGQSKRVDFCGKGYHLMSFPQSAPHGVVFLHVTYVCAQEKNFTTAPAICHDGKAHFPREGVFVSNGTHWFVTQRNFYEPQIITTDNTFVSGNCDVVIGIVNNTVYDPLQPELDSFKEELDKYFKNHTSPDVDLGDISGINASVVNIQKEIDRLNEVAKNLNESLIDLQELGKYEQYIKGGGSGGGQIYEGKLTAEGLRFGIVASRFNHALVDRLVEGAIDAIVRHGGREEDITLVRVPGSWEIPVAAGELARKEDIDAVIAIGVLIRGATPHFDYIASEVSKGLADLSLELRKPITFGVITADTLEQAIERAGTKHGNKGWEAALSAIEMANLFKSLR

SEQ ID NO: 4100 - protein, 1371 aa, Artificial Sequence
  SARS-CoV-2/Australia/VIC01/2020__EPI_ISL_406844 spike protein (1-1211)(P715C_P1069C) LumSynth construct
MFVFLVLLPLVSSQCVNLTTRTQLPPAYTNSFTRGVYYPDKVFRSSVLHSTQDLFLPFFSNVTWFHAIHVSGTNGTKRFDNPVLPFNDGVYFASTEKSNIIRGWIFGTTLDSKTQSLLIVNNATNVVIKVCEFQFCNDPFLGVYYHKNNKSWMESEFRVYSSANNCTFEYVSQPFLMDLEGKQGNFKNLREFVFKNIDGYFKIYSKHTPINLVRDLPQGFSALEPLVDLPIGINITRFQTLLALHRRYLTPGDSSSGWTAGAAAYYVGYLQPRTFLLKYNENGTITDAVDCALDPLSETKCTLKSFTVEKGIYQTSNFRVQPTESIVRFPNITNLCPFGEVFNATRFASVYAWNRKRISNCVADYSVLYNSASFSTFKCYGVSPTKLNDLCFTNVYADSFVIRGDEVRQIAPGQTGKIADYNYKLPDDFTGCVIAWNSNNLDSKVGGNYNYLYRLFRKSNLKPFERDISTEIYQAGSTPCNGVEGFNCYFPLQSYGFQPTNGVGYQPYRVVVLSFELLHAPATVCGPKKSTNLVKNKCVNFNFNGLTGTGVLTESNKKFLPFQQFGRDIADTTDAVRDPQTLEILDITPCSFGGVSVITPGTNTSNQVAVLYQDVNCTEVPVAIHADQLTPTWRVYSTGSNVFQTRAGCLIGAEHVNNSYECDIPIGAGICASYQTQTNSPRRARSVASQSIIAYTMSLGAENSVAYSNNSIAICTNFTISVTTEILPVSMTKTSVDCTMYICGDSTECSNLLLQYGSFCTQLNRALTGIAVEQDKNTQEVFAQVKQIYKTPPIKDFGGFNFSQILPDPSKPSKRSFIEDLLFNKVTLADAGFIKQYGDCLGDIAARDLICAQKFNGLTVLPPLLTDEMIAQYTSALLAGTITSGWTFGAGAALQIPFAMQMAYRFNGIGVTQNVLYENQKLIANQFNSAIGKIQDSLSSTASALGKLQDVVNQNAQALNTLVKQLSSNFGAISSVLNDILSRLDKVEAEVQIDRLITGRLQSLQTYVTQQLIRAAEIRASANLAATKMSECVLGQSKRVDFCGKGYHLMSFPQSAPHGVVFLHVTYVCAQEKNFTTAPAICHDGKAHFPREGVFVSNGTHWFVTQRNFYEPQIITTDNTFVSGNCDVVIGIVNNTVYDPLQPELDSFKEELDKYFKNHTSPDVDLGDISGINASVVNIQKEIDRLNEVAKNLNESLIDLQELGKYEQYIKGGGSGGGQIYEGKLTAEGLRFGIVASRFNHALVDRLVEGAIDAIVRHGGREEDITLVRVPGSWEIPVAAGELARKEDIDAVIAIGVLIRGATPHFDYIASEVSKGLADLSLELRKPITFGVITADTLEQAIERAGTKHGNKGWEAALSAIEMANLFKSLR

SEQ ID NO: 4101 - protein, 1371 aa, Artificial Sequence
  SARS-CoV-2/Germany/BavPat1/2020__EPI_ISL_406862 spike protein (1-1211)(P715C_P1069C) LumSynth construct
MFVFLVLLPLVSSQCVNLTTRTQLPPAYTNSFTRGVYYPDKVFRSSVLHSTQDLFLPFFSNVTWFHAIHVSGTNGTKRFDNPVLPFNDGVYFASTEKSNIIRGWIFGTTLDSKTQSLLIVNNATNVVIKVCEFQFCNDPFLGVYYHKNNKSWMESEFRVYSSANNCTFEYVSQPFLMDLEGKQGNFKNLREFVFKNIDGYFKIYSKHTPINLVRDLPQGFSALEPLVDLPIGINITRFQTLLALHRSYLTPGDSSSGWTAGAAAYYVGYLQPRTFLLKYNENGTITDAVDCALDPLSETKCTLKSFTVEKGIYQTSNFRVQPTESIVRFPNITNLCPFGEVFNATRFASVYAWNRKRISNCVADYSVLYNSASFSTFKCYGVSPTKLNDLCFTNVYADSFVIRGDEVRQIAPGQTGKIADYNYKLPDDFTGCVIAWNSNNLDSKVGGNYNYLYRLFRKSNLKPFERDISTEIYQAGSTPCNGVEGFNCYFPLQSYGFQPTNGVGYQPYRVVVLSFELLHAPATVCGPKKSTNLVKNKCVNFNFNGLTGTGVLTESNKKFLPFQQFGRDIADTTDAVRDPQTLEILDITPCSFGGVSVITPGTNTSNQVAVLYQGVNCTEVPVAIHADQLTPTWRVYSTGSNVFQTRAGCLIGAEHVNNSYECDIPIGAGICASYQTQTNSPRRARSVASQSIIAYTMSLGAENSVAYSNNSIAICTNFTISVTTEILPVSMTKTSVDCTMYICGDSTECSNLLLQYGSFCTQLNRALTGIAVEQDKNTQEVFAQVKQIYKTPPIKDFGGFNFSQILPDPSKPSKRSFIEDLLFNKVTLADAGFIKQYGDCLGDIAARDLICAQKFNGLTVLPPLLTDEMIAQYTSALLAGTITSGWTFGAGAALQIPFAMQMAYRFNGIGVTQNVLYENQKLIANQFNSAIGKIQDSLSSTASALGKLQDVVNQNAQALNTLVKQLSSNFGAISSVLNDILSRLDKVEAEVQIDRLITGRLQSLQTYVTQQLIRAAEIRASANLAATKMSECVLGQSKRVDFCGKGYHLMSFPQSAPHGVVFLHVTYVCAQEKNFTTAPAICHDGKAHFPREGVFVSNGTHWFVTQRNFYEPQIITTDNTFVSGNCDVVIGIVNNTVYDPLQPELDSFKEELDKYFKNHTSPDVDLGDISGINASVVNIQKEIDRLNEVAKNLNESLIDLQELGKYEQYIKGGGSGGGQIYEGKLTAEGLRFGIVASRFNHALVDRLVEGAIDAIVRHGGREEDITLVRVPGSWEIPVAAGELARKEDIDAVIAIGVLIRGATPHFDYIASEVSKGLADLSLELRKPITFGVITADTLEQAIERAGTKHGNKGWEAALSAIEMANLFKSLR

SEQ ID NO: 4102 - protein, 1371 aa, Artificial Sequence
  SARS-CoV-2/Wuhan/HBCDC-HB-02/2020__EPI_ISL_412978 spike protein (1-1211)(P715C_P1069C) LumSynth construct
MFVFLVLLPLVSSQCVNLTTRTQLPPAYTNSFTRGVYYPDKVFRSSVLHSTQDLFLPFFSNVTWFHAIHVSGTNGTKRFDNPVLPFNDGVYFASTEKSNIIRGWIFGTTLDSKTQSLLIVNNATNVVIKVCEFQFCNDPFLGVYYHKNNKSWMESEFRVYSSANNCTFEYVSQPFLMDLEGKQGNFKNLREFVFKNIDGYFKIYSKHTPINLVRDLPQGFSALEPLVDLPIGINITRFQTLLALHRSYLTPGDSSSGWTAGAAAYYVGYLQPRTFLLKYNENGTITDAVDCALDPLSETKCTLKSFTVEKGIYQTSNFRVQPTESIVRFPNITNLCPFGEVFNATRFASVYAWNRKRISNCVADYSVLYNSASFSTFKCYGVSPTKLNDLCFTNVYADSFVIRGDEVRQIAPGQTGKIADYNYKLPDDFTGCVIAWNSNNLDSKVGGNYNYLYRLFRKSNLKPFERDISTEIYQAGSTPCNGVEGFNCYFPLQSYGFQPTNGVGYQPYRVVVLSFELLHAPATVCGPKKSTNLVKNKCVNFNFNGLTGTGVLTESNKKFLPFQQFGRDIADTTDAVRDPQTLEILDITPCSFGGVSVITPGTNTSNQVAVLYQDVNCTEVPVAIHADQLTPTWRVYSTGSNVFQTRAGCLIGAEHVNNSYECDIPIGAGICASYQTQTNSPRRARSVASQSIIAYTMSLGAENSVAYSNNSIAICTNFTISVTTEILPVSMTKTSVDCTMYICGDSTECSNFLLQYGSFCTQLNRALTGIAVEQDKNTQEVFAQVKQIYKTPPIKDFGGFNFSQILPDPSKPSKRSFIEDLLFNKVTLADAGFIKQYGDCLGDIAARDLICAQKFNGLTVLPPLLTDEMIAQYTSALLAGTITSGWTFGAGAALQIPFAMQMAYRFNGIGVTQNVLYENQKLIANQFNSAIGKIQDSLSSTASALGKLQDVVNQNAQALNTLVKQLSSNFGAISSVLNDILSRLDKVEAEVQIDRLITGRLQSLQTYVTQQLIRAAEIRASANLAATKMSECVLGQSKRVDFCGKGYHLMSFPQSAPHGVVFLHVTYVCAQEKNFTTAPAICHDGKAHFPREGVFVSNGTHWFVTQRNFYEPQIITTDNTFVSGNCDVVIGIVNNTVYDPLQPELDSFKEELDKYFKNHTSPDVDLGDISGINASVVNIQKEIDRLNEVAKNLNESLIDLQELGKYEQYIKGGGSGGGQIYEGKLTAEGLRFGIVASRFNHALVDRLVEGAIDAIVRHGGREEDITLVRVPGSWEIPVAAGELARKEDIDAVIAIGVLIRGATPHFDYIASEVSKGLADLSLELRKPITFGVITADTLEQAIERAGTKHGNKGWEAALSAIEMANLFKSLR

SEQ ID NO: 4103 - protein, 1371 aa, Artificial Sequence
  SARS-CoV-2/Australia/QLD02/2020__EPI_ISL_407896 spike protein (1-1211)(P715C_P1069C) LumSynth construct
MFVFLVLLPLVSSQCVNLTTRTQLPPAYTNSFTRGVYYPDKVFRSSVLHSTQDLFLPFFSNVTWFHAIHVSGTNGTKRFDNPVLPFNDGVYFASTEKSNIIRGWIFGTTLDSKTQSLLIVNNATNVVIKVCEFQFCNDPFLGVYYHKNNKSWMESEFRVYSSANNCTFEYVSQPFLMDLEGKQGNFKNLREFVFKNIDGYFKIYSKHTPINLVRDLPQGFSALEPLVDLPIGINITRFQTLLALHRSYLTPGDSSSGWTAGAAAYYVGYLQPRTFLLKYNENGTITDAVDCALDPLSETKCTLKSFTVEKGIYQTSNFRVQPTESIVRFPNITNLCPFGEVFNATRFASVYAWNRKRISNCVADYSVLYNSASFSTFKCYGVSPTKLNDLCFTNVYADSFVIRGDEVRQIAPGQTGKIADYNYKLPDDFTGCVIAWNSNNLDSKVGGNYNYLYRLFRKSNLKPFERDISTEIYQAGSTPCNGVEGFNCYFPLQSYGFQPTNGVGYQPYRVVVLSFELLHAPATVCGPKKSTNLVKNKCVNFNFNGLTGTGVLTESNKKFLPFQQFGRDIADTTDAVRDPQTLEILDITPCSFGGVSVITPGTNTSNQVAVLYQDVNCTEVPVAIHADQLTPTWRVYSTGSNVFQTRAGCLIGAEHVNNSYECDIPIGAGICASYQTQTNSPRRARSVASQSIIAYTMSLGAENSVAYSNNSIAICTNFTISVTTEILPVSMTKTSVDCTMYICGDSTECSNLLLQYGSFCTQLNRALTGIAVEQDKNTQEVFAQVKQIYKTPPIKDFGGFNFSQILPDPSKPSKRSFIEDLLFNKVTLADAGFIKQYGDCLGDIAARDLICAQKFNGLTVLPPLLTDEMIAQYTSALLAGTITSGWTFGAGAALQIPFAMQMAYRFNGIGVTQNVLYENQKLIANQFNSAIGKIQDSLSSTASALGKLQDVVNQNAQALNTLVKQLSSNFGAISSVLNDILSRLDKVEAEVQIDRLITGRLQSLQTYVTQQLIRAAEIRASANLAATKMSECVLGQSKRVDFCGKGYHLMSFPQSAPHGVVFLHVTYVCAQEKNFTTAPAICHDGKAHFPREGVFVSNGTHWFVTQRNFYEPQIITTDNTFVSGNCDVVIGIVNNTVYDPLQLELDSFKEELDKYFKNHTSPDVDLGDISGINASVVNIQKEIDRLNEVAKNLNESLIDLQELGKYEQYIKGGGSGGGQIYEGKLTAEGLRFGIVASRFNHALVDRLVEGAIDAIVRHGGREEDITLVRVPGSWEIPVAAGELARKEDIDAVIAIGVLIRGATPHFDYIASEVSKGLADLSLELRKPITFGVITADTLEQAIERAGTKHGNKGWEAALSAIEMANLFKSLR

SEQ ID NO: 4104 - protein, 1371 aa, Artificial Sequence
  SARS-CoV-2/India/1-31/2020__EPI_ISL_413523 spike protein (1-1211)(P715C_P1069C) LumSynth construct
MFVFLVLLPLVSSQCVNLTTRTQLPPAYTNSFTRGVYYPDKVFRSSVLHSTQDLFLPFFSNVTWFHAIHVSGTNGTKRFDNPVLPFNDGVYFASTEKSNIIRGWIFGTTLDSKTQSLLIVNNATNVVIKVCEFQFCNDPFLGVYYHKNNKSWMESEFRVYSSANNCTFEYVSQPFLMDLEGKQGNFKNLREFVFKNIDGYFKIYSKHTPINLVRDLPQGFSALEPLVDLPIGINITRFQTLLALHRSYLTPGDSSSGWTAGAAAYYVGYLQPRTFLLKYNENGTITDAVDCALDPLSETKCTLKSFTVEKGIYQTSNFRVQPTESIVRFPNITNLCPFGEVFNATRFASVYAWNRKRISNCVADYSVLYNSASFSTFKCYGVSPTKLNDLCFTNVYADSFVIRGDEVRQIAPGQTGKIADYNYKLPDDFTGCVIAWNSNNLDSKVGGNYNYLYRLFRKSNLKPFERDISTEIYQAGSTPCNGVEGFNCYFPLQSYGFQPTNGVGYQPYRVVVLSFELLHAPATVCGPKKSTNLVKNKCVNFNFNGLTGTGVLTESNKKFLPFQQFGRDIADTTDAVRDPQTLEILDITPCSFGGVSVITPGTNTSNQVAVLYQDVNCTEVPVAIHADQLTPTWRVYSTGSNVFQTRAGCLIGAEHVNNSYECDIPIGAGICASYQTQTNSPRRARSVASQSIIAYTMSLGAENSVAYSNNSIAICTNFTISVTTEILPVSMTKTSVDCTMYICGDSTECSNLLLQYGSFCTQLNRALTGIAVEQDKNTQEVFAQVKQIYKTPPIKDFGGFNFSQILPDPSKPSKRSFIEDLLFNKVTLADAGFIKQYGDCLGDIAARDLICAQKFNGLTVLPPLLTDEMIAQYTSALLAGTITSGWTFGAGAALQIPFAMQMAYRFNGIGVTQNVLYENQKLIANQFNSVIGKIQDSLSSTASALGKLQDVVNQNAQALNTLVKQLSSNFGAISSVLNDILSRLDKVEAEVQIDRLITGRLQSLQTYVTQQLIRAAEIRASANLAATKMSECVLGQSKRVDFCGKGYHLMSFPQSAPHGVVFLHVTYVCAQEKNFTTAPAICHDGKAHFPREGVFVSNGTHWFVTQRNFYEPQIITTDNTFVSGNCDVVIGIVNNTVYDPLQPELDSFKEELDKYFKNHTSPDVDLGDISGINASVVNIQKEIDRLNEVAKNLNESLIDLQELGKYEQYIKGGGSGGGQIYEGKLTAEGLRFGIVASRFNHALVDRLVEGAIDAIVRHGGREEDITLVRVPGSWEIPVAAGELARKEDIDAVIAIGVLIRGATPHFDYIASEVSKGLADLSLELRKPITFGVITADTLEQAIERAGTKHGNKGWEAALSAIEMANLFKSLR

SEQ ID NO: 4105 - protein, 1371 aa, Artificial Sequence
  SARS-CoV-2/Guangdong/GD2020087-P0008/2020__EPI_ISL_413863 spike protein (1-1211)(P715C_P1069C) LumSynth construct
MFVFLVLLPLVSSQCVNLTTRTQLPPAYTNSFTRGVYYPDKVFRSSVLHSTQDLFLPFFSNVTWFHAIHVSGTNGTKRFDNPVLPFNDGVYFASTEKSNIIRGWIFGTTLDSKTQSLLIVNNATNVVIKVCEFQFCNDPFLGVYYHKNNKSWMESEFRVYSSANNCTFEYVSQPFLMDLEGKQGNFKNLREFVFKNIDGYFKIYSKHTPINLVRDLPQGFSALEPLVDLPIGINITRFQTLLALHRSYLTPGDSSSGWTAGAAAYYVGYLQPRTFLLKYNENGTITDAVDCALDPLSETKCTLKSFTVEKGIYQTSNFRVQPTESIVRFPNITNLCPFGEVFNATRFASVYAWNRKRISNCVADYSVLYNSASFSTFKCYGVSPTKLNDLCFTNVYADSFVIRGDEVREIAPGQTGKIADYNYKLPDDFTGCVIAWNSNNLDSKVGGNYNYLYRLFRKSNLKPFERDISTEIYQAGSTPCNGVEGFNCYFPLQSYGFQPTNGVGYQPYRVVVLSFELLHAPATVCGPKKSTNLVKNKCVNFNFNGLTGTGVLTESNKKFLPFQQFGRDIADTTDAVRDPQTLEILDITPCSFGGVSVITPGTNTSNQVAVLYQDVNCTEVPVAIHADQLTPTWRVYSTGSNVFQTRAGCLIGAEHVNNSYECDIPIGAGICASYQTQTNSPRRARSVASQSIIAYTMSLGAENSVAYSNNSIAICTNFTISVTTEILPVSMTKTSVDCTMYICGDSTECSNLLLQYGSFCTQLNRALTGIAVEQDKNTQEVFAQVKQIYKTPPIKDFGGFNFSQILPDPSKPSKRSFIEDLLFNKVTLADAGFIKQYGDCLGDIAARDLICAQKFNGLTVLPPLLTDEMIAQYTSALLAGTITSGWTFGAGAALQIPFAMQMAYRFNGIGVTQNVLYENQKLIANQFNSAIGKIQDSLSSTASALGKLQDVVNQNAQALNTLVKQLSSNFGAISSVLNDILSRLDKVEAEVQIDRLITGRLQSLQTYVTQQLIRAAEIRASANLAATKMSECVLGQSKRVDFCGKGYHLMSFPQSAPHGVVFLHVTYVCAQEKNFTTAPAICHDGKAHFPREGVFVSNGTHWFVTQRNFYEPQIITTDNTFVSGNCDVVIGIVNNTVYDPLQPELDSFKEELDKYFKNHTSPDVDLGDISGINASVVNIQKEIDRLNEVAKNLNESLIDLQELGKYEQYIKGGGSGGGQIYEGKLTAEGLRFGIVASRFNHALVDRLVEGAIDAIVRHGGREEDITLVRVPGSWEIPVAAGELARKEDIDAVIAIGVLIRGATPHFDYIASEVSKGLADLSLELRKPITFGVITADTLEQAIERAGTKHGNKGWEAALSAIEMANLFKSLR

SEQ ID NO: 4106 - protein, 1371 aa, Artificial Sequence
  SARS-CoV-2/Sweden/01/2020__EPI_ISL_411951 spike protein (1-1211)(P715C_P1069C) LumSynth construct
MFVFLVLLPLVSSQCVNLTTRTQLPPAYTNSFTRGVYYPDKVFRSSVLHSTQDLFLPFFSNVTWFHAIHVSGTNGTKRFDNPVLPFNDGVYFASTEKSNIIRGWIFGTTLDSKTQSLLIVNNATNVVIKVCEFQFCNDPFLGVYYHKNNKSWMESEFRVYSSANNCTFEYVSQPFLMDLEGKQGNFKNLREFVFKNIDGYFKIYSKHTPINLVRDLPQGFSALEPLVDLPIGINITRFQTLLALHRSYLTPGDSSSGWTAGAAAYYVGYLQPRTFLLKYNENGTITDAVDCALDPLSETKCTLKSFTVEKGIYQTSNFRVQPTESIVRFPNITNLCPFGEVFNATRFASVYAWNRKRISNCVADYSVLYNSASFSTFKCYGVSPTKLNDLCFTNVYADSFVIRGDEVRQIAPGQTGKIADYNYKLPDDFTGCVIAWNSNNLDSKVGGNYNYLYRLFRKSNLKPFERDISTEIYQAGSTPCNGVEGFNCYFPLQSYGFQPTNGVGYQPYRVVVLSFELLHAPATVCGPKKSTNLVKNKCVNFNFNGLTGTGVLTESNKKFLPFQQFGRDIADTTDAVRDPQTLEILDITPCSFGGVSVITPGTNTSNQVAVLYQDVNCTEVPVAIHADQLTPTWRVYSTGSNVFQTRAGCLIGAEHVNNSYECDIPIGAGICASYQTQTNSPRRARSVASQSIIAYTMSLGAENSVAYSNNSIAICTNFTISVTTEILPVSMTKTSVDCTMYICGDSTECSNLLLQYGSFCTQLNRALTGIAVEQDKNTQEVFAQVKQIYKTPPIKDCGGFNFSQILPDPSKPSKRSFIEDLLFNKVTLADAGFIKQYGDCLGDIAARDLICAQKFNGLTVLPPLLTDEMIAQYTSALLAGTITSGWTFGAGAALQIPFAMQMAYRFNGIGVTQNVLYENQKLIANQFNSAIGKIQDSLSSTASALGKLQDVVNQNAQALNTLVKQLSSNFGAISSVLNDILSRLDKVEAEVQIDRLITGRLQSLQTYVTQQLIRAAEIRASANLAATKMSECVLGQSKRVDFCGKGYHLMSFPQSAPHGVVFLHVTYVCAQEKNFTTAPAICHDGKAHFPREGVFVSNGTHWFVTQRNFYEPQIITTDNTFVSGNCDVVIGIVNNTVYDPLQPELDSFKEELDKYFKNHTSPDVDLGDISGINASVVNIQKEIDRLNEVAKNLNESLIDLQELGKYEQYIKGGGSGGGQIYEGKLTAEGLRFGIVASRFNHALVDRLVEGAIDAIVRHGGREEDITLVRVPGSWEIPVAAGELARKEDIDAVIAIGVLIRGATPHFDYIASEVSKGLADLSLELRKPITFGVITADTLEQAIERAGTKHGNKGWEAALSAIEMANLFKSLR

SEQ ID NO: 4107 - protein, 1371 aa, Artificial Sequence
  SARS-CoV-2/Tianmen/HBCDC-HB-07/2020__EPI_ISL_412983 spike protein (1-1211)(P715C_P1069C) LumSynth construct
MFVFLVLLPLVSSQCVNLTTRTQLPPAYTNSFTRGVYYPDKVFRSSVLHSTQDLFLPFFSNVTWFHAIHVSGTNGTKRFDNPVLPFNDGVYFASTEKSNIIRGWIFGTTLDSKTQSLLIVNNATNVVIKVCEFQFCNDPFLGVYYHKNNKSWMESEFRVYSSANNCTFEYVSQPFLMDLEGKQGNFKNLREFVFKNIDGYFKIYSKHTPINLVRDLPQGFSALEPLVDLPIGINITRFQTLLALHRSYLTPGDSSSGWTAGAAAYYVGYLQPRTFLLKYNENGTITDAVDCALDPLSETKCTLKSFTVEKGIYQTSNFRVQPTESIVRFPNITNLCPFGEVFNATRFASVYAWNRKRISNCVADYSVLYNSASFSTFKCYGVSPTKLNDLCFTNVYADSFVIRGDEVRQIAPGQTGKIADYNYKLPDDFTGCVIAWNSNNLDSKVGGNYNYLYRLFRKSNLKPFERDISTEIYQAGSTPCNGVEGFNCYFPLQSYGFQPTNGVGYQPYRVVVLSFELLHAPATVCGPKKSTNLVKNKCVNFNFNGLTGTGVLTESNKKFLPFQQFGRDIADTTDAVRDPQTLEILDITPCSFGGVSVITPGTNTSNQVAVLYQDLNCTEVPVAIHADQLTPTWRVYSTGSNVFQTRAGCLIGAEHVNNSYECDIPIGAGICASYQTQTNSPRRARSVASQSIIAYTMSLGAENSVAYSNNSIAICTNFTISVTTEILPVSMTKTSVDCTMYICGDSTECSNLLLQYGSFCTQLNRALTGIAVEQDKNTQEVFAQVKQIYKTPPIKDFGGFNFSQILPDPSKPSKRSFIEDLLFNKVTLADAGFIKQYGDCLGDIAARDLICAQKFNGLTVLPPLLTDEMIAQYTSALLAGTITSGWTFGAGAALQIPFAMQMAYRFNGIGVTQNVLYENQKLIANQFNSAIGKIQDSLSSTASALGKLQDVVNQNAQALNTLVKQLSSNFGAISSVLNDILSRLDKVEAEVQIDRLITGRLQSLQTYVTQQLIRAAEIRASANLAATKMSECVLGQSKRVDFCGKGYHLMSFPQSAPHGVVFLHVTYVCAQEKNFTTAPAICHDGKAHFPREGVFVSNGTHWFVTQRNFYEPQIITTDNTFVSGNCDVVIGIVNNTVYDPLQPELDSFKEELDKYFKNHTSPDVDLGDISGINASVVNIQKEIDRLNEVAKNLNESLIDLQELGKYEQYIKGGGSGGGQIYEGKLTAEGLRFGIVASRFNHALVDRLVEGAIDAIVRHGGREEDITLVRVPGSWEIPVAAGELARKEDIDAVIAIGVLIRGATPHFDYIASEVSKGLADLSLELRKPITFGVITADTLEQAIERAGTKHGNKGWEAALSAIEMANLFKSLR

SEQ ID NO: 4108 - protein, 1371 aa, Artificial Sequence
  SARS-CoV-2/Hong Kong/case42_VM20002493/2020__EPI_ISL_414527 spike protein (1-1211)(P715C_P1069C) LumSynth construct
MFVFLVLLPLVSSQCVNLTTRTQLPPAYTNSFTRGVYYPDKVFRSSVLHSTQDLFLPFFSNVTWFHAIHVSGTNGTKRFDNPVLPFNDGVYFASTEKSNIIRGWIFGTTLDSKTQSLLIVNNATNVVIKVCEFQFCNDPFLGVYYHKNNKSWMESEFRVYSSANNCTFEYVSQPFLMDLEGKQGNFKNLREFVFKNIDGYFKIYSKHTPINLVRDLPQGFSALEPLVDLPIGINITRFQTLLALHRSYLTPGDSSSGWTAGAAAYYVGYLQPRTFLLKYNENGTITDAVDCALDPLSETKCTLKSFTVEKGIYQTSNFRVQPTESIVRFPNITNLCPFGEVFNATRFASVYAWNRKRISNCVADYSVLYNSASFSTFKCYGVSPTKLNDLCFTNVYADSFVIRGDEVRQIAPGQTGKIADYNYKLPDDFTGCVIAWNSNNLDSKVGGNYNYLYRLFRKSNLKPFERDISTEIYQAGSTPCNGVEGFNCYFPLQSYGFQPTNGVGYQPYRVVVLSFELLHAPATVCGPKKSTNLVKNKCVNFNFNGLTGTGVLTESNKKFLPFQQFGRDIADTTDAVRDPQTLEILDITPCSFGGVSVITPGTNTSNQVAVLYQDVNCTEVPVAIHADQLTPTWRVYSTGSNVFQTRAGCLIGAEHVNNSYECDIPIGAGICASYQTQTNSPRRARSVASQSIIAYTMSLGAENSVAYSNNSIAICTNFAISVTTEILPVSMTKTSVDCTMYICGDSTECSNLLLQYGSFCTQLNRALTGIAVEQDKNTQEVFAQVKQIYKTPPIKDFGGFNFSQILPDPSKPSKRSFIEDLLFNKVTLADAGFIKQYGDCLGDIAARDLICAQKFNGLTVLPPLLTDEMIAQYTSALLAGTITSGWTFGAGAALQIPFAMQMAYRFNGIGVTQNVLYENQKLIANQFNSAIGKIQDSLSSTASALGKLQDVVNQNAQALNTLVKQLSSNFGAISSVLNDILSRLDKVEAEVQIDRLITGRLQSLQTYVTQQLIRAAEIRASANLAATKMSECVLGQSKRVDFCGKGYHLMSFPQSAPHGVVFLHVTYVCAQEKNFTTAPAICHDGKAHFPREGVFVSNGTHWFVTQRNFYEPQIITTDNTFVSGNCDVVIGIVNNTVYDPLQPELDSFKEELDKYFKNHTSPDVDLGDISGINASVVNIQKEIDRLNEVAKNLNESLIDLQELGKYEQYIKGGGSGGGQIYEGKLTAEGLRFGIVASRFNHALVDRLVEGAIDAIVRHGGREEDITLVRVPGSWEIPVAAGELARKEDIDAVIAIGVLIRGATPHFDYIASEVSKGLADLSLELRKPITFGVITADTLEQAIERAGTKHGNKGWEAALSAIEMANLFKSLR

SEQ ID NO: 4109 - protein, 1371 aa, Artificial Sequence
  SARS-CoV-2/USA/CruiseA-23/2020__EPI_ISL_414482 spike protein (1-1211)(P715C_P1069C) LumSynth construct
MFVFLVLLPLVSSQCVNLTTRTQLPPAYTNSFTRGVYYPDKVFRSSVLHSTQDLFLPFFSNVTWFHAIHVSGTNGTKRFDNPVLPFNDGVYFASTEKSNIIRGWIFGTTLDSKTQSLLIVNNATNVVIKVCEFQFCNDPFLGVYYHKNNKSWMESEFRVYSSANNCTFEYVSQPFLMDLEVKQGNFKNLREFVFKNIDGYFKIYSKHTPINLVRDLPQGFSALEPLVDLPIGINITRFQTLLALHRSYLTPGDSSSGWTAGAAAYYVGYLQPRTFLLKYNENGTITDAVDCALDPLSETKCTLKSFTVEKGIYQTSNFRVQPTESIVRFPNITNLCPFGEVFNATRFASVYAWNRKRISNCVADYSVLYNSASFSTFKCYGVSPTKLNDLCFTNVYADSFVIRGDEVRQIAPGQTGKIADYNYKLPDDFTGCVIAWNSNNLDSKVGGNYNYLYRLFRKSNLKPFERDISTEIYQAGSTPCNGVEGFNCYFPLQSYGFQPTNGVGYQPYRVVVLSFELLHAPATVCGPKKSTNLVKNKCVNFNFNGLTGTGVLTESNKKFLPFQQFGRDIADTTDAVRDPQTLEILDITPCSFGGVSVITPGTNTSNQVAVLYQDVNCTEVPVAIHADQLTPTWRVYSTGSNVFQTRAGCLIGAEHVNNSYECDIPIGAGICASYQTQTNSPRRARSVASQSIIAYTMSLGAENSVAYSNNSIAICTNFTISVTTEILPVSMTKTSVDCTMYICGDSTECSNLLLQYGSFCTQLNRALTGIAVEQDKNTQEVFAQVKQIYKTPPIKDFGGFNFSQILPDPSKPSKRSFIEDLLFNKVTLADAGFIKQYGDCLGDIAARDLICAQKFNGLTVLPPLLTDEMIAQYTSALLAGTITSGWTFGAGAALQIPFAMQMAYRFNGIGVTQNVLYENQKLIANQFNSAIGKIQDSLSSTASALGKLQDVVNQNAQALNTLVKQLSSNFGAISSVLNDILSRLDKVEAEVQIDRLITGRLQSLQTYVTQQLIRAAEIRASANLAATKMSECVLGQSKRVDFCGKGYHLMSFPQSAPHGVVFLHVTYVCAQEKNFTTAPAICHDGKAHFPREGVFVSNGTHWFVTQRNFYEPQIITTDNTFVSGNCDVVIGIVNNTVYDPLQPELDSFKEELDKYFKNHTSPDVDLGDISGINASVVNIQKEIDRLNEVAKNLNESLIDLQELGKYEQYIKGGGSGGGQIYEGKLTAEGLRFGIVASRFNHALVDRLVEGAIDAIVRHGGREEDITLVRVPGSWEIPVAAGELARKEDIDAVIAIGVLIRGATPHFDYIASEVSKGLADLSLELRKPITFGVITADTLEQAIERAGTKHGNKGWEAALSAIEMANLFKSLR

SEQ ID NO: 4110 - protein, 1371 aa, Artificial Sequence
  SARS-CoV-2/Hong Kong/case85_VM20002868/2020__EPI_ISL_414519 spike protein (1-1211)(P715C_P1069C) LumSynth construct
MFVFLVLVPLVSSQCVNLTTRTQLPPAYTNSFTRGVYYPDKVFRSSVLHSTQDLFLPFFSNVTWFHAIHVSGTNGTKRFDNPVLPFNDGVYFASTEKSNIIRGWIFGTTLDSKTQSLLIVNNATNVVIKVCEFQFCNDPFLGVYYHKNNKSWMESEFRVYSSANNCTFEYVSQPFLMDLEGKQGNFKNLREFVFKNIDGYFKIYSKHTPINLVRDLPQGFSALEPLVDLPIGINITRFQTLLALHRSYLTPGDSSSGWTAGAAAYYVGYLQPRTFLLKYNENGTITDAVDCALDPLSETKCTLKSFTVEKGIYQTSNFRVQPTESIVRFPNITNLCPFGEVFNATRFASVYAWNRKRISNCVADYSVLYNSASFSTFKCYGVSPTKLNDLCFTNVYADSFVIRGDEVRQIAPGQTGKIADYNYKLPDDFTGCVIAWNSNNLDSKVGGNYNYLYRLFRKSNLKPFERDISTEIYQAGSTPCNGVEGFNCYFPLQSYGFQPTNGVGYQPYRVVVLSFELLHAPATVCGPKKSTNLVKNKCVNFNFNGLTGTGVLTESNKKFLPFQQFGRDIADTTDAVRDPQTLEILDITPCSFGGVSVITPGTNTSNQVAVLYQDVNCTEVPVAIHADQLTPTWRVYSTGSNVFQTRAGCLIGAEHVNNSYECDIPIGAGICASYQTQTNSPRRARSVASQSIIAYTMSLGAENSVAYSNNSIAICTNFTISVTTEILPVSMTKTSVDCTMYICGDSTECSNLLLQYGSFCTQLNRALTGIAVEQDKNTQEVFAQVKQIYKTPPIKDFGGFNFSQILPDPSKPSKRSFIEDLLFNKVTLADAGFIKQYGDCLGDIAARDLICAQKFNGLTVLPPLLTDEMIAQYTSALLAGTITSGWTFGAGAALQIPFAMQMAYRFNGIGVTQNVLYENQKLIANQFNSAIGKIQDSLSSTASALGKLQDVVNQNAQALNTLVKQLSSNFGAISSVLNDILSRLDKVEAEVQIDRLITGRLQSLQTYVTQQLIRAAEIRASANLAATKMSECVLGQSKRVDFCGKGYHLMSFPQSAPHGVVFLHVTYVCAQEKNFTTAPAICHDGKAHFPREGVFVSNGTHWFVTQRNFYEPQIITTDNTFVSGNCDVVIGIVNNTVYDPLQPELDSFKEELDKYFKNHTSPDVDLGDISGINASVVNIQKEIDRLNEVAKNLNESLIDLQELGKYEQYIKGGGSGGGQIYEGKLTAEGLRFGIVASRFNHALVDRLVEGAIDAIVRHGGREEDITLVRVPGSWEIPVAAGELARKEDIDAVIAIGVLIRGATPHFDYIASEVSKGLADLSLELRKPITFGVITADTLEQAIERAGTKHGNKGWEAALSAIEMANLFKSLR

SEQ ID NO: 4111 - protein, 1371 aa, Artificial Sequence; identical to SEQ ID NO: 4101
  SARS-CoV-2/England/200990660/2020__EPI_ISL_414523 spike protein (1-1211)(P715C_P1069C) LumSynth construct

SEQ ID NO: 4112 - protein, 1371 aa, Artificial Sequence
  SARS-CoV-2/Australia/NSW09/2020__EPI_ISL_413595 spike protein (1-1211)(P715C_P1069C) LumSynth construct
MFVFLVLLPLVSSQCVNLTTRTQLPPAYTNSFTRGVYYPDKVFRSSVLHSTQDLFLPFFSNVTWFHAIHVSGTNGTKRFDNPVLPFNDGVYFASTEKSNIIRGWIFGTTLDSKTQSLLIVNNATNVVIKVCEFQFCNDPFLGVYYHKNNKSWMESEFRVYSSANNCTFEYVSQPFLMDLEGKQGNFKNLREFVFKNIDGYFKIYSKHTPINLVRDLPQGFSALEPLVDLPIGINITRFQTLLALHRSYLTPGDSSSGWTAGAAAYYVGYLQPRTFLLKYNENGTITDAVDCALDPLSETKCTLKSFTVEKGIYQTSNFRVQPTESIVRFPNITNLCPFGEVFNATRFASVYAWNRKRISNCVADYSVLYNSASFSTFKCYGVSPTKLNDLCFTNVYADSFVIRGDEVRQIAPGQTGKIADYNYKLPDDFTGCVIAWNSNNLDSKVGGNYNYLYRLFRKSNLKPFERDISTEIYQAGSTPCNGVEGFNCYFPLQSYGFQPTNGVGYQPYRVVVLSFELLHAPATVCGPKKSTNLVKNKCVNFNFNGLTGTGVLTESNKKFLPFQQFGRDIADTTDAVRDPQTLEILDITPCSFGGVSVITPGTNTSNQVAVLYQDVNCTEVPVAIHADQLTPTWRVYSTGSNVFQTRAGCLIGAEHVNNSYECDIPIGAGICASYQTQTNSPRRARSVASQSIIAYTMSLGAENSVAYSNNSIAICTNFTISVTTEILPVSMTKTSVDCTMYICGDSTECSNLLLQYGSFCTQLNRALTGIAVEQDKNTQEVFAQVKQIYKTPPIKDFGGFNFSQILPDPSKPSKRSFIEDLLFNKVTLADAGFIKQYGDCLGDIAARDLICAQKFNGLTVLPPLLTDEMIAQYTSALLAGTITSGWTFGAGAALQIPFAMQMAYRFNGIGVTQNVLYENQKLIANQFNSAIGKIQDSLSFTASALGKLQDVVNQNAQALNTLVKQLSSNFGAISSVLNDILSRLDKVEAEVQIDRLITGRLQSLQTYVTQQLIRAAEIRASANLAATKMSECVLGQSKRVDFCGKGYHLMSFPQSAPHGVVFLHVTYVCAQEKNFTTAPAICHDGKAHFPREGVFVSNGTHWFVTQRNFYEPQIITTDNTFVSGNCDVVIGIVNNTVYDPLQPELDSFKEELDKYFKNHTSPDVDLGDISGINASVVNIQKEIDRLNEVAKNLNESLIDLQELGKYEQYIKGGGSGGGQIYEGKLTAEGLRFGIVASRFNHALVDRLVEGAIDAIVRHGGREEDITLVRVPGSWEIPVAAGELARKEDIDAVIAIGVLIRGATPHFDYIASEVSKGLADLSLELRKPITFGVITADTLEQAIERAGTKHGNKGWEAALSAIEMANLFKSLR

SEQ ID NO: 4113 - protein, 1371 aa, Artificial Sequence; identical to SEQ ID NO: 4093
  SARS-CoV-2/Australia/NSW10/2020__EPI_ISL_413596 spike protein (1-1211)(P715C_P1069C) LumSynth construct

SEQ ID NO: 4114 - protein, 1371 aa, Artificial Sequence
  SARS-CoV-2/Switzerland/1000477797/2020__EPI_ISL_413023 spike protein (1-1211)(P715C_P1069C) LumSynth construct
MFVFLVLLPLVSSQCVNLTTRTQLPPAYTNSFTRGVYYPDKVFRSSVLHSTQDLFLPFFSNVTWFHAIHVSGTNGTKRFDNPVLPFNDGVYFASTEKSNIIRGWIFGTTLDSKTQSLLIVNNATNVVIKVCEFQFCNDPFLGVYYHKNNKSWMESEFRVYSSANNCTFEYVSQPFLMDLEGKQGNFKNLREFVFKNIDGYFNIYSKHTPINLVRDLPQGFSALEPLVDLPIGINITRFQTLLALHRSYLTPGDSSSGWTAGAAAYYVGYLQPRTFLLKYNENGTITDAVDCALDPLSETKCTLKSFTVEKGIYQTSNFRVQPTESIVRFPNITNLCPFGEVFNATRFASVYAWNRKRISNCVADYSVLYNSASFSTFKCYGVSPTKLNDLCFTNVYADSFVIRGDEVRQIAPGQTGKIADYNYKLPDDFTGCVIAWNSNNLDSKVGGNYNYLYRLFRKSNLKPFERDISTEIYQAGSTPCNGVEGFNCYFPLQSYGFQPTNGVGYQPYRVVVLSFELLHAPATVCGPKKSTNLVKNKCVNFNFNGLTGTGVLTESNKKFLPFQQFGRDIADTTDAVRDPQTLEILDITPCSFGGVSVITPGTNTSNQVAVLYQGVNCTEVPVAIHADQLTPTWRVYSTGSNVFQTRAGCLIGAEHVNNSYECDIPIGAGICASYQTQTNSPRRARSVASQSIIAYTMSLGAENSVAYSNNSIAICTNFTISVTTEILPVSMTKTSVDCTMYICGDSTECSNLLLQYGSFCTQLNRALTGIAVEQDKNTQEVFAQVKQIYKTPPIKDFGGFNFSQILPDPSKPSKRSFIEDLLFNKVTLADAGFIKQYGDCLGDIAARDLICAQKFNGLTVLPPLLTDEMIAQYTSALLAGTITSGWTFGAGAALQIPFAMQMAYRFNGIGVTQNVLYENQKLIANQFNSAIGKIQDSLSSTASALGKLQDVVNQNAQALNTLVKQLSSNFGAISSVLNDILSRLDKVEAEVQIDRLITGRLQSLQTYVTQQLIRAAEIRASANLAATKMSECVLGQSKRVDFCGKGYHLMSFPQSAPHGVVFLHVTYVCAQEKNFTTAPAICHDGKAHFPREGVFVSNGTHWFVTQRNFYEPQIITTDNTFVSGNCDVVIGIVNNTVYDPLQPELDSFKEELDKYFKNHTSPDVDLGDISGINASVVNIQKEIDRLNEVAKNLNESLIDLQELGKYEQYIKGGGSGGGQIYEGKLTAEGLRFGIVASRFNHALVDRLVEGAIDAIVRHGGREEDITLVRVPGSWEIPVAAGELARKEDIDAVIAIGVLIRGATPHFDYIASEVSKGLADLSLELRKPITFGVITADTLEQAIERAGTKHGNKGWEAALSAIEMANLFKSLR

SEQ ID NO: 4115 - protein, 1371 aa, Artificial Sequence
  SARS-CoV-2/Belgium/BA-02291/2020__EPI_ISL_415159 spike protein (1-1211)(P715C_P1069C) LumSynth construct
MFVFLVLLPLVSSQCVNLTTRTQLPPAYTNSFTRGVYYPDKVFRSSVLHSTQDLFLPFFSNVTWFHAIHVSGTNGTKRFDNPVLPFNDGVYFASTEKSNIIRGWIFGTTLDSKTQSLLIVNNATNVVIKVCEFQFCNDPFLGVYYHKNNKSWMESEFRVYSSANNCTFEYVSQPFLMDLEGKQGNFKNLREFVFKNIDGYFKIYSKHTPINLVRDLPQGFSALEPLVDLPIGINITRFQTLLALHRSYLTPGDSSSGWTAGAAAYYVGYLQPRTFLLKYNENGTITDAVDCALDPLSETKCTLKSFTVEKGIYQTSNFRVQPTESIVRFPNITNLCPFGEVFNATRFASVYAWNRKRISNCVADYSVLYNSASFSTFKCYGVSPTKLNDLCFTNVYADSFVIRGDEVRQIAPGQTGKIADYNYKLPDDFTGCVIAWNSNNLDSKVGGNYNYLYRLFRRSNLKPFERDISTEIYQAGSTPCNGVEGFNCYFPLQSYGFQPTNGVGYQPYRVVVLSFELLPAPATVCGPKKSTNLVKNKCVNFNFNGLTGTGVLTESNKKFLPFQQFGRDIADTTDAVRDPQTLEILDITPCSFGGVSVITPGTNTSNQVAVLYQGVNCTEVPVAIHADQLTPTWRVYSTGSNVFQTRAGCLIGAEHVNNSYECDIPIGAGICASYQTQTNSPRRARSVASQSIIAYTMSLGAENSVAYSNNSIAICTNFTISVTTEILPVSMTKTSVDCTMYICGDSTECSNLLLQYGSFCTQLNRALTGIAVEQDKNTQEVFAQVKQIYKTPPIKDFGGFNFSQILPDPSKPSKRSFIEDLLFNKVTLADAGFIKQYGDCLGDIAARDLICAQKFNGLTVLPPLLTDEMIAQYTSALLAGTITSGWTFGAGAALQIPFAMQMAYRFNGIGVTQNVLYENQKLIANQFNSAIGKIQDSLSSAAPALGKLQDVVNQNAQALNTLVKQLSSNFGAISSVLNDILSRLDKVEAEVQIDRLITGRLQSLQTYVTQQLIRAAEIRASANLAATKMSECVLGQSKRVDFCGKGYHLMSFPQSAPHGVVFLHVTYVCAQEKNFTTAPAICHDGKAHFPREGVFVSNGTHWFVTQRNFYEPQIITTDNTFVSGNCDVVIGIVNNTVYDPLQPELDSFKEELDKYFKNHTSPDVDLGDISGINASVVNIQKEIDRLNEVAKNLNESLIDLQELGKYEQYIKGGGSGGGQIYEGKLTAEGLRFGIVASRFNHALVDRLVEGAIDAIVRHGGREEDITLVRVPGSWEIPVAAGELARKEDIDAVIAIGVLIRGATPHFDYIASEVSKGLADLSLELRKPITFGVITADTLEQAIERAGTKHGNKGWEAALSAIEMANLFKSLR

SEQ ID NO: 4116 - protein, 1371 aa, Artificial Sequence
  SARS-CoV-2/USA/WA8-UW5/2020__EPI_ISL_413486 spike protein (1-1211)(P715C_P1069C) LumSynth construct
MFVFLVLLPLVSSQCVNLTTRTQLPPAYTNSFTRGVYYPDKVFRSSVLHSTQDLFLPFFSNVTWFHAIHVSGTNGTKRFDNPVLPFNDGVYFASTEKSNIIRGWIFGTTLDSKTQSLLIVNNATNVVIKVCEFQFCNDPFLGVYYHKNNKSWMESEFRVYSSANNCTFEYVSQPFLMDLEGKQGNFKNLREFVFKNIDGYFKIYSKHTPINLVRDLPQGFSALEPLVDLPIGINITRFQTLLALHRSYLTPGDSSSGWTAGAAAYYVGYLQPRTFLLKYNENGTITDAVDCALDPLSETKCTLKSFTVEKGIYQTSNFRVQPTESIVRFPNITNLCPFGEVFNATRFASVYAWNRKRISNCVADYSVLYNSASFSTFKCYGVSPTKLNDLCFTNVYADSFVIRGDEVRQIAPGQTGKIADYNYKLPDDFTGCVIAWNSNNLDSKVGGNYNYLYRLFRKSNLKPFERDISTEIYQAGSTPCNGVEGFNCYFPLQSYGFQPTNGVGYQPYRVVVLSFELLHAPATVCGPKKSTNLVKNKCVNFNFNGLTGTGVLTESNKKFLPFQQFGRDIADTTDAVRDPQTLEILDITPCSFGGVSVITPGTNTSNQVAVLYQDVNCTEVPVAIHADQLTPTWRVYSTGSNVFQTRAGCLIGAEYVNNSYECDIPIGAGICASYQTQTNSPRRARSVASQSIIAYTMSLGAENSVAYSNNSIAICTNFTISVTTEILPVSMTKTSVDCTMYICGDSTECSNLLLQYGSFCTQLNRALTGIAVEQDKNTQEVFAQVKQIYKTPPIKDFGGFNFSQILPDPSKPSKRSFIEDLLFNKVTLADAGFIKQYGDCLGDIAARDLICAQKFNGLTVLPPLLTDEMIAQYTSALLAGTITSGWTFGAGAALQIPFAMQMAYRFNGIGVTQNVLYENQKLIANQFNSAIGKIQDSLSSTASALGKLQDVVNQNAQALNTLVKQLSSNFGAISSVLNDILSRLDKVEAEVQIDRLITGRLQSLQTYVTQQLIRAAEIRASANLAATKMSECVLGQSKRVDFCGKGYHLMSFPQSAPHGVVFLHVTYVCAQEKNFTTAPAICHDGKAHFPREGVFVSNGTHWFVTQRNFYEPQIITTDNTFVSGNCDVVIGIVNNTVYDPLQPELDSFKEELDKYFKNHTSPDVDLGDISGINASVVNIQKEIDRLNEVAKNLNESLIDLQELGKYEQYIKGGGSGGGQIYEGKLTAEGLRFGIVASRFNHALVDRLVEGAIDAIVRHGGREEDITLVRVPGSWEIPVAAGELARKEDIDAVIAIGVLIRGATPHFDYIASEVSKGLADLSLELRKPITFGVITADTLEQAIERAGTKHGNKGWEAALSAIEMANLFKSLR

SEQ ID NO: 4117 - protein, 1371 aa, Artificial Sequence
  SARS-CoV-2/England/20102000506/2020__EPI_ISL_415147 spike protein (1-1211)(P715C_P1069C) LumSynth construct
MFVFLVLLPLVSSQCVNLTTRTQLPPAYTNSFTRGVYYPDKVFRSSVLHSTQDLFLPFFSNVTWFHAIHVSGTNGTKRFDNPVLPFNDGVYFASTEKSNIIRGWIFGTTLDSKTQSLLIVNNATNVVIKVCEFQFCNDPFLGVYYHKNNKSWMESEFRVYSSANNCTFEYVSQPFLMDLEGKQGNFKNLREFVFKNIDGYFKIYSKHTPINLVRDLPQGFSALEPLVDLPIGINITRFQTLLALHRSYLTPGDSSSGWTAGAAAYYVGYLQPRTFLLKYNENGTITDAVDCALDPLSETKCTLKSFTVEKGIYQTSNFRVQPTESIVRFPNITNLCPFGEVFNATRFASVYAWNRKRISNCVADYSVLYNSASFSTFKCYGVSPTKLNDLCFTNVYADSFVIRGDEVRQIAPGQTGKIADYNYKLPDDFTGCVIAWNSNNLDSKVGGNYNYLYRLFRKSNLKPFERDISTEIYQAGSTPCNGVEGFNCYFPLQSYGFQPTNGVGYQPYRVVVLSFELLHAPATVCGPKKSTNLVKNKCVNFNFNGLTGTGVLTESNKKFLPFQQFGRDIADTTDAVRDPQTLEILDITPCSFGGVSVITPGTNTSNQVAVLYQGVNCTEVPVAIHADQLTPTWRVYSTGSNVFQTRAGCLIGAEHVNNSYECDIPIGAGICASYQTQTNSPRRARSVASQSIIAYTMSLGAENSVAYSNNSIAICTNFTISVTTEILPVSMTKTSVDCTMYICGDSTECSNLLLQYGSFCTQLNRALTGIAVEQDKNTQEVFAQVKQIYKTPPIKDFGGFNFSQILPDPSKPSKRSFIEDLLFNKVTLADAGFIKQYGYCLGDIAARDLICAQKFNGLTVLPPLLTDEMIAQYTSALLAGTITSGWTFGAGAALQIPFAMQMAYRFNGIGVTQNVLYENQKLIANQFNSAIGKIQDSLSSTASALGKLQDVVNQNAQALNTLVKQLSSNFGAISSVLNDILSRLDKVEAEVQIDRLITGRLQSLQTYVTQQLIRAAEIRASANLAATKMSECVLGQSKRVDFCGKGYHLMSFPQSAPHGVVFLHVTYVCAQEKNFTTAPAICHDGKAHFPREGVFVSNGTHWFVTQRNFYEPQIITTDNTFVSGNCDVVIGIVNNTVYDPLQPELDSFKEELDKYFKNHTSPDVDLGDISGINASVVNIQKEIDRLNEVAKNLNESLIDLQELGKYEQYIKGGGSGGGQIYEGKLTAEGLRFGIVASRFNHALVDRLVEGAIDAIVRHGGREEDITLVRVPGSWEIPVAAGELARKEDIDAVIAIGVLIRGATPHFDYIASEVSKGLADLSLELRKPITFGVITADTLEQAIERAGTKHGNKGWEAALSAIEMANLFKSLR

SEQ ID NO: 4118 - protein, 1371 aa, Artificial Sequence
  SARS-CoV-2/Belgium/VAG-03013/2020__EPI_ISL_415155 spike protein (1-1211)(P715C_P1069C) LumSynth construct
MFVFLVLLPLVSSQCVNLTTRTQLPPAYTNSFTRGVYYPDKVFRSSVLHSTQDLFLPFFSNVTWFHAIHVSGTNGTKRFDNPVLPFNDGVYFASTEKSNIIRGWIFGTTLDSKTQSLLIVNNATNVVIKVCEFQFCNDPFLGVYYHKNNKSWMESEFRVYSSANNCTFEYVSQPFLMDLEGKQGNFKNLREFVFKNIDGYFKIYSKHTPINLVRDLPQGFSALEPLVDLPIGINITRFQTLLALHRSYLTPGDSSSGWTAGAAAYYVGYLQPRTFLLKYNENGTITDAVDCALDPLSETKCTLKSFTVEKGIYQTSNFRVQPTESIVRFPNITNLCPFGEVFNATRFASVYAWNRKRISNCVADYSVLYNSASFSTFKCYGVSPTKLNDLCFTNVYADSFVIRGDEVRQIAPGQTGKIADYNYKLPDDFTGCVIAWNSNNLDSKVGGNYNYLYRLFRKSNLKPFERDISTEIYQAGSTPCNGVEGFNCYFPLQSYGFQPTNGVGYQPYRVVVLSFELLHAPATVCGPKKSTNLVKNKCVNFNFNGLTGTGVLTESNKKFLPFQQFGRDIADTTDAVRDPQTLEILDITPCSFGGVSVITPGTNTSNQVAVLYQGVNCTEVPVAIHADQLTPTWRVYSTGSNVFQTRAGCLIGAEHVNNSYECDIPIGAGICASYQTQTNSPRRARSVASQSIIAYTMSLGAENSVAYSNNSIAICTNFTISVTTEILPVSMTKTSVDCTMYICGDSTECSNLLLQYGSFCTQLNRALTGIAVEQDKNTQEVFAQVKQIYKTPPIKDFGGFNFSQILPDPSKPSKRSFIEDLLFNKVTLADAGFIKQYGDCLGDIAARDLICAQKFNGLTVLPPLLTDEMIAQYTSALLAGTITSGWTFGAGAALQIPFAMQMAYRFNGIGVTQNVLYENQKLIANQFNSAIGKIQDSLSSTATALGKLQDVVNQNAQALNTLVKQLSSNFGAISSVLNDILSRLDKVEAEVQIDRLITGRLQSLQTYVTQQLIRAAEIRASANLAATKMSECVLGQSKRVDFCGKGYHLMSFPQSAPHGVVFLHVTYVCAQEKNFTTAPAICHDGKAHFPREGVFVSNGTHWFVTQRNFYEPQIITTDNTFVSGNCDVVIGIVNNTVYDPLQPELDSFKEELDKYFKNHTSPDVDLGDISGINASVVNIQKEIDRLNEVAKNLNESLIDLQELGKYEQYIKGGGSGGGQIYEGKLTAEGLRFGIVASRFNHALVDRLVEGAIDAIVRHGGREEDITLVRVPGSWEIPVAAGELARKEDIDAVIAIGVLIRGATPHFDYIASEVSKGLADLSLELRKPITFGVITADTLEQAIERAGTKHGNKGWEAALSAIEMANLFKSLR

SEQ ID NO: 4119 - protein, 1371 aa, Artificial Sequence
  SARS-CoV-2/Belgium/BC-03016/2020__EPI_ISL_415157 spike protein (1-1211)(P715C_P1069C) LumSynth construct
MFVFLVLLPLVSSQCVNLTTRTQLPPAYTNSFTRGVYYPDKVFRSSVLHSTQDLFLPFFSNVTWFHAIHVSGTNGTKRFDNPVLPFNDGVYFASTEKSNIIRGWIFGTTLDSKTQSLLIVNNATNVVIKVCEFQFCNDPFLGVYYHKNNKSWMESEFRVYSSANNCTFEYVSQPFLMDLEGKQGNFKNLREFVFKNIDGYFKIYSKHTPINLVRDLPQGFSALEPLVDLPIGINITRFQTLLALHRSYLTPGDSSSGWTAGAAAYYVGYLQPRTFLLKYNENGTITDAVDCALDPLSETKCTLKSFTVEKGIYQTSNFRVQPTESIVRFPNITNLCPFGEVFNATRFASVYAWNRKRISNCVADYSVLYNSASFSTFKCYGVSPTKLNDLCFTNVYADSFVIRGDEVRQIAPGQTGKIADYNYKLPDDFTGCVIAWNSNNLDSKVGGNYNYLYRLFRKSNLKPFERDISTEIYQAGSTPCNGVEGFNCYFPLQSYGFQPTNGVGYQPYRVVVLSFELLHAPATVCGPKKSTNLVKNKCVNFNFNGLTGTGVLTESNKKFLPFQQFGRDIADTTDAVRDPQTLEILDITPCSFGGVSVITPGTNTSNQVAVLYQGVNCTEVPVAIHADQLTPTWRVYSTGSNVFQTRAGCLIGAEHVNNSYECDIPIGAGICASYQTQTNSPRRARSVASQSIIAYTMSLGAENSVAYSNNSIAICTNFTISVTTEILPVSMTKTSVDCTMYICGDSTECSNLLLQYGSFCTQLNRALTGIAVEQDKNTQEVFAQVKQIYKTPPIKDFGGFNFSQILPDPSKPSKRSFIEDLLFNKVTLADAGFIKQYGDCLGDIAARDLICAQKFNGLTVLPPLLTDEMIAQYTSALLAGTITSGWTFGAGAALQIPFAMQMAYRFNGIGVTQNVLYENQKLIANQFNSAIGKIQDSLSSTAPALGKLQDVVNQNAQALNTLVKQLSSNFGAISSVLNDILSRLDKVEAEVQIDRLITGRLQSLQTYVTQQLIRAAEIRASANLAATKMSECVLGQSKRVDFCGKGYHLMSFPQSAPHGVVFLHVTYVCAQEKNFTTAPAICHDGKAHFPREGVFVSNGTHWFVTQRNFYEPQIITTDNTFVSGNCDVVIGIVNNTVYDPLQPELDSFKEELDKYFKNHTSPDVDLGDISGINASVVNIQKEIDRLNEVAKNLNESLIDLQELGKYEQYIKGGGSGGGQIYEGKLTAEGLRFGIVASRFNHALVDRLVEGAIDAIVRHGGREEDITLVRVPGSWEIPVAAGELARKEDIDAVIAIGVLIRGATPHFDYIASEVSKGLADLSLELRKPITFGVITADTLEQAIERAGTKHGNKGWEAALSAIEMANLFKSLR

SEQ ID NO: 4120 - protein, 1371 aa, Artificial Sequence
  SARS-CoV-2/Germany/BavPat3/2020__EPI_ISL_414521 spike protein (1-1211)(P715C_P1069C) LumSynth construct
MFVFLVLLPLVSSQCVNLTTRTQLPPAYTNSFTRGVYYPDKVFRSSVLHSTQDLFLPFFSNVTWFHAIHVSGTNGTKRFDNPVLPFNDGVYFASTEKSNIIRGWIFGTTLDSKTQSLLIVNNATNVVIKVCEFQFCNDPFLGVYYHKNNKSWMESEFRVYSSANNCTFEYVSQPFLMDLEGKQGNFKNLREFVFKNIDGYFKIYSKHTPINLVRDLPQGFSALEPLVDLPIGINITRFQTLLALHRSYLTPGDSSSGWTAGAAAYYVGYLQPRTFLLKYNENGTITDAVDCALDPLSETKCTLKSFTVEKGIYQTSNFRVQPTESIVRFPNITNLCPFGEVFNATRFASVYAWNRKRISNCVADYSVLYNSASFSTFKCYGVSPTKLNDLCFTNVYADSFVIRGDEVRQIAPGQTGKIADYNYKLPDDFTGCVIAWNSNNLDSKVGGNYNYLYRLFRKSNLKPFERDISTEIYQAGSTPCNGVEGFNCYFPLQSYGFQPTNGVGYQPYRVVVLSFELLHAPATVCGPKKSTNLVKNKCVNFNFNGLTGTGVLTESNKKFLPFQQFGRDIADTTDAVRDPQTLEILDITPCSFGGVSVITPGTNTSNQVAVLYQDVNCTEVPVAIHADQLTPTWRVYSTGSNVFQTRAGCLIGAEHVNNSYECDIPIGAGICASYQTQTNSPRRARSVASQSIIAYTMSLGAENSVAYSNNSIAICTNFTISVTTEILPVSMTKTSVDCTMYICGDSTECSNLLLQYGSFCTQLNRALTGIAVEQDKNTQQVFAQVKQIYKTPPIKDFGGFNFSQILPDPSKPSKRSFIEDLLFNKVTLADAGFIKQYGDCLGDIAARDLICAQKFNGLTVLPPLLTDEMIAQYTSALLAGTITSGWTFGAGAALQIPFAMQMAYRFNGIGVTQNVLYENQKLIANQFNSAIGKIQDSLSSTASALGKLQDVVNQNAQALNTLVKQLSSNFGAISSVLNDILSRLDKVEAEVQIDRLITGRLQSLQTYVTQQLIRAAEIRASANLAATKMSECVLGQSKRVDFCGKGYHLMSFPQSAPHGVVFLHVTYVCAQEKNFTTAPAICHDGKAHFPREGVFVSNGTHWFVTQRNFYEPQIITTDNTFVSGNCDVVIGIVNNTVYDPLQPELDSFKEELDKYFKNHTSPDVDLGDISGINASVVNIQKEIDRLNEVAKNLNESLIDLQELGKYEQYIKGGGSGGGQIYEGKLTAEGLRFGIVASRFNHALVDRLVEGAIDAIVRHGGREEDITLVRVPGSWEIPVAAGELARKEDIDAVIAIGVLIRGATPHFDYIASEVSKGLADLSLELRKPITFGVITADTLEQAIERAGTKHGNKGWEAALSAIEMANLFKSLR

SEQ ID NO: 4121 - protein, 1371 aa, Artificial Sequence
  SARS-CoV-2/France/HF1805/2020__EPI_ISL_414628 spike protein (1-1211)(P715C_P1069C) LumSynth construct
MFVFLVLLPLVSSQCVNLTTRTQLPPAYTNSFTRGVYYPDKVFRSSVLHSTQDLFLPFFSNVTWFHAIHVSGTNGTKRFDNPVLPFNDGVYFASTEKSNIIRGWIFGTTLDSKTQSLLIVNNATNVVIKVCEFQFCNDPFLGVYYHKNNKSWMESEFRVYSSANNCTFEYVSQPFLMDLEGKQGNFKNLREFVFKNIDGYFKIYSKHTPINLVRDLPQGFSALEPLVDLPIGINITRFQTLLALHRSYLTPGDSSSGWTAGAAAYYVGYLQPRTFLLKYNENGTITDAVDCALDPLSETKCTLKSFTVEKGIYQTSNFRVQPTESIVRFPNITNLCPFGEVFNATRFASVYAWNRKRISNCVADYSVLYNSASFSTFKCYGVSPTKLNDLCFTNVYADSFVIRGDEVRQIAPGQTGKIADYNYKLPDDFTGCVIAWNSNNLDSKVGGNYNYLYRLFRKSNLKPFERDISTEIYQAGSTPCNGVEGFNCYFPLQSYGFQPTNGVGYQPYRVVVLSFELLHAPATVCGPKKSTNLVKNKCVNFNFNGLTGTGVLTESNKKFLPFQQFGRDIADTTDAVRDPQTLEILDITPCSFGGVSVITPGTNTSNQVAVLYQGVNCTEVPVAIHADQLTPTWRVYSTGSNVFQTRAGCLIGAEHVNNSYECDIPIGAGICASYQTQTNSPRRARSVASQSIIAYTMSLGAENSVAYSNNSIAICTNFTISVTTEILPVSMTKTSVDCTMYICGDSTECSNLLLQYGSFCTQLNRALTGIAVEQDKNTQEVFAQVKQIYKTPPIKDFGGFNFSQILPDPSKPSKRSFIEDLLFNKVTLADAGFIKQYGDCLGDIAARDLICAQKFNGLTVLPPLLTDEMIAQYTSALLAGTITSGWTFGAGAALQIPFAMQMAYRFNGIGVTQNVLYENQKLIANQFNSAIGKIQDSLSSTASALGKLQDVVNQNAQALNTLVKQLSSNFGAISSVLNDILSRLDKVEAEVQIDRLITGRLQSLQTYVTQQLIRAAEIRASANLAATKMSECVLGQSKRVDFCGKGYHLMSFPQSAPHGVVFLHVTYVCAQEKNFTTAPAICHDGKAHFPREGVFVSNGTHWFVTQRNFYEPQIITTDNTFVSGNCDVVIGVVNNTVYDPLQPELDSFKEELDKYFKNHTSPDVDLGDISGINASVVNIQKEIDRLNEVAKNLNESLIDLQELGKYEQYIKGGGSGGGQIYEGKLTAEGLRFGIVASRFNHALVDRLVEGAIDAIVRHGGREEDITLVRVPGSWEIPVAAGELARKEDIDAVIAIGVLIRGATPHFDYIASEVSKGLADLSLELRKPITFGVITADTLEQAIERAGTKHGNKGWEAALSAIEMANLFKSLR

SEQ ID NO: 4122 - protein, 1371 aa, Artificial Sequence
  SARS-CoV-2/Netherlands/ZuidHolland_9/2020__EPI_ISL_414445 spike protein (1-1211)(P715C_P1069C) LumSynth construct
MFVFLVLLPLVSSQCVNLTTRTQLPPAYTNSFTRGVYYPDKVFRSSVLHSTQDLFLPFFSNVTWFHAIHVSGTNGTKRFDNPVLPFNDGVYFASTEKSNIIRGWIFGTTLDSKTQSLLIVNNATNVVIKVCEFQFCNDPFLGVYYHKNNKSWMESEFRVYSSANNCTFEYVSQPFLMDLEGKQGNFKNLREFVFKNIDGYFKIYSKHTPINLVRDLPQGFSALEPLVDLPIGINITRFQTLLALHRSYLTPGDSSSGWTAGAAAYYVGYLQPRTFLLKYNENGTITDAVDCALDPLSETKCTLKSFTVEKGIYQTSNFRVQPTESIVRFPNITNLCPFGEVFNATRFASVYAWNRKRISNCVADYSVLYNSASFSTFKCYGVSPTKLNDLCFTNVYADSFVIRGDEVRQIAPGQTGKIADYNYKLPDDFTGCVIAWNSNNLDSKVGGNYNYLYRLFRKSNLKPFERDISTEIYQAGSTPCNGVEGFNCYFPLQSYGFQPTNGVGYQPYRVVVLSFELLHAPATVCGPKKSTNLVKNKCVNFNFNGLTGTGVLTESNKKFLPFQQFGRDIADTTDAVRDPQTLEILDITPCSFGGVSVITPGTNTSNQVAVLYQGVNCTEVPVAIHADQLTPTWRVYSTGSNVFQTRAGCLIGAEHVNNSYECDIPIGAGICASYQTQTNSPRRARSVASQSIIAYTMSLGAENSVAYSNNSIAICTNFTISVTTEILPVSMTKTSVDCTMYICGDSTECSNLLLQYGSFCTQLNRALTGIAVEQDKNTQEVFAQVKQIYKTPPIKDFGGFNFSQILPDPSKPSKRSFIEDLLFNKVTLADAGFIKQYGDCLGDIAARDLICVQKFNGLTVLPPLLTDEMIAQYTSALLAGTITSGWTFGAGAALQIPFAMQMAYRFNGIGVTQNVLYENQKLIANQFNSAIGKIQDSLSSTASALGKLQDVVNQNAQALNTLVKQLSSNFGAISSVLNDILSRLDKVEAEVQIDRLITGRLQSLQTYVTQQLIRAAEIRASANLAATKMSECVLGQSKRVDFCGKGYHLMSFPQSAPHGVVFLHVTYVCAQEKNFTTAPAICHDGKAHFPREGVFVSNGTHWFVTQRNFYEPQIITTDNTFVSGNCDVVIGIVNNTVYDPLQPELDSFKEELDKYFKNHTSPDVDLGDISGINASVVNIQKEIDRLNEVAKNLNESLIDLQELGKYEQYIKGGGSGGGQIYEGKLTAEGLRFGIVASRFNHALVDRLVEGAIDAIVRHGGREEDITLVRVPGSWEIPVAAGELARKEDIDAVIAIGVLIRGATPHFDYIASEVSKGLADLSLELRKPITFGVITADTLEQAIERAGTKHGNKGWEAALSAIEMANLFKSLR

SEQ ID NO: 4123 - protein, 1371 aa, Artificial Sequence
  SARS-CoV-2/Finland/FIN03032020A/2020__EPI_ISL_413602 spike protein (1-1211)(P715C_P1069C) LumSynth construct
MFVFLVLLPLVSSQCVNLTTRTQLPPAYTNSFTRGVYYPDKVFRSSVLHSTQDLFLPFFSNVTWFHAIHVSGTNGTKRFDNPVLPFNDGVYFASTEKSNIIRGWIFGTTLDSKTQSLLIVNNATNVVIKVCEFQFCNDPFLGVYYHKNNKSWMESEFRVYSSANNCTFEYVSQPFLMDLEGKQGNFKNLREFVFKNIDGYFKIYSKHTPINLVRDLPQGFSALEPLVDLPIGINITRFQTLLALHRSYLTPGDSSSGWTAGAAAYYVGYLQPRTFLLKYNENGTITDAVDCALDPLSETKCTLKSFTVEKGIYQTSNFRVQPTESIVRFPNITNLCPFGEVFNATRFASVYAWNRKRISNCVADYSVLYNSASFSTFKCYGVSPTKLNDLCFTNVYADSFVIRGDEVRQIAPGQTGKIADYNYKLPDDFTGCVISWNSNNLDSKVGGNYNYLYRLFRKSNLKPFERDISTEIYQAGSTPCNGVEGFNCYFPLQSYGFQPTNGVGYQPYRVVVLSFELLHAPATVCGPKKSTNLVKNKCVNFNFNGLTGTGVLTESNKKFLPFQQFGRDIADTTDAVRDPQTLEILDITPCSFGGVSVITPGTNTSNQVAVLYQGVNCTEVPVAIHADQLTPTWRVYSTGSNVFQTRAGCLIGAEHVNNSYECDIPIGAGICASYQTQTNSPRRARSVASQSIIAYTMSLGAENSVAYSNNSIAICTNFTISVTTEILPVSMTKTSVDCTMYICGDSTECSNLLLQYGSFCTQLNRALTGIAVEQDKNTQEVFAQVKQIYKTPPIKDFGGFNFSQILPDPSKPSKRSFIEDLLFNKVTLADAGFIKQYGDCLGDIAARDLICAQKFNGLTVLPPLLTDEMIAQYTSALLAGTITSGWTFGAGAALQIPFAMQMAYRFNGIGVTQNVLYENQKLIANQFNSAIGKIQDSLSSTASALGKLQDVVNQNAQALNTLVKQLSSNFGAISSVLNDILSRLDKVEAEVQIDRLITGRLQSLQTYVTQQLIRAAEIRASANLAATKMSECVLGQSKRVDFCGKGYHLMSFPQSAPHGVVFLHVTYVCAQEKNFTTAPAICHDGKAHFPREGVFVSNGTHWFVTQRNFYEPQIITTDNTFVSGNCDVVIGIVNNTVYDPLQPELDSFKEELDKYFKNHTSPDVDLGDISGINASVVNIQKEIDRLNEVAKNLNESLIDLQELGKYEQYIKGGGSGGGQIYEGKLTAEGLRFGIVASRFNHALVDRLVEGAIDAIVRHGGREEDITLVRVPGSWEIPVAAGELARKEDIDAVIAIGVLIRGATPHFDYIASEVSKGLADLSLELRKPITFGVITADTLEQAIERAGTKHGNKGWEAALSAIEMANLFKSLR

SEQ ID NO: 4124 - protein, 1371 aa, Artificial Sequence
  SARS-CoV-2/France/GE1977/2020__EPI_ISL_414632 spike protein (1-1211)(P715C_P1069C) LumSynth construct
MFVFLVLLPLVSSQCVNLTTRTQLPPAYTNSFTRGVYYPDKVFRSSVLHSTQDLFLPFFSNVTWFHAIHVSGTNGTKRFDNPVLPFNDGVYFASTEKSNIIRGWIFGTTLDSKTQSLLIVNNATNVVIKVCEFQFCNDPFLGVYYHKNNKSWMESEFRVYSSANNCTFEYVSQPFLMDLEGKQGNFKNLREFVFKNIDGYFKIYSKHTPINLVRDLPQGFSALEPLVDLPIGINITRFQTLLALHRSYLTPGDSSSGWTAGAAAYYVGYLQPRTFLLKYNENGTITDAVDCALDPLSETKCTLKSFTVEKGIYQTSNFRVQPTESIVRFPNITNLCPFGEVFNATRFASVYAWNRKRISNCVADYSVLYNSASFSTFKCYGVSPTKLNDLCFTNVYADSFVIRGDEVRQIAPGQTGKIADYNYKLPDDFTGCVIAWNSNNLDSKVGGNYNYLYRLFRKSNLKPFERDISTEIYQAGSTPCNGVEGFNCYFPLQSYGFQPTNGVGYQPYRVVVLSFELLHAPATVCGPKKSTNLVKNKCVNFNFNGLTGTGVLTESNKKFLPFQQFGRDIADTTDAVRDPQTLEILDITPCSFGGVSVITPGTNTSNQVAVLYQGVNCTEVPVAIHADQLTPTWRVYSTGSNVFQTRAGCLIGAEHVNNSYECDIPIGAGICASYQTQTNSPRRARSVASQSIIAYTMSLGAENSVAYSNNSIAICTNFTISVTTEILPVSMTKTSVDCTMYICGDSTECSNLLLQYGSFCTQLNRALTGIAVEQDKNTQEVFAQVKQIYKTPPIKDFGGFNFSQILPDPSKPSKRSFIEDLLFNKVTLADAGFIKQYGDCLGDIAARDLICAQKFNGLTVLPPLLTDEMIAQYTSALLAGTITSGWTFGAGAALQIPFAMQMAYRFNGIGVTQNVLYENQKLIANQFNSAIGKIQDSLFSTASALGKLQDVVNQNAQALNTLVKQLSSNFGAISSVLNDILSRLDKVEAEVQIDRLITGRLQSLQTYVTQQLIRAAEIRASANLAATKMSECVLGQSKRVDFCGKGYHLMSFPQSAPHGVVFLHVTYVCAQEKNFTTAPAICHDGKAHFPREGVFVSNGTHWFVTQRNFYEPQIITTDNTFVSGNCDVVIGIVNNTVYDPLQPELDSFKEELDKYFKNHTSPDVDLGDISGINASVVNIQKEIDRLNEVAKNLNESLIDLQELGKYEQYIKGGGSGGGQIYEGKLTAEGLRFGIVASRFNHALVDRLVEGAIDAIVRHGGREEDITLVRVPGSWEIPVAAGELARKEDIDAVIAIGVLIRGATPHFDYIASEVSKGLADLSLELRKPITFGVITADTLEQAIERAGTKHGNKGWEAALSAIEMANLFKSLR

SEQ ID NO: 4125 - protein, 1371 aa, Artificial Sequence
  SARS-CoV-2/Finland/FIN-313/2020__EPI_ISL_414641 spike protein (1-1211)(P715C_P1069C) LumSynth construct
MFVFLVLLPLVSSQCVNLTTRTQLPPAYTNSFTRGVYYPDKVFRSSVLHSTQDLFLPFFSNVTWFHAIHVSGTNGTKRFDNPVLPFNDGVYFASTEKSNIIRGWIFGTTLDSKTQSLLIVNNATNVVIKVCEFQFCNDPFLGVYYHKNNKSWMESEFRVYSSANNCTFEYVSQPFLMDLEGKQGNFKNLREFVFKNIDGYFKIYSKHTPINLVRDLPQGFSALEPLVDLPIGINITRFKTLLALHRSYLTPGDSSSGWTAGAAAYYVGYLQPRTFLLKYNENGTITDAVDCALDPLSETKCTLKSFTVEKGIYQTSNFRVQPTESIVRFPNITNLCPFGEVFNATRFASVYAWNRKRISNCVADYSVLYNSASFSTFKCYGVSPTKLNDLCFTNVYADSFVIRGDEVRQIAPGQTGKIADYNYKLPDDFTGCVIAWNSNNLDSKVGGNYNYLYRLFRKSNLKPFERDISTEIYQAGSTPCNGVEGFNCYFPLQSYGFQPTNGVGYQPYRVVVLSFELLHAPATVCGPKKSTNLVKNKCVNFNFNGLTGTGVLTESNKKFLPFQQFGRDIADTTDAVRDPQTLEILDITPCSFGGVSVITPGTNTSNQVAVLYQGVNCTEVPVAIHADQLTPTWRVYSTGSNVFQTRAGCLIGAEHVNNSYECDIPIGAGICASYQTQTNSPRRARSVASQSIIAYTMSLGAENSVAYSNNSIAICTNFTISVTTEILPVSMTKTSVDCTMYICGDSTECSNLLLQYGSFCTQLNRALTGIAVEQDKNTQEVFAQVKQIYKTPPIKDFGGFNFSQILPDPSKPSKRSFIEDLLFNKVTLADAGFIKQYGDCLGDIAARDLICAQKFNGLTVLPPLLTDEMIAQYTSALLAGTITSGWTFGAGAALQIPFAMQMAYRFNGIGVTQNVLYENQKLIANQFNSAIGKIQDSLSSTASALGKLQDVVNQNAQALNTLVKQLSSNFGAISSVLNDILSRLDKVEAEVQIDRLITGRLQSLQTYVTQQLIRAAEIRASANLAATKMSECVLGQSKRVDFCGKGYHLMSFPQSAPHGVVFLHVTYVCAQEKNFTTAPAICHDGKAHFPREGVFVSNGTHWFVTQRNFYEPQIITTDNTFVSGNCDVVIGIVNNTVYDPLQPELDSFKEELDKYFKNHTSPDVDLGDISGINASVVNIQKEIDRLNEVAKNLNESLIDLQELGKYEQYIKGGGSGGGQIYEGKLTAEGLRFGIVASRFNHALVDRLVEGAIDAIVRHGGREEDITLVRVPGSWEIPVAAGELARKEDIDAVIAIGVLIRGATPHFDYIASEVSKGLADLSLELRKPITFGVITADTLEQAIERAGTKHGNKGWEAALSAIEMANLFKSLR

SEQ ID NO: 4126 - protein, 1371 aa, Artificial Sequence
  SARS-CoV-2/Netherlands/ZuidHolland_2/2020__EPI_ISL_414556 spike protein (1-1211)(P715C_P1069C) LumSynth construct
MFVFLVLLPLVSSQCVNLTTRTQLPPAYTNSFTRGVYYPDKVFRSSVLHSTQDLFLPFFSNVTWFHAIHVSGTNGTKRFDNPVLPFNDGVYFASTEKSNIIRGWIFGTTLDSKTQSLLIVNNATNVVIKVCEFQFCNDPFLGVYYHKNNKSWMESEFRVYSSANNCTFEYVSQPFLMDLEGKQGNFKNLREFVFKNIDGYFKIYSKHTPINLVRDLPQGFSALEPLVDLPIGINITRFQTLLALHRSYLTPGDSSSGWTAGAAAYYVGYLQPRTFLLKYNENGTITDAVDCALDPLSETKCTLKSFTVEKGIYQTSNFRVQPTESIVRFPNITNLCPFGEVFNATRFASVYAWNRKRISNCVADYSVLYNSASFSTFKCYGVSPTKLNDLCFTNVYADSFVIRGDEVRQIAPGQTGKIADYNYKLPDDFTGCVIAWNSNNLDSKVGGNYNYLYRLFRKSNLKPFERDISTEIYQAGSTPCNGVEGFNCYFPLQSYGFQPTNGVGYQPYRVVVLSFELLHAPATVCGPKKSTNLVKNKCVNFNFNGLTGTGVLTESNKKFLPFQQFGRDIADTTDAVRDPQTLEILDITPCSFGGVSVITPGTNTSNQVAVLYQGVNCTEVPVAIHADQLTPTWRVYSTGSNVFQTRAGCLIGAEHVNNSYECDIPIGAGICASYQTQTNSPRRARSVASQSIIAYTMSLGAENSVAYSNNSIAICTNFTISVTTEILPVSMTKTSVDCTMYICGDSTECSNLLLQYGSFCTQLNRALTGIALEQDKNTQEVFAQVKQIYKTPPIKDFGGFNFSQILPDPSKPSKRSFIEDLLFNKVTLADAGFIKQYGDCLGDIAARDLICAQKFNGLTVLPPLLTDEMIAQYTSALLAGTITSGWTFGAGAALQIPFAMQMAYRFNGIGVTQNVLYENQKLIANQFNSAIGKIQDSLSSTASALGKLQDVVNQNAQALNTLVKQLSSNFGAISSVLNDILSRLDKVEAEVQIDRLITGRLQSLQTYVTQQLIRAAEIRASANLAATKMSECVLGQSKRVDFCGKGYHLMSFPQSAPHGVVFLHVTYVCAQEKNFTTAPAICHDGKAHFPREGVFVSNGTHWFVTQRNFYEPQIITTDNTFVSGNCDVVIGIVNNTVYDPLQPELDSFKEELDKYFKNHTSPDVDLGDISGINASVVNIQKEIDRLNEVAKNLNESLIDLQELGKYEQYIKGGGSGGGQIYEGKLTAEGLRFGIVASRFNHALVDRLVEGAIDAIVRHGGREEDITLVRVPGSWEIPVAAGELARKEDIDAVIAIGVLIRGATPHFDYIASEVSKGLADLSLELRKPITFGVITADTLEQAIERAGTKHGNKGWEAALSAIEMANLFKSLR

SEQ ID NO: 4127 - protein, 1371 aa, Artificial Sequence
  SARS-CoV-2/USA/WA-UW31/2020__EPI_ISL_414618 spike protein (1-1211)(P715C_P1069C) LumSynth construct
MFVFLVLLPLVSSQCVNLTTRTQLPPAYTNSFTRGVYYPDKVFRSSVLHSTQDLFLPFFSNVTWFHAIHVSGTNGTKRFDNPVLPFNDGVYFASTEKSNIIRGWIFGTTLDSKTQSLLIVNNATNVVIKVCEFQFCNDPFLGVYYHKNNKSWMESEFRVYSSANNCTFEYVSQPFLMDLEGKQGNFKNLREFVFKNIDGYFKIYSKHTPINLVRDLPQGFSALEPLVDLPIGINITRFQTLLALHRSYLTPGDSSSGWTAGAAAYYVGYLQPRTFLLKYNENGTITDAVDCALDPLSETKCTLKSFTVEKGIYQTSNFRVQPTESIVRFPNITNLCPFGEVFNATRFASVYAWNRKRISNCVADYSVLYNSASFSTFKCYGVSPTKLNDLCFTNVYADSFVIRGDEVRQIAPGQTGKIADYNYKLPDDFTGCVIAWNSNNLDSKVGGNYNYLYRLFRKSNLKPFERDISTEIYQAGSTPCNGAEGFNCYFPLQSYGFQPTNGVGYQPYRVVVLSFELLHAPATVCGPKKSTNLVKNKCVNFNFNGLTGTGVLTESNKKFLPFQQFGRDIADTTDAVRDPQTLEILDITPCSFGGVSVITPGTNTSNQVAVLYQDVNCTEVPVAIHADQLTPTWRVYSTGSNVFQTRAGCLIGAEHVNNSYECDIPIGAGICASYQTQTNSPRRARSVASQSIIAYTMSLGAENSVAYSNNSIAICTNFTISVTTEILPVSMTKTSVDCTMYICGDSTECSNLLLQYGSFCTQLNRALTGIAVEQDKNTQEVFAQVKQIYKTPPIKDFGGFNFSQILPDPSKPSKRSFIEDLLFNKVTLADAGFIKQYGDCLGDIAARDLICAQKFNGLTVLPPLLTDEMIAQYTSALLAGTITSGWTFGAGAALQIPFAMQMAYRFNGIGVTQNVLYENQKLIANQFNSAIGKIQDSLSSTASALGKLQDVVNQNAQALNTLVKQLSSNFGAISSVLNDILSRLDKVEAEVQIDRLITGRLQSLQTYVTQQLIRAAEIRASANLAATKMSECVLGQSKRVDFCGKGYHLMSFPQSAPHGVVFLHVTYVCAQEKNFTTAPAICHDGKAHFPREGVFVSNGTHWFVTQRNFYEPQIITTDNTFVSGNCDVVIGIVNNTVYDPLQPELDSFKEELDKYFKNHTSPDVDLGDISGINASVVNIQKEIDRLNEVAKNLNESLIDLQELGKYEQYIKGGGSGGGQIYEGKLTAEGLRFGIVASRFNHALVDRLVEGAIDAIVRHGGREEDITLVRVPGSWEIPVAAGELARKEDIDAVIAIGVLIRGATPHFDYIASEVSKGLADLSLELRKPITFGVITADTLEQAIERAGTKHGNKGWEAALSAIEMANLFKSLR

SEQ ID NO: 4128 - protein, 1371 aa, Artificial Sequence
  SARS-CoV-2/South Korea/SNU01/2020__EPI_ISL_411929 spike protein (1-1211)(P715C_P1069C) LumSynth construct
MFVFLVLLPLVSSQCVNLTTRTQLPPAYTNSFTRGVYYPDKVFRSSVLHSTQDLFLPFFSNVTWFHAIHVSGTNGTKRFDNPVLPFNDGVYFASTEKSNIIRGWIFGTTLDSKTQSLLIVNNATNVVIKVCEFQFCNDPFLGVYYHKNNKSWMESEFRVYSSANNCTFEYVSQPFLMDLEGKQGNFKNLREFVFKNIDGYFKIYSKHTPINLVRDLPQGFWALEPLVDLPIGINITRFQTLLALHRSYLTPGDSSSGWTAGAAAYYVGYLQPRTFLLKYNENGTITDAVDCALDPLSETKCTLKSFTVEKGIYQTSNFRVQPTESIVRFPNITNLCPFGEVFNATRFASVYAWNRKRISNCVADYSVLYNSASFSTFKCYGVSPTKLNDLCFTNVYADSFVIRGDEVRQIAPGQTGKIADYNYKLPDDFTGCVIAWNSNNLDSKVGGNYNYLYRLFRKSNLKPFERDISTEIYQAGSTPCNGVEGFNCYFPLQSYGFQPTNGVGYQPYRVVVLSFELLHAPATVCGPKKSTNLVKNKCVNFNFNGLTGTGVLTESNKKFLPFQQFGRDIADTTDAVRDPQTLEILDITPCSFGGVSVITPGTNTSNQVAVLYQDVNCTEVPVAIHADQLTPTWRVYSTGSNVFQTRAGCLIGAEHVNNSYECDIPIGAGICASYQTQTNSPRRARSVASQSIIAYTMSLGAENSVAYSNNSIAICTNFTISVTTEILPVSMTKTSVDCTMYICGDSTECSNLLLQYGSFCTQLNRALTGIAVEQDKNTQEVFAQVKQIYKTPPIKDFGGFNFSQILPDPSKPSKRSFIEDLLFNKVTLADAGFIKQYGDCLGDIAARDLICAQKFNGLTVLPPLLTDEMIAQYTSALLAGTITSGWTFGAGAALQIPFAMQMAYRFNGIGVTQNVLYENQKLIANQFNSAIGKIQDSLSSTASALGKLQDVVNQNAQALNTLVKQLSSNFGAISSVLNDILSRLDKVEAEVQIDRLITGRLQSLQTYVTQQLIRAAEIRASANLAATKMSECVLGQSKRVDFCGKGYHLMSFPQSAPHGVVFLHVTYVCAQEKNFTTAPAICHDGKAHFPREGVFVSNGTHWFVTQRNFYEPQIITTDNTFVSGNCDVVIGIVNNTVYDPLQPELDSFKEELDKYFKNHTSPDVDLGDISGINASVVNIQKEIDRLNEVAKNLNESLIDLQELGKYEQYIKGGGSGGGQIYEGKLTAEGLRFGIVASRFNHALVDRLVEGAIDAIVRHGGREEDITLVRVPGSWEIPVAAGELARKEDIDAVIAIGVLIRGATPHFDYIASEVSKGLADLSLELRKPITFGVITADTLEQAIERAGTKHGNKGWEAALSAIEMANLFKSLR

SEQ ID NO: 4129 - protein, 1371 aa, Artificial Sequence
  SARS-CoV-2/China/WF0004/2020__EPI_ISL_413694 spike protein (1-1211)(P715C_P1069C) LumSynth construct
MFVFLVLLPLVSSQCVNLTTRTQLPPAYTNSFTRGVYYPDKVFRSSVLHSTQDLFLPFFSNVTWFHAIHVSGTNGTKRFDNPVLPFNDGVYFASTEKSNIIRGWIFGTTLDSKTQSLLIVNNATNVVIKVCEFQFCNDPFLGVYYHKNNKSWTESEFRVYSSANNCTFEYVSQPFLMDLEGKQGNFKNLREFVFKNIDGYFKIYSKHTPINLVRDLPQGFSALEPLVDLPIGINITRFQTLLALHRSYLTPGDSSSGWTAGAAAYYVGYLQPRTFLLKYNENGTITDAVDCALDPLSETKCTLKSFTVEKGIYQTSNFRVQPTESIVRFPNITNLCPFGEVFNATRFASVYAWNRKRISNCVADYSVLYNSASFSTFKCYGVSPTKLNDLCFTNVYADSFVIRGDEVRQIAPGQTGKIADYNYKLPDDFTGCVIAWNSNNLDSKVGGNYNYLYRLFRKSNLKPFERDISTEIYQAGSTPCNGVEGFNCYFPLQSYGFQPTNGVGYQPYRVVVLSFELLHAPATVCGPKKSTNLVKNKCVNFNFNGLTGTGVLTESNKKFLPFQQFGRDIADTTDAVRDPQTLEILDITPCSFGGVSVITPGTNTSNQVAVLYQDVNCTEVPVAIHADQLTPTWRVYSTGSNVFQTRAGCLIGAEHVNNSYECDIPIGAGICASYQTQTNSPRRARSVASQSIIAYTMSLGAENSVAYSNNSIAICTNFTISVTTEILPVSMTKTSVDCTMYICGDSTECSNLLLQYGSFCTQLNRALTGIAVEQDKNTQEVFAQVKQIYKTPPIKDFGGFNFSQILPDPSKPSKRSFIEDLLFNKVTLADAGFIKQYGDCLGDIAARDLICAQKFNGLTVLPPLLTDEMIAQYTSALLAGTITSGWTFGAGAALQIPFAMQMAYRFNGIGVTQNVLYENQKLIANQFNSAIGKIQDSLSSTASALGKLQDVVNQNAQALNTLVKQLSSNFGAISSVLNDILSRLDKVEAEVQIDRLITGRLQSLQTYVTQQLIRAAEIRASANLAATKMSECVLGQSKRFDFCGKGYHLMSFPQSAPHGVVFLHVTYVCAQEKNFTTAPAICHDGKAHFPREGVFVSNGTHWFVTQRNFYEPQIITTDNTFVSGNCDVVIGIVNNTVYDPLQPELDSFKEELDKYFKNHTSPDVDLGDISGINASVVNIQKEIDRLNEVAKNLNESLIDLQELGKYEQYIKGGGSGGGQIYEGKLTAEGLRFGIVASRFNHALVDRLVEGAIDAIVRHGGREEDITLVRVPGSWEIPVAAGELARKEDIDAVIAIGVLIRGATPHFDYIASEVSKGLADLSLELRKPITFGVITADTLEQAIERAGTKHGNKGWEAALSAIEMANLFKSLR

SEQ ID NO: 4130 - protein, 1371 aa, Artificial Sequence
  SARS-CoV-2/China/WF0028/2020__EPI_ISL_413791 spike protein (1-1211)(P715C_P1069C) LumSynth construct
MFVFLVLLPLVSSQCVNLTTRTQLPPAYTNSFTRGVYYPDKVFRSSVLHSTQDLFLPFFSNVTWFHAIHVSGTNGTKRFDNPVLPFNDGVYFASTEKSNIIRGWIFGTTLDSKTQSLLIVNNATNVVIKVCEFQFCNDPFLGVYYHKNNKSWMESEFRVYSSANNCTFEYVSQPFLMDLEGKQGNFKNLREFVFKNIDGYFKIYSKHTPINLVRDLPQGFSALEPLVDLPIGINITRFQTLLALHRSYLTPGDSSSGWTAGAAAYYVGYLQPRTFLLKYNENGTITDAVDCALDPLSETKCTLKSFTVEKGIYQTSNFRVQPTESIVRFPNITNLCPFGEVFNATRFASVYAWNRKRISNCVADYSVLYNSASFSTFKCYGVSPTKLNDLCFTNVYADSFVIRGDEVRQIAPGQTGKIADYNYKLPDDFTGCVIAWNSNNLDSKVGGNYNYLYRLFRKSNLKPFERDISTEIYQAGSTPCNGVEGFNCYFPLQSYGFQPTNGVGYQPYRVVVLSFELLHAPATVCGPKKSTNLVKNKCVNFNFNGLTGTGVLTESNKKFLPFQQFGRDIADTTDAVRDPQTLEILDITPCSFGGVSVITPGTNTSNQVAVLYQDVNCTEVPVAIHADQLTPTWRVYSTGSNVFQTRAGCLIGAEHVNNSYECDIPIGAGICASYQTQTNSPRRARSVASQSIIAYTMSLGAENSVAYSNNSIAICTNFTISVTTEILPVSMTKTSVDCTMYICGDSTECSNLLLQYGSFCTQLNRALTGIAVEQDKNTQEVFAQVKQIYKTPPIKDFGGFNFSQILPDPSKPSKRSFIEDLLFNKVTLADAGFIKQYGDCLGDIAARDLICAQKFNGLTVLPPLLTDEMIAQYTSALLAGTITSGWTFGAGAALQIPFAMQMAYRFNGIGVTQNVLYENQKLIANQFNSAIGKIQDSLSSTASALGKLQDVVNQNAQALNTLVKQLSSNFGAISSVLNDILSRLDKVEAEVQIDRLITGRLQSLQTYVTQQLIRAAEIRASANLAATKMSECVLGQSKRVDFCGKGYHLMSFPQSAPHGVVFLHVTYVCAQEKNFTTAPAICHDGKAHFPREGVFVSNGTHWFVTQRNFYEPQIITTDNTFVSGNCDVVIGIVNNTVYDPLQPELESFKEELDKYFKNHTSPDVDLGDISGINASVVNIQKEIDRLNEVAKNLNESLIDLQELGKYEQYIKGGGSGGGQIYEGKLTAEGLRFGIVASRFNHALVDRLVEGAIDAIVRHGGREEDITLVRVPGSWEIPVAAGELARKEDIDAVIAIGVLIRGATPHFDYIASEVSKGLADLSLELRKPITFGVITADTLEQAIERAGTKHGNKGWEAALSAIEMANLFKSLR

SEQ ID NO: 4131 - protein, 1371 aa, Artificial Sequence
  SARS-CoV-2/2019-nCoV/USA-CruiseA-18/2020__MT159716.1 spike protein (1-1211)(P715C_P1069C) LumSynth construct
MFVFLVLLPLVSSQCVNLTTRTQLPPAYTNSFTRGVYYPDKVFRSSVLHSTQDLFLPFFSNVTWFHAIHVSGTNGTKRFDNPVLPFNDGVYFASTEKSNIIRGWIFGTTLDSKTQSLLIVNNATNVVIKVCEFQFCNDPFLGVYYHKNNKSWMESELRVYSSANNCTFEYVSQPFLMDLEGKQGNFKNLREFVFKNIDGYFKIYSKHTPINLVRDLPQGFSALEPLVDLPIGINITRFQTLLALHRSYLTPGDSSSGWTAGAAAYYVGYLQPRTFLLKYNENGTITDAVDCALDPLSETKCTLKSFTVEKGIYQTSNFRVQPTESIVRFPNITNLCPFGEVFNATRFASVYAWNRKRISNCVADYSVLYNSASFSTFKCYGVSPTKLNDLCFTNVYADSFVIRGDEVRQIAPGQTGKIADYNYKLPDDFTGCVIAWNSNNLDSKVGGNYNYLYRLFRKSNLKPFERDISTEIYQAGSTPCNGVEGFNCYFPLQSYGFQPTNGVGYQPYRVVVLSFELLHAPATVCGPKKSTNLVKNKCVNFNFNGLTGTGVLTESNKKFLPFQQFGRDIADTTDAVRDPQTLEILDITPCSFGGVSVITPGTNTSNQVAVLYQDVNCTEVPVAIHADQLTPTWRVYSTGSNVFQTRAGCLIGAEHVNNSYECDIPIGAGICASYQTQTNSPRRARSVASQSIIAYTMSLGAENSVAYSNNSIAICTNFTISVTTEILPVSMTKTSVDCTMYICGDSTECSNLLLQYGSFCTQLNRALTGIAVEQDKNTQEVFAQVKQIYKTPPIKDFGGFNFSQILPDPSKPSKRSFIEDLLFNKVTLADAGFIKQYGDCLGDIAARDLICAQKFNGLTVLPPLLTDEMIAQYTSALLAGTITSGWTFGAGAALQIPFAMQMAYRFNGIGVTQNVLYENQKLIANQFNSAIGKIQDSLSSTASALGKLQDVVNQNAQALNTLVKQLSSNFGAISSVLNDILSRLDKVEAEVQIDRLITGRLQSLQTYVTQQLIRAAEIRASANLAATKMSECVLGQSKRVDFCGKGYHLMSFPQSAPHGVVFLHVTYVCAQEKNFTTAPAICHDGKAHFPREGVFVSNGTHWFVTQRNFYEPQIITTDNTFVSGNCDVVIGIVNNTVYDPLQPELDSFKEELDKYFKNHTSPDVDLGDISGINASVVNIQKEIDRLNEVAKNLNESLIDLQELGKYEQYIKGGGSGGGQIYEGKLTAEGLRFGIVASRFNHALVDRLVEGAIDAIVRHGGREEDITLVRVPGSWEIPVAAGELARKEDIDAVIAIGVLIRGATPHFDYIASEVSKGLADLSLELRKPITFGVITADTLEQAIERAGTKHGNKGWEAALSAIEMANLFKSLR

SEQ ID NO: 4132 - protein, 1371 aa, Artificial Sequence
  SARS-CoV-2/SARS-CoV-2/Yunnan-01/human/2020/CHN__MT049951.1 spike protein (1-1211)(P715C_P1069C) LumSynth construct
MFVFLVLLPLVSSQCVNLTTRTQLPPANTNSFTRGVYYPDKVFRSSVLHSTQDLFLPFFSNVTWFHAIHVSGTNGTKRFDNPVLPFNDGVYFASTEKSNIIRGWIFGTTLDSKTQSLLIVNNATNVVIKVCEFQFCNDPFLGVYYHKNNKSWMESEFRVYSSANNCTFEYVSQPFLMDLEGKQGNFKNLREFVFKNIDGYFKIYSKHTPINLVRDLPQGFSALEPLVDLPIGINITRFQTLLALHRSYLTPGDSSSGWTAGAAAYYVGYLQPRTFLLKYNENGTITDAVDCALDPLSETKCTLKSFTVEKGIYQTSNFRVQPTESIVRFPNITNLCPFGEVFNATRFASVYAWNRKRISNCVADYSVLYNSASFSTFKCYGVSPTKLNDLCFTNVYADSFVIRGDEVRQIAPGQTGKIADYNYKLPDDFTGCVIAWNSNNLDSKVGGNYNYLYRLFRKSNLKPFERDISTEIYQAGSTPCNGVEGFNCYFPLQSYGFQPTNGVGYQPYRVVVLSFELLHAPATVCGPKKSTNLVKNKCVNFNFNGLTGTGVLTESNKKFLPFQQFGRDIADTTDAVRDPQTLEILDITPCSFGGVSVITPGTNTSNQVAVLYQDVNCTEVPVAIHADQLTPTWRVYSTGSNVFQTRAGCLIGAEHVNNSYECDIPIGAGICASYQTQTNSPRRARSVASQSIIAYTMSLGAENSVAYSNNSIAICTNFTISVTTEILPVSMTKTSVDCTMYICGDSTECSNLLLQYGSFCTQLNRALTGIAVEQDKNTQEVFAQVKQIYKTPPIKDFGGFNFSQILPDPSKPSKRSFIEDLLFNKVTLADAGFIKQYGDCLGDIAARDLICAQKFNGLTVLPPLLTDEMIAQYTSALLAGTITSGWTFGAGAALQIPFAMQMAYRFNGIGVTQNVLYENQKLIANQFNSAIGKIQDSLSSTASALGKLQDVVNQNAQALNTLVKQLSSNFGAISSVLNDILSRLDKVEAEVQIDRLITGRLQSLQTYVTQQLIRAAEIRASANLAATKMSECVLGQSKRVDFCGKGYHLMSFPQSAPHGVVFLHVTYVCAQEKNFTTAPAICHDGKAHFPREGVFVSNGTHWFVTQRNFYEPQIITTDNTFVSGNCDVVIGIVNNTVYDPLQPELDSFKEELDKYFKNHTSPDVDLGDISGINASVVNIQKEIDRLNEVAKNLNESLIDLQELGKYEQYIKGGGSGGGQIYEGKLTAEGLRFGIVASRFNHALVDRLVEGAIDAIVRHGGREEDITLVRVPGSWEIPVAAGELARKEDIDAVIAIGVLIRGATPHFDYIASEVSKGLADLSLELRKPITFGVITADTLEQAIERAGTKHGNKGWEAALSAIEMANLFKSLR

SEQ ID NO: 4133 - protein, 1371 aa, Artificial Sequence
  SARS-CoV-2/USA/WA-UW292/2020__EPI_ISL_418077 spike protein (1-1211)(P715C_P1069C) LumSynth construct
MFVFLVLLPLVSSQCVNLTTRTQLPPAYTNSFTRGVYYPDKVFRSSVLHSTQDLFLPFFSNVTWFHAIHVSGTNGTKRFDNPVLPFNDGVYFASTEKSNIIRGWIFGTTLDSKTQSLLIVNNATNVVIKVCEFQFCNDPFLGVYYHKNNKSWMESEFRVYSSANNCTFEYVSQPFLMDLEGKQGNFKNLREFVFKNIDGYFKIYSKHTPINLVRDLPQGFSALEPLVDLPIGINITRFQTLLALHRSYLTPGDSSSGWTAGAAAYYVGYLQPRTFLLKYNENGTITDAVDCALDPLSETKCTLKSFTVEKGIYQTSNFRVQPTESIVRFPNITNLCPFGEVFNATRFASVYAWNRKRISNCVADYSVLYNSASFSTFKCYGVSPTKLNDLCFTNVYADSFVIRGDEVRQIAPGQTGKIADYNYKLPDDFTGCVIAWNSNNLDSKVGGNYNYLYRLFRKSNLKPFERDISTEIYQASSTPCNGVEGFNCYFPLQSYGFQPTNGVGYQPYRVVVLSFELLHAPATVCGPKKSTNLVKNKCVNFNFNGLTGTGVLTESNKKFLPFQQFGRDIADTTDAVRDPQTLEILDITPCSFGGVSVITPGTNTSNQVAVLYQDVNCTEVPVAIHADQLTPTWRVYSTGSNVFQTRAGCLIGAEHVNNSYECDIPIGAGICASYQTQTNSPRRARSVASQSIIAYTMSLGAENSVAYSNNSIAICTNFTISVTTEILPVSMTKTSVDCTMYICGDSTECSNLLLQYGSFCTQLNRALTGIAVEQDKNTQEVFAQVKQIYKTPPIKDFGGFNFSQILPDPSKPSKRSFIEDLLFNKVTLADAGFIKQYGDCLGDIAARDLICAQKFNGLTVLPPLLTDEMIAQYTSALLAGTITSGWTFGAGAALQIPFAMQMAYRFNGIGVTQNVLYENQKLIANQFNSAIGKIQDSLSSTASALGKLQDVVNQNAQALNTLVKQLSSNFGAISSVLNDILSRLDKVEAEVQIDRLITGRLQSLQTYVTQQLIRAAEIRASANLAATKMSECVLGQSKRVDFCGKGYHLMSFPQSAPHGVVFLHVTYVCAQEKNFTTAPAICHDGKAHFPREGVFVSNGTHWFVTQRNFYEPQIITTDNTFVSGNCDVVIGIVNNTVYDPLQPELDSFKEELDKYFKNHTSPDVDLGDISGINASVVNIQKEIDRLNEVAKNLNESLIDLQELGKYEQYIKGGGSGGGQIYEGKLTAEGLRFGIVASRFNHALVDRLVEGAIDAIVRHGGREEDITLVRVPGSWEIPVAAGELARKEDIDAVIAIGVLIRGATPHFDYIASEVSKGLADLSLELRKPITFGVITADTLEQAIERAGTKHGNKGWEAALSAIEMANLFKSLR

SEQ ID NO: 4134 - protein, 1371 aa, Artificial Sequence
  SARS-CoV-2/Iceland/192/2020__EPI_ISL_417819 spike protein (1-1211)(P715C_P1069C) LumSynth construct
MFVFFVLLPLVSSQCVNLTTRTQLPPAYTNSFTRGVYYPDKVFRSSVLHSTQDLFLPFFSNVTWFHAIHVSGTNGTKRFDNPVLPFNDGVYFASTEKSNIIRGWIFGTTLDSKTQSLLIVNNATNVVIKVCEFQFCNDPFLGVYYHKNNKSWMESEFRVYSSANNCTFEYVSQPFLMDLEGKQGNFKNLREFVFKNIDGYFKIYSKHTPINLVRDLPQGFSALEPLVDLPIGINITRFQTLLALHRSYLTPGDSSSGWTAGAAAYYVGYLQPRTFLLKYNENGTITDAVDCALDPLSETKCTLKSFTVEKGIYQTSNFRVQPTESIVRFPNITNLCPFGEVFNATRFASVYAWNRKRISNCVADYSVLYNSASFSTFKCYGVSPTKLNDLCFTNVYADSFVIRGDEVRQIAPGQTGKIADYNYKLPDDFTGCVIAWNSNNLDSKVGGNYNYLYRLFRKSNLKPFERDISTEIYQAGSTPCNGVEGFNCYFPLQSYGFQPTNGVGYQPYRVVVLSFELLHAPATVCGPKKSTNLVKNKCVNFNFNGLTGTGVLTESNKKFLPFQQFGRDIADTTDAVRDPQTLEILDITPCSFGGVSVITPGTNTSNQVAVLYQGVNCTEVPVAIHADQLTPTWRVYSTGSNVFQTRAGCLIGAEHVNNSYECDIPIGAGICASYQTQTNSPRRARSVASQSIIAYTMSLGAENSVAYSNNSIAICTNFTISVTTEILPVSMTKTSVDCTMYICGDSTECSNLLLQYGSFCTQLNRALTGIAVEQDKNTQEVFAQVKQIYKTPPIKDFGGFNFSQILPDPSKPSKRSFIEDLLFNKVTLADAGFIKQYGDCLGDIAARDLICAQKFNGLTVLPPLLTDEMIAQYTSALLAGTITSGWTFGAGAALQIPFAMQMAYRFNGIGVTQNVLYENQKLIANQFNSAIGKIQDSLSSTASALGKLQDVVNQNAQALNTLVKQLSSNFGAISSVLNDILSRLDKVEAEVQIDRLITGRLQSLQTYVTQQLIRAAEIRASANLAATKMSECVLGQSKRVDFCGKGYHLMSFPQSAPHGVVFLHVTYVCAQEKNFTTAPAICHDGKAHFPREGVFVSNGTHWFVTQRNFYEPQIITTDNTFVSGNCDVVIGIVNNTVYDPLQPELDSFKEELDKYFKNHTSPDVDLGDISGINASVVNIQKEIDRLNEVAKNLNESLIDLQELGKYEQYIKGGGSGGGQIYEGKLTAEGLRFGIVASRFNHALVDRLVEGAIDAIVRHGGREEDITLVRVPGSWEIPVAAGELARKEDIDAVIAIGVLIRGATPHFDYIASEVSKGLADLSLELRKPITFGVITADTLEQAIERAGTKHGNKGWEAALSAIEMANLFKSLR

SEQ ID NO: 4135 - protein, 1371 aa, Artificial Sequence
  SARS-CoV-2/Belgium/ULG-6939/2020__EPI_ISL_417020 spike protein (1-1211)(P715C_P1069C) LumSynth construct
MFVFLVLLPLVSSQCVNLTTRTQLPPAYTNSFTRGVYYPDKVFRSSVLHSTQDLFLPFFSNVTWFHAIHVSGTNGTKRFDNPVLPFNDGVYFASTEKSNIIRGWIFGTTLDSKTQSLLIVNNATNVVIKVCEFQFCNDPFLGVYYHKNNKSWMESEFRVYSSANNCTFEYVSQPFLMDLEGKQGNFKNLREFVFKNIDGYFKIYSKHTPINLVRDLPQGFSALEPLVDLPIGINITRFQTLLALHRSYLTPGDSSSGWTAGAAAYYVGYLQPRTFLLKYNENGTITDAVDCALDPLSETKCTLKSFTVEKGIYQTSNFRVQPTESIVRFPNITNLCPFGEVFNATRFASVYAWNRKRISNCVADYSVLYNSASFSTFKCYGVSPTKLNDLCFTNVYADSFVIRGDEVRQIAPGQTGKIADYNYKLPDDFTGCVIAWNSNNLDSKVGGNYNYLYRLFRKSNLKPFERDISTEIYQAGSTPCNGVEGFNCYFPLQSYGFQPTNGVGYQPYRVVVLSFELLHAPATVCGPKKSTNLVKNKCVNFNFNGLTGTGVLTESNKKFLPFQQFGRDIADTTDAVRDPQTLEILDITPCSFGGVSVITPGTNTSNQVAVLYQGVNCTEVPVAIHADQLTPTWRVYSTGSNVFQTRAGCLIGAEHVNNSYECDIPIGAGICASYQTQTNSPRRARSVASQSIIAYTMSLGAENSVVYSNNSIAICTNFTISVTTEILPVSMTKTSVDCTMYICGDSTECSNLLLQYGSFCTQLNRALTGIAVEQDKNTQEVFAQVKQIYKTPPIKDFGGFNFSQILPDPSKPSKRSFIEDLLFNKVTLADAGFIKQYGDCLGDIAARDLICAQKFNGLTVLPPLLTDEMIAQYTSALLAGTITSGWTFGAGAALQIPFAMQMAYRFNGIGVTQNVLYENQKLIANQFNSAIGKIQDSLSSTASALGKLQDVVNQNAQALNTLVKQLSSNFGAISSVLNDILSRLDKVEAEVQIDRLITGRLQSLQTYVTQQLIRAAEIRASANLAATKMSECVLGQSKRVDFCGKGYHLMSFPQSAPHGVVFLHVTYVCAQEKNFTTAPAICHDGKAHFPREGVFVSNGTHWFVTQRNFYEPQIITTDNTFVSGNCDVVIGIVNNTVYDPLQPELDSFKEELDKYFKNHTSPDVDLGDISGINASVVNIQKEIDRLNEVAKNLNESLIDLQELGKYEQYIKGGGSGGGQIYEGKLTAEGLRFGIVASRFNHALVDRLVEGAIDAIVRHGGREEDITLVRVPGSWEIPVAAGELARKEDIDAVIAIGVLIRGATPHFDYIASEVSKGLADLSLELRKPITFGVITADTLEQAIERAGTKHGNKGWEAALSAIEMANLFKSLR

SEQ ID NO: 4136 - protein, 1371 aa, Artificial Sequence
  SARS-CoV-2/France/HF2496/2020__EPI_ISL_418231 spike protein (1-1211)(P715C_P1069C) LumSynth construct
MFVFLVLLPLVSSQCVNLTTRTQLPPAYTNSFTRGVYYPDKVFRSSVLHSTQDLFLPFFSNVTWFHAIHVSGTNGTKRFDNPVLPFNDGVYFASTEKSNIIRGWIFGTTLDSKTQSLLIVNNATNVVIKVCEFQFCNDPFLGVYYHKNNKSWMESEFRVYSSANNCTFEYVSQPFLMDLEGKQGNFKNLREFVFKNIDGYFKIYSKHTPINLVRDLPQGFSALEPLVDLPIGINITRFQTLLALHRSYLTPGDSSSGWTAGAAAYYVGYLQPRTFLLKYNENGTITDAVDCALDPLSETKCTLKSFTVEKGIYQTSNFRVQPTESIVRFPNITNLCPFGEVFNATRFASVYAWNRKRISNCVADYSVLYNSASFSTFKCYGVSPTKLNDLCFTNVYADSFVIRGDEVRQIAPGQTGKIADYNYKLPDDFTGCVIAWNSNNLDSKVGGNYNYLYRLFRKSNLKPFERDISTEIYQAGSTPCNGVEGFNCYFPLQSYGFQPTNGVGYQPYRVVVLSFELLHAPATVCGPKKSTNLVKNKCVNFNFNGLTGTGVLTESNKKFLPFQQFGRDIADTTDAVRDPQTLEILDITPCSFGGVSVITPGTNTSNQVAVLYQGVNCTEVPVAIHADQLTPTWRVYSTGSNVFQTRAGCLIGAEHVNNSYECDIPIGAGICASYQTQTNSPRRARSVASQSIIAYTMSLGAENSVAYSNNSIAICTNFTISVTTEILPVSMTKTSVDCTMYICGDSTECSNLLLQYGSFCTQLNRALTGIAVEQDKNTQEVFAQVKQIYKTPPIKDFGGFNFSQILPDPSKPSKRSFIEDLLFNKVTLADAGFIKQYGDCLGDIVARDLICAQKFNGLTVLPPLLTDEMIAQYTSALLAGTITSGWTFGAGAALQIPFAMQMAYRFNGIGVTQNVLYENQKLIANQFNSAIGKIQDSLSSTASALGKLQDVVNQNAQALNTLVKQLSSNFGAISSVLNDILSRLDKVEAEVQIDRLITGRLQSLQTYVTQQLIRAAEIRASANLAATKMSECVLGQSKRVDFCGKGYHLMSFPQSAPHGVVFLHVTYVCAQEKNFTTAPAICHDGKAHFPREGVFVSNGTHWFVTQRNFYEPQIITTDNTFVSGNCDVVIGIVNNTVYDPLQPELDSFKEELDKYFKNHTSPDVDLGDISGINASVVNIQKEIDRLNEVAKNLNESLIDLQELGKYEQYIKGGGSGGGQIYEGKLTAEGLRFGIVASRFNHALVDRLVEGAIDAIVRHGGREEDITLVRVPGSWEIPVAAGELARKEDIDAVIAIGVLIRGATPHFDYIASEVSKGLADLSLELRKPITFGVITADTLEQAIERAGTKHGNKGWEAALSAIEMANLFKSLR

SEQ ID NO: 4137 - protein, 1371 aa, Artificial Sequence
  SARS-CoV-2/USA/WA-UW291/2020__EPI_ISL_418076 spike protein (1-1211)(P715C_P1069C) LumSynth construct
MFVFLVLLPLVSSQCVNLTTRTQLPPAYTNSFTRGVYYPDKVFRSSVLHSTQDLFLPFFSNVTWFHAIHVSGTNGTKRFDNPVLPFNDGVYFASTEKSNIIRGWIFGTTLDSKTQSLLIVNNATNVVIKVCEFQFCNDPFLGVYYHKNNKSWMESEFRVYSSANNCTFEYVSQPFLMDLEGKQGNFKNLREFVFKNIDGYFKIYSKHTPINLVRDLPQGFSALEPLVDLPIGINITRFQTLLALHRSYLTPGDSSSGWTAGAAAYYVGYLQPRTFLLKYNENGTITDAVDCALDPLSETKCTLKSFTVEKGIYQTSNFRVQPTESIVRFPNITNLCPFGEVFNATRFASVYAWNRKRISNCVADYSVLYNSASFSTFKCYGVSPTKLNDLCFTNVYADSFVIRGDEVRQIAPGQTGKIADYNYKLPDDFTGCVIAWNSNNLDSKVGGNYNYLYRLFRKSNLKPFERDISTEIYQAGSTPCNGVEGFNCYFPLQSYGFQPTNGVGYQPYRVVVLSFELLHAPATVCGPKKSTNLVKNKCVNFNFNGLTGTGVLTESNKKFLPFQQFGRDIADTTDAVRDPQTLEILDITPCSFGGVSVITPGTNTSNQVAVLYQGVNCTEVPVAIHADQLTPTWRVYSTGSNVFQTRAGCLIGAEHVNNSYECDIPIGAGICASYQTQTNSPRRARSVASQSIIAYTMSLGAENSVAYSNNSIAICTNFTISVTTEILPVSMTKTSVDCTMYICGDSTECSNLLLQYGSFCTQLNRALTGIAVEQDKNTQEVFAQVKQIYKTPPIKDFGGFNFSQILPDPSKPSKRSFIEDLLFNKVTLADAGFIKQYGDCLGDIAARDLICAQKFNGLTVLPPLLTDEMIAQYTSALLAGTITSGWTFGAGAALQIPFAMQMAYRFNGIGVTQNVLYENQKLIANQFNSAIGKIQYSLSSTASALGKLQDVVNQNAQALNTLVKQLSSNFGAISSVLNDILSRLDKVEAEVQIDRLITGRLQSLQTYVTQQLIRAAEIRASANLAATKMSECVLGQSKRVDFCGKGYHLMSFPQSAPHGVVFLHVTYVCAQEKNFTTAPAICHDGKAHFPREGVFVSNGTHWFVTQRNFYEPQIITTDNTFVSGNCDVVIGIVNNTVYDPLQPELDSFKEELDKYFKNHTSPDVDLGDISGINASVVNIQKEIDRLNEVAKNLNESLIDLQELGKYEQYIKGGGSGGGQIYEGKLTAEGLRFGIVASRFNHALVDRLVEGAIDAIVRHGGREEDITLVRVPGSWEIPVAAGELARKEDIDAVIAIGVLIRGATPHFDYIASEVSKGLADLSLELRKPITFGVITADTLEQAIERAGTKHGNKGWEAALSAIEMANLFKSLR

SEQ ID NO: 4138 - protein, 1371 aa, Artificial Sequence; identical to SEQ ID NO: 4101
  SARS-CoV-2/Portugal/PT0034/2020__EPI_ISL_418019 spike protein (1-1211)(P715C_P1069C) LumSynth construct

SEQ ID NO: 4139 - protein, 1371 aa, Artificial Sequence
  SARS-CoV-2/Iceland/202/2020__EPI_ISL_417750 spike protein (1-1211)(P715C_P1069C) LumSynth construct
MFVFLVLLPLVSSQCVNLTTRTQLPPAYTNSFTRGVYYPDKVFRSSVLHSTQDLFLPFFSNVTWFHAIHVSGTNGTKRFDNPVLPFNDGVYFASTEKSNIIRGWIFGTTLDSKTQSLLIVNNATNVVIKVCEFQFCNDPFLGVYYHKNNKSWMESEFRVYSSANNCTFEYVSQPFLMDLEGKQGNFKNLREFVFKNIDGYFKIYSKHTPINLVRDLPQGFSALEPLVDLPIGINITRFQTLLALHRSYLTPGDSSSGWTAGAAAYYVGYLQPRTFLLKYNENGTITDAVDCALDPLSETKCTLKSFTVEKGIYQTSNFRVQPTESIVRFPNITNLCPFGEVFNATRFASVYAWNRKRISNCVADYSVLYNSASFSTFKCYGVSPTKLNDLCFTNVYADSFVIRGDEVRQIAPGQTGKIADYNYKLPDDFTGCVIAWNSNNLDSKVGGNYNYLYRLFRKSNLKPFERDISTEIYQAGSTPCNGVEGFNCYFPLQSYGFQPTNGVGYQPYRVVVLSFELLHAPATVCGPKKSTNLVKNKCVNFNFNGLTGTGVLTESNKKFLPFQQFGRDIADTTDAVRDPQTLEILDITPCSFGGVSVITPGTNTSNQVAVLYQDVNCTEVPVAIHADQLTPTWRVYSTGSNVFQTRAGCLIGAEHVNNSYECDIPIGAGICASYQTQTNSPRRARSVASQSIIAYTMSLGAENSVAYSNNSIAICTNFTISVTTEILPVSMTKTSVDCTMYICGDSTECSNLLLQYGSFCTQLNRALTGIAVEQDKNTQEVFAQVKQIYKTPPIKDFGGFNFSQILPDPSKPSKRSFIEDLLFNKVTLADAGFIKQYGDCLGDIAARDLICAQKFNGLTVLPPLLTDEMIAQYTSALLAGTITSGWTFGAGAALQIPFAMQMAYRFNGIGVTQNVLYENQKLIANQFNSAIGKIQDSLSSTASALGKLQDVVNQNAQALNTLVKQLSSNFGAISSVLNDILSRLDKVEAEVQIDRLITGRLQSLQTYVTQQLIRAAEIRASANLAATKMSECVLGQSKRVDFCGKGYHLMSFPQSAPHGVVFLHVTYVCAQEKNFTTAPAICHDGKAHFPREGVFVSNGTHWFVTQRNFYEPQIITTDNTFVSGNCDVVIGIVNNTVYDPLQPELDSFKEELDKYFKNHTSPDVDLGDIPGINASVVNIQKEIDRLNEVAKNLNESLIDLQELGKYEQYIKGGGSGGGQIYEGKLTAEGLRFGIVASRFNHALVDRLVEGAIDAIVRHGGREEDITLVRVPGSWEIPVAAGELARKEDIDAVIAIGVLIRGATPHFDYIASEVSKGLADLSLELRKPITFGVITADTLEQAIERAGTKHGNKGWEAALSAIEMANLFKSLR

SEQ ID NO: 4140 - protein, 1371 aa, Artificial Sequence
  SARS-CoV-2/USA/WA-UW261/2020__EPI_ISL_418046 spike protein (1-1211)(P715C_P1069C) LumSynth construct
MFVFLVLLPLVSSQCVNLTTRTQLPPAYTNSFTRGVYYPDKVFRSSVLHSTQDLFLPFFSNVTWFHAIHVSGTNGTKRFDNPVLPFNDGVYFASTEKSNIIRGWIFGTTLDSKTQSLLIVNNATNVVIKVCEFQFCNDPFLGVYYHKNNKSWMESEFRVYSSANNCTFEYVSQPFLMDLEGKQGNFKNLREFVFKNIDGYFKIYSKHTPINLVRDLPQGFSALEPLVDLPIGINITRFQTLLALHRSYLTPGDSSSGWTAGAAAYYVGYLQPRTFLLKYNENGTITDAVDCALDPLSETKCTLKSFTVEKGIYQTSNFRVQPTESIVRFPNITNLCPFGEVFNATRFTSVYAWNRKRISNCVADYSVLYNSASFSTFKCYGVSPTKLNDLCFTNVYADSFVIRGDEVRQIAPGQTGKIADYNYKLPDDFTGCVIAWNSNNLDSKVGGNYNYLYRLFRKSNLKPFERDISTEIYQAGSTPCNGVEGFNCYFPLQSYGFQPTNGVGYQPYRVVVLSFELLHAPATVCGPKKSTNLVKNKCVNFNFNGLTGTGVLTESNKKFLPFQQFGRDIADTTDAVRDPQTLEILDITPCSFGGVSVITPGTNTSNQVAVLYQDVNCTEVPVAIHADQLTPTWRVYSTGSNVFQTRAGCLIGAEHVNNSYECDIPIGAGICASYQTQTNSPRRARSVASQSIIAYTMSLGAENSVAYSNNSIAICTNFTISVTTEILPVSMTKTSVDCTMYICGDSTECSNLLLQYGSFCTQLNRALTGIAVEQDKNTQEVFAQVKQIYKTPPIKDFGGFNFSQILPDPSKPSKRSFIEDLLFNKVTLADAGFIKQYGDCLGDIAARDLICAQKFNGLTVLPPLLTDEMIAQYTSALLAGTITSGWTFGAGAALQIPFAMQMAYRFNGIGVTQNVLYENQKLIANQFNSAIGKIQDSLSSTASALGKLQDVVNQNAQALNTLVKQLSSNFGAISSVLNDILSRLDKVEAEVQIDRLITGRLQSLQTYVTQQLIRAAEIRASANLAATKMSECVLGQSKRVDFCGKGYHLMSFPQSAPHGVVFLHVTYVCAQEKNFTTAPAICHDGKAHFPREGVFVSNGTHWFVTQRNFYEPQIITTDNTFVSGNCDVVIGIVNNTVYDPLQPELDSFKEELDKYFKNHTSPDVDLGDISGINASVVNIQKEIDRLNEVAKNLNESLIDLQELGKYEQYIKGGGSGGGQIYEGKLTAEGLRFGIVASRFNHALVDRLVEGAIDAIVRHGGREEDITLVRVPGSWEIPVAAGELARKEDIDAVIAIGVLIRGATPHFDYIASEVSKGLADLSLELRKPITFGVITADTLEQAIERAGTKHGNKGWEAALSAIEMANLFKSLR

SEQ ID NO: 4141 - protein, 1371 aa, Artificial Sequence
  SARS-CoV-2/Portugal/PT0035/2020__EPI_ISL_418020 spike protein (1-1211)(P715C_P1069C) LumSynth construct
MFVFLVLLPLVSSQCVNLTTRTQLPPAYTNSFTRGVYYPDKVFRSSVLHSTQDLFLPFFSNVTWFHAIHVSGTNGTKRFDNPVLPFNDGVYFASTEKSNIIRGWIFGTTLDSKTQSLLIVNNATNVVIKVCEFQFCNDPFLGVYYHKNNKSWMESEFRVYSSANNCTFEYVSQPFLMDLEGKQGNFKNLREFVFKNIDGYFKIYSKHTPINLVRDLPQGFSALEPLVDLPIGINITRFQTLLALHRSYLTPGDSSSGWTAGAAAYYVGYLQPRTFLLKYNENGTITDAVDCALDPLSETKCTLKSFTVEKGIYQTSNFRVQPTESIVRFPNITNLCPFGEVFNATRFASVYAWNRKRISNCVADYSVLYNSASFSTFKCYGVSPTKLNDLCFTNVYADSFVIRGDEVRQIAPGQTGKIADYNYKLPDDFTGCVIAWNSNNLDSKVGGNYNYLYRLFRKSNLKPFERDISTEIYQAGSTPCNGVEGFNCYFPLQSYGFQPTNGVGYQPYRVVVLSFELLHAPATVCGPKKSTNLVKNKCVNFNFNGLTGTGVLTESNKKFLPFQQFGRDIADTTDAVRDPQTLEILDITPCSFGGVSVITPGTNTSNQVAVLYQDVNCTEVPVAIHADQLTPTWRVYSTGSNVFQTRAGCLIGAEHVNNSYECDIPIGAGICASYQTQTNSPRRARSVASQSIIAYTMSLGAENSVAYSNNSIAICTNFTISVTTEILPVSMTKTSVDCTMYICGDSTECSNLLLQYGSFCTQLNRALTGIAVEQDKNTQEVFAQVKQIYKTPPIKDFGGFNFSQILPDPSKPSKRSFIEDLLFNKVTLADAGFIKQYGDCLGDISARDLICAQKFNGLTVLPPLLTDEMIAQYTSALLAGTITSGWTFGAGAALQIPFAMQMAYRFNGIGVTQNVLYENQKLIANQFNSAIGKIQDSLSSTASALGKLQDVVNQNAQALNTLVKQLSSNFGAISSVLNDILSRLDKVEAEVQIDRLITGRLQSLQTYVTQQLIRAAEIRASANLAATKMSECVLGQSKRVDFCGKGYHLMSFPQSAPHGVVFLHVTYVCAQEKNFTTAPAICHDGKAHFPREGVFVSNGTHWFVTQRNFYEPQIITTDNTFVSGNCDVVIGIVNNTVYDPLQPELDSFKEELDKYFKNHTSPDVDLGDISGINASVVNIQKEIDRLNEVAKNLNESLIDLQELGKYEQYIKGGGSGGGQIYEGKLTAEGLRFGIVASRFNHALVDRLVEGAIDAIVRHGGREEDITLVRVPGSWEIPVAAGELARKEDIDAVIAIGVLIRGATPHFDYIASEVSKGLADLSLELRKPITFGVITADTLEQAIERAGTKHGNKGWEAALSAIEMANLFKSLR

SEQ ID NO: 4142 - protein, 1371 aa, Artificial Sequence
  SARS-CoV-2/USA/NY-NYUMC7/2020__EPI_ISL_418192 spike protein (1-1211)(P715C_P1069C) LumSynth construct
MFVFLVLLPLVSSQCVNLTTRTQLPPAYTNSFTRGVYYPDKVFRSSVLHSTQDLFLPFFSNVTWFHAIHVSGTNGTKRFDNPVLPFNDGVYFASTEKSNIIRGWIFGTTLDSKTQSLLIVNNATNVVIKVCEFQFCNDPFLGVYHHKNNKSWMESEFRVYSSANNCTFEYVSQPFLMDLEGKQGNFKNLREFVFKNIDGYFKIYSKHTPINLVRDLPQGFSALEPLVDLPIGINITRFQTLLALHRSYLTPGDSSSGWTAGAAAYYVGYLQPRTFLLKYNENGTITDAVDCALDPLSETKCTLKSFTVEKGIYQTSNFRVQPTESIVRFPNITNLCPFGEVFNATRFASVYAWNRKRISNCVADYSVLYNSASFSTFKCYGVSPTKLNDLCFTNVYADSFVIRGDEVRQIAPGQTGKIADYNYKLPDDFTGCVIAWNSNNLDSKVGGNYNYLYRLFRKSNLKPFERDISTEIYQAGSTPCNGVEGFNCYFPLQSYGFQPTNGVGYQPYRVVVLSFELLHAPATVCGPKKSTNLVKNKCVNFNFNGLTGTGVLTESNKKFLPFQQFGRDIADTTDAVRDPQTLEILDITPCSFGGVSVITPGTNTSNQVAVLYQGVNCTEVPVAIHADQLTPTWRVYSTGSNVFQTRAGCLIGAEHVNNSYECDIPIGAGICASYQTQTNSPRRARSVASQSIIAYTMSLGAENSVAYSNNSIAICTNFTISVTTEILPVSMTKTSVDCTMYICGDSTECSNLLLQYGSFCTQLNRALTGIAVEQDKNTQEVFAQVKQIYKTPPIKDFGGFNFSQILPDPSKPSKRSFIEDLLFNKVTLADAGFIKQYGDCLGDIAARDLICAQKFNGLTVLPPLLTDEMIAQYTSALLAGTITSGWTFGAGAALQIPFAMQMAYRFNGIGVTQNVLYENQKLIANQFNSAIGKIQDSLSSTASALGKLQDVVNQNAQALNTLVKQLSSNFGAISSVLNDILSRLDKVEAEVQIDRLITGRLQSLQTYVTQQLIRAAEIRASANLAATKMSECVLGQSKRVDFCGKGYHLMSFPQSAPHGVVFLHVTYVCAQEKNFTTAPAICHDGKAHFPREGVFVSNGTHWFVTQRNFYEPQIITTDNTFVSGNCDVVIGIVNNTVYDPLQPELDSFKEELDKYFKNHTSPDVDLGDISGINASVVNIQKEIDRLNEVAKNLNESLIDLQELGKYEQYIKGGGSGGGQIYEGKLTAEGLRFGIVASRFNHALVDRLVEGAIDAIVRHGGREEDITLVRVPGSWEIPVAAGELARKEDIDAVIAIGVLIRGATPHFDYIASEVSKGLADLSLELRKPITFGVITADTLEQAIERAGTKHGNKGWEAALSAIEMANLFKSLR

SEQ ID NO: 4143 - protein, 1371 aa, Artificial Sequence
  SARS-CoV-2/Iceland/189/2020__EPI_ISL_417709 spike protein (1-1211)(P715C_P1069C) LumSynth construct
MFVFLVLLPLVSSQCVNLTTRTQLPPAYTNSFTRGVYYPDKVFRSSVLHSTQDLFLPFFSNVTWFHAIHVSGTNGTKRFDNPVLPFNDGVYFASTEKSNIIRGWIFGTTLDSKTQSLLIVNNATNVVIKVCEFQFCNDPFLGVYYHKNNKSWMESEFRVYSSANNCTFEYVSQPFLMDLEGKQGNFKNLREFVFKNIDGYFKIYSKHTPINLVRDLPQGFSALEPLVDLPIGINITRFQTLLALHRSYLTPGDSSSGWTAGAAAYYVGYLQPRTFLLKYNENGTITDAVDCALDPLSETKCTLKSFTVEKGIYQTSNFRVQPTESIVRFPNITNLCPFGEVFNATRFASVYAWNRKRISNCVADYSVLYNSASFSTFKCYGVSPTKLNDLCFTNVYADSFVIRGDEVRQIAPGQTGKIADYNYKLPDDFTGCVIAWNSNNLDSKVGGNYNYLYRLFRKSNLKPFERDISTEIYQAGSTPCNGVEGFNCYFPLQSYGFQPTNGVGYQPYRVVVLSFELLHAPATVCGPKKSTNLVKNKCVNFNFNGLTGTGVLTESNKKFLPFQQFGRDIADTTDAVRDPQTLEILDITPCSFGGVSVITPGTNTSNQVAVLYQGVNCTEVPVAIHADQLTPTWRVYSTGSNVFQTRAGCLIGAEHVNNSYECDIPIGAGICASYQTQTNSPRRARSVASQSIIAYTMSLGAENSVAYSNNSIAICTNFTISVTTEILPVSMTKTSVDCTMYICGDSTECSNLLLQYGSFCTQLNRALTGIAVEQDKNTQEVFAQVKQIYKTPPIKDFGGFNFSQILPDPSKPSKRSFIEDLLFNKVTLADAGFTKQYGDCLGDIAARDLICAQKFNGLTVLPPLLTDEMIAQYTSALLAGTITSGWTFGAGAALQIPFAMQMAYRFNGIGVTQNVLYENQKLIANQFNSAIGKIQDSLSSTASALGKLQDVVNQNAQALNTLVKQLSSNFGAISSVLNDILSRLDKVEAEVQIDRLITGRLQSLQTYVTQQLIRAAEIRASANLAATKMSECVLGQSKRVDFCGKGYHLMSFPQSAPHGVVFLHVTYVCAQEKNFTTAPAICHDGKAHFPREGVFVSNGTHWFVTQRNFYEPQIITTDNTFVSGNCDVVIGIVNNTVYDPLQPELDSFKEELDKYFKNHTSPDVDLGDISGINASVVNIQKEIDRLNEVAKNLNESLIDLQELGKYEQYIKGGGSGGGQIYEGKLTAEGLRFGIVASRFNHALVDRLVEGAIDAIVRHGGREEDITLVRVPGSWEIPVAAGELARKEDIDAVIAIGVLIRGATPHFDYIASEVSKGLADLSLELRKPITFGVITADTLEQAIERAGTKHGNKGWEAALSAIEMANLFKSLR

SEQ ID NO: 4144 - protein, 1371 aa, Artificial Sequence
  SARS-CoV-2/Australia/NSW56/2020__EPI_ISL_417408 spike protein (1-1211)(P715C_P1069C) LumSynth construct
MFVFLVLLPLVSSQCVNLTTRTQLPPAYTNSFTRGVYYPDKVFRSSVLHSTQDLFLPFFSNVTWFHAIHVSGTNGTKRFDNPVLPFNDGVYFASTEKSNIIRGWIFGTTLDSKTQSLLIVNNATNVVIKVCEFQFCNDPFLGVYYHKNNKSWMESEFRVYSSANNCTFEYVSQPFLMDLEGKQGNFKNLREFVFKNIDGYFKIYSKHTPINLVRDLPQGFSALEPLVDLPIGINITRFQTLLALHRSYLTPGDSSSGWTAGAAAYYVGYLQPRTFLLKYNENGTITDAVDCALDPLSETKCTLKSFTVEKGIYQTSNFRVQPTESIVRFPNITNLCPFGEVFNATRFASVYAWNRKRISNCVADYSVLYNSASFSTFKCYGVSPTKLNDLCFTNVYADSFVIRGDEVRQIAPGQTGKIADYNYKLPDDFTGCVIAWNSNNLDSKVGGNYNYLYRLFRKSNLKPFERDISTEIYQAGSTPCNGVEGFNCYFPLQSYGFQPTNGVGYQPYRVVVLSFELLHAPATVCGPKKSTNLVKNKCVNFNFNGLTGTGVLTESNKKFLPFQQFGRDIADTTDAVRDPQTLEILDITPCSFGGVSVITPGTNTSNQVAVLYQDVNCTEVPVAIHADQLTPTWRVYSTGSNVFQTRAGCLIGAEHVNNSYECDIPIGAGICASYQTQTNSPRRARSVASQSIIAYTMSLGAENSVAYSNNSIAICTNFTISVTTEILPVSMTKTSVDCTMYICGDSTECSNLLLQYGSFCTQLNRALTGIAVEQDKNTQEVFAQVKQIYKTPPIKDFGGFNFSQILPDSSKPSKRSFIEDLLFNKVTLADAGFIKQYGDCLGDIAARDLICAQKFNGLTVLPPLLTDEMIAQYTSALLAGTITSGWTFGAGAALQIPFAMQMAYRFNGIGVTQNVLYENQKLIANQFNSAIGKIQDSLSSTASALGKLQDVVNQNAQALNTLVKQLSSNFGAISSVLNDILSRLDKVEAEVQIDRLITGRLQSLQTYVTQQLIRAAEIRASANLAATKMSECVLGQSKRVDFCGKGYHLMSFPQSAPHGVVFLHVTYVCAQEKNFTTAPAICHDGKAHFPREGVFVSNGTHWFVTQRNFYEPQIITTDNTFVSGNCDVVIGIVNNTVYDPLQPELDSFKEELDKYFKNHTSPDVDLGDISGINASVVNIQKEIDRLNEVAKNLNESLIDLQELGKYEQYIKGGGSGGGQIYEGKLTAEGLRFGIVASRFNHALVDRLVEGAIDAIVRHGGREEDITLVRVPGSWEIPVAAGELARKEDIDAVIAIGVLIRGATPHFDYIASEVSKGLADLSLELRKPITFGVITADTLEQAIERAGTKHGNKGWEAALSAIEMANLFKSLR

SEQ ID NO: 4145 - protein, 1371 aa, Artificial Sequence
  SARS-CoV-2/Iceland/280/2020__EPI_ISL_417608 spike protein (1-1211)(P715C_P1069C) LumSynth construct
MFVFLVLLPLVSSQCVNLTTRTQLPPAYTNSFTRGVYYPDKVFRSSVLHSTQDLFLPFFSNVTWFHAIHVSGTNGTKRFDNPVLPFNDGVYFASTEKSNIIRGWIFGTTLDSKTQSLLIVNNATNVVIKVCEFQFCNDPFLGVYYHKNNKSWMESEFRVYSSANNCTFEYVSQPFLMDLEGKQGNFKNLREFVFKNIDGYFKIYSKHTPINLVRDLPQGFSALEPLVDLPIGINITRFQTLLALHRSYLTPGDSSSGWTAGAAAYYVGYLQPRTFLLKYNENGTITDAVDCALDPLSETKCTLKSFTVEKGIYQTSNFRVQPTESIVRFPNITNLCPFGEVFNATRFASVYAWNRKRISNCVADYSVLYNSASFSTFKCYGVSPTKLNDLCFTNVYADSFVIRGDEVRQIAPGQTGKIADYNYKLPDDFTGCVIAWNSNNLDSKVGGNYNYLYRLFRKSNLKPFERDISTEIYQAGSTPCNGVEGFNCYFPLQSYGFQPTNGVGYQPYRVVVLSFELLHAPATVCGPKKSTNLVKNKCVNFNFNGLTGTGVLTESNKKFLPFQQFGRDIADTTDAVRDPQTLEILDITPCSFGGVSVITPGTNTSNQVAVLYQGVNCTEVPVAIHADQLTPTWRVYSTGSNVFQTRAGCLIGAEHVNNSYECDIPIGAGICASYHTQTNSPRRARSVASQSIIAYTMSLGAENSVAYSNNSIAICTNFTISVTTEILPVSMTKTSVDCTMYICGDSTECSNLLLQYGSFCTQLNRALTGIAVEQDKNTQEVFAQVKQIYKTPPIKDFGGFNFSQILPDPSKPSKRSFIEDLLFNKVTLADAGFIKQYGDCLGDIAARDLICAQKFNGLTVLPPLLTDEMIAQYTSALLAGTITSGWTFGAGAALQIPFAMQMAYRFNGIGVTQNVLYENQKLIANQFNSAIGKIQDSLSSTASALGKLQDVVNQNAQALNTLVKQLSSNFGAISSVLNDILSRLDKVEAEVQIDRLITGRLQSLQTYVTQQLIRAAEIRASANLAATKMSECVLGQSKRVDFCGKGYHLMSFPQSAPHGVVFLHVTYVCAQEKNFTTAPAICHDGKAHFPREGVFVSNGTHWFVTQRNFYEPQIITTDNTFVSGNCDVVIGIVNNTVYDPLQPELDSFKEELDKYFKNHTSPDVDLGDISGINASVVNIQKEIDRLNEVAKNLNESLIDLQELGKYEQYIKGGGSGGGQIYEGKLTAEGLRFGIVASRFNHALVDRLVEGAIDAIVRHGGREEDITLVRVPGSWEIPVAAGELARKEDIDAVIAIGVLIRGATPHFDYIASEVSKGLADLSLELRKPITFGVITADTLEQAIERAGTKHGNKGWEAALSAIEMANLFKSLR

SEQ ID NO: 4146 - protein, 1371 aa, Artificial Sequence; identical to SEQ ID NO: 4101
  SARS-CoV-2/Iceland/247/2020__EPI_ISL_417575 spike protein (1-1211)(P715C_P1069C) LumSynth construct

SEQ ID NO: 4147 - protein, 1371 aa, Artificial Sequence
  SARS-CoV-2/Iceland/238/2020__EPI_ISL_417566 spike protein (1-1211)(P715C_P1069C) LumSynth construct
MFVFLVLLPLVSSQCVNLTTRTQLPPAYTNSFTRGVYYPDKVFRSSVLHSTQDLFLPFFSNVTWFHAIHVSGTNGTKRFDNPVLPFNDGVYFASTEKSNIIRGWIFGTTLDSKTQSLLIVNNATNVVIKVCEFQFCNDPFLGVYYHKNNKSWMESEFRVYSSANNCTFEYVSQPFLMDLEGKQGNFKNLREFVFKNIDGYFKIYSKHTPINLVRDLPQGFSALEPLVDLPIGINITRFQTLLALHRSYLTPGDSSSGWTAGAAAYYVGYLQPRTFLLKYNENGTITDAVDCALDPLSETKCTLKSFTVEKGIYQTSNFRVQPTESIVRFPNITNLCPFGEVFNATRFASVYAWNRKRISNCVADYSVLYNSASFSTFKCYGVSPTKLNDLCFTNVYADSFVIRGDEVRQIAPGQTGKIADYNYKLPDDFTGCVIAWNSNNLDSKVGGNYNYLYRLFRKSNLKPFERDISTEIYQAGSTPCNGVEGFNCYFPLQSYGFQPTNGVGYQPYRVVVLSFELLHAPATVCGPKKSTNLVKNKCVNFNFNGLTGTGVLTESNKKFLPFQQFGRDIADTTDAVRDPQTLEILDITPCSFGGVSVITPGTNTSNQVAVLYQGVNCTEVPVAIHADQLTPTWRVYSTGSNVFQTRAGCLIGAEHVNNSYECDIPIGAGICASYQTQTNSPRRARSVASQSIIAYTMSLGAENSVAYSNNSIAICTNFTISVTTEILPVSMTKTSVDCTMYICGDSTECSNLLLQYGSFCTQLNRALTGIAVEQDKNTQEVFAQVKQIYKTPPIKDFGGFNFSQILPDPSKPSKRSFIEDLLFNKVTLADVGFIKQYGDCLGDIAARDLICAQKFNGLTVLPPLLTDEMIAQYTSALLAGTITSGWTFGAGAALQIPFAMQMAYRFNGIGVTQNVLYENQKLIANQFNSAIGKIQDSLSSTASALGKLQDVVNQNAQALNTLVKQLSSNFGAISSVLNDILSRLDKVEAEVQIDRLITGRLQSLQTYVTQQLIRAAEIRASANLAATKMSECVLGQSKRVDFCGKGYHLMSFPQSAPHGVVFLHVTYVCAQEKNFTTAPAICHDGKAHFPREGVFVSNGTHWFVTQRNFYEPQIITTDNTFVSGNCDVVIGIVNNTVYDPLQPELDSFKEELDKYFKNHTSPDVDLGDISGINASVVNIQKEIDRLNEVAKNLNESLIDLQELGKYEQYIKGGGSGGGQIYEGKLTAEGLRFGIVASRFNHALVDRLVEGAIDAIVRHGGREEDITLVRVPGSWEIPVAAGELARKEDIDAVIAIGVLIRGATPHFDYIASEVSKGLADLSLELRKPITFGVITADTLEQAIERAGTKHGNKGWEAALSAIEMANLFKSLR

SEQ ID NO: 4148 - protein, 1371 aa, Artificial Sequence
  SARS-CoV-2/Greece/16/2020__EPI_ISL_418265 spike protein (1-1211)(P715C_P1069C) LumSynth construct
MFVFLVLLPLVSSQCVNLTTRTQLPPAYTNSFTRGVYYPDKVFRSSVLHSTQDLFLPFFSNVTWFHAIHVSGTNGTKRFDNPVLPFNDGVYFASTEKSNIIRGWIFGTTLDSKTQSLLIVNNATNVVIKVCEFQFCNDPFLGVYYHKNNKSWMESEFRVYSSANNCTFEYVSQPFLMDLEGKQGNFKNLREFVFKNVDGYFKIYSKHTPINLVRDLPQGFSALEPLVDLPIGINITRFQTLLALHRSYLTPGDSSSGWTAGAAAYYVGYLQPRTFLLKYNENGTITDAVDCALDPLSETKCTLKSFTVEKGIYQTSNFRVQPTESIVRFPNITNLCPFGEVFNATRFASVYAWNRKRISNCVADYSVLYNSASFSTFKCYGVSPTKLNDLCFTNVYADSFVIRGDEVRQIAPGQTGKIADYNYKLPDDFTGCVIAWNSNNLDSKVGGNYNYLYRLFRKSNLKPFERDISTEIYQAGSTPCNGVEGFNCYFPLQSYGFQPTNGVGYQPYRVVVLSFELLHAPATVCGPKKSTNLVKNKCVNFNFNGLTGTGVLTESNKKFLPFQQFGRDIADTTDAVRDPQTLEILDITPCSFGGVSVITPGTNTSNQVAVLYQDVNCTEVPVAIHADQLTPTWRVYSTGSNVFQTRAGCLIGAEHVNNSYECDIPIGAGICASYQTQTNSPRRARSVASQSIIAYTMSLGAENSVAYSNNSIAICTNFTISVTTEILPVSMTKTSVDCTMYICGDSTECSNLLLQYGSFCTQLNRALTGIAVEQDKNTQEVFAQVKQIYKTPPIKDFGGFNFSQILPDPSKPSKRSFIEDLLFNKVTLADAGFIKQYGDCLGDIAARDLICAQKFNGLTVLPPLLTDEMIAQYTSALLAGTITSGWTFGAGAALQIPFAMQMAYRFNGIGVTQNVLYENQKLIANQFNSAIGKIQDSLSSTASALGKLQDVVNQNAQALNTLVKQLSSNFGAISSVLNDILSRLDKVEAEVQIDRLITGRLQSLQTYVTQQLIRAAEIRASANLAATKMSECVLGQSKRVDFCGKGYHLMSFPQSAPHGVVFLHVTYVCAQEKNFTTAPAICHDGKAHFPREGVFVSNGTHWFVTQRNFYEPQIITTDNTFVSGNCDVVIGIVNNTVYDPLQPELDSFKEELDKYFKNHTSPDVDLGDISGINASVVNIQKEIDRLNEVAKNLNESLIDLQELGKYEQYIKGGGSGGGQIYEGKLTAEGLRFGIVASRFNHALVDRLVEGAIDAIVRHGGREEDITLVRVPGSWEIPVAAGELARKEDIDAVIAIGVLIRGATPHFDYIASEVSKGLADLSLELRKPITFGVITADTLEQAIERAGTKHGNKGWEAALSAIEMANLFKSLR

SEQ ID NO: 4149 - protein, 1371 aa, Artificial Sequence
  SARS-CoV-2/Iceland/319/2020__EPI_ISL_417648 spike protein (1-1211)(P715C_P1069C) LumSynth construct
MFVFLVLLPLVSSQCVNLTTRTQLPPAYTNSFTRGVYYPDKVFRSSVLHSTQDLFLPFFSNVTWFHAIHVSGTNGTKRFDNPVLPFNDGVYFASTEKSNIIRGWIFGTTLDSKTQSLLIVNNATNVVIKVCEFQFCNDPFLGVYYHKNNKSWMESEFRVYSSANNCTFEYVSQPFLIDLEGKQGNFKNLREFVFKNIDGYFKIYSKHTPINLVRDLPQGFSALEPLVDLPIGINITRFQTLLALHRSYLTPGDSSSGWTAGAAAYYVGYLQPRTFLLKYNENGTITDAVDCALDPLSETKCTLKSFTVEKGIYQTSNFRVQPTESIVRFPNITNLCPFGEVFNATRFASVYAWNRKRISNCVADYSVLYNSASFSTFKCYGVSPTKLNDLCFTNVYADSFVIRGDEVRQIAPGQTGKIADYNYKLPDDFTGCVIAWNSNNLDSKVGGNYNYLYRLFRKSNLKPFERDISTEIYQAGSTPCNGVEGFNCYFPLQSYGFQPTNGVGYQPYRVVVLSFELLHAPATVCGPKKSTNLVKNKCVNFNFNGLTGTGVLTESNKKFLPFQQFGRDIADTTDAVRDPQTLEILDITPCSFGGVSVITPGTNTSNQVAVLYQGVNCTEVPVAIHADQLTPTWRVYSTGSNVFQTRAGCLIGAEHVNNSYECDIPIGAGICASYQTQTNSPRRARSVASQSIIAYTMSLGAENSVAYSNNSIAICTNFTISVTTEILPVSMTKTSVDCTMYICGDSTECSNLLLQYGSFCTQLNRALTGIAVEQDKNTQEVFAQVKQIYKTPPIKDFGGFNFSQILPDPSKPSKRSFIEDLLFNKVTLADAGFIKQYGDCLGDIAARDLICAQKFNGLTVLPPLLTDEMIAQYTSALLAGTITSGWTFGAGAALQIPFAMQMAYRFNGIGVTQNVLYENQKLIANQFNSAIGKIQDSLSSTASALGKLQDVVNQNAQALNTLVKQLSSNFGAISSVLNDILSRLDKVEAEVQIDRLITGRLQSLQTYVTQQLIRAAEIRASANLAATKMSECVLGQSKRVDFCGKGYHLMSFPQSAPHGVVFLHVTYVCAQEKNFTTAPAICHDGKAHFPREGVFVSNGTHWFVTQRNFYEPQIITTDNTFVSGNCDVVIGIVNNTVYDPLQPELDSFKEELDKYFKNHTSPDVDLGDISGINASVVNIQKEIDRLNEVAKNLNESLIDLQELGKYEQYIKGGGSGGGQIYEGKLTAEGLRFGIVASRFNHALVDRLVEGAIDAIVRHGGREEDITLVRVPGSWEIPVAAGELARKEDIDAVIAIGVLIRGATPHFDYIASEVSKGLADLSLELRKPITFGVITADTLEQAIERAGTKHGNKGWEAALSAIEMANLFKSLR

SEQ ID NO: 4150 - protein, 1371 aa, Artificial Sequence
  SARS-CoV-2/Congo/94/2020__EPI_ISL_417947 spike protein (1-1211)(P715C_P1069C) LumSynth construct
MFVFLVLLPLVSSQCVNLTTRTQLPPAYTNSFTRGVYYPDKVFRSSVLHSTQDLFLPFFSNVTWFHAIHVSGTNGTKRFDNPVLPFNDGVYFASTEKSNIIRGWIFGTTLDSKTQSLLIVNNATNVVIKVCEFQFCNDPFLGVYYHKNNKSWMESEFRVYSSANNCTFEYVSQPFLMDLEGKQGNFKNLREFVFKNIDGYFKIYSKHTPINLVRDLPQGFSALEPLVDLPIGINITRFQTLLALHRSYLTPGDSSSGWTAGAAAYYVGYLQPRTFLLKYNENGTITDAVDCALDPLSETKCTLKSFTVEKGIYQTSNFRVQPTESIVRFPNITNLCPFGEVFNATRFASVYAWNRKRISNCVADYSVLYNSASFSTFKCYGVSPTKLNDLCFTNVYADSFVIRGDEVRQIAPGQTGKIADYNYKLPDDFTGCVIAWNSNNLDSKVGGNYNYLYRLFRKSNLKPFERDISTEIYQAGSTPCNGVEGFNCYFPLQSYGFQPTNGVGYQPYRVVVLSFELLHAPATVCGPKKSTNLVKNKCVNFNFNGLTGTGVLTESNKKFLPFQQFGRDIADTTDAVRDPQTLEILDITPCSFGGVSVITPGTNTSNQVAVLYQGVNCTEVPVAIHADQLTPTWRVYSTGSNVFQTRAGCLIGAEHVNNSYECDIPIGAGICASYQTQTNSPRRARSVASQSIIAYTMSLGAENSVAYSNNSIAICTNFTISVTTEILPVSMTKTSVDCTMYICGDSTECSNLLLQYGSFCTQLNRALTGIAVEQDKNTQEVFAQVKQIYKTPPIKDFGGFNFSQILPDPSKPSKRSFIEDILFNKVTLADAGFIKQYGDCLGDIAARDLICAQKFNGLTVLPPLLTDEMIAQYTSALLAGTITSGWTFGAGAALQIPFAMQMAYRFNGIGVTQNVLYENQKLIANQFNSAIGKIQDSLSSTASALGKLQDVVNQNAQALNTLVKQLSSNFGAISSVLNDILSRLDKVEAEVQIDRLITGRLQSLQTYVTQQLIRAAEIRASANLAATKMSECVLGQSKRVDFCGKGYHLMSFPQSAPHGVVFLHVTYVCAQEKNFTTAPAICHDGKAHFPREGVFVSNGTHWFVTQRNFYEPQIITTDNTFVSGNCDVVIGIVNNTVYDPLQPELDSFKEELDKYFKNHTSPDVDLGDISGINASVVNIQKEIDRLNEVAKNLNESLIDLQELGKYEQYIKGGGSGGGQIYEGKLTAEGLRFGIVASRFNHALVDRLVEGAIDAIVRHGGREEDITLVRVPGSWEIPVAAGELARKEDIDAVIAIGVLIRGATPHFDYIASEVSKGLADLSLELRKPITFGVITADTLEQAIERAGTKHGNKGWEAALSAIEMANLFKSLR

SEQ ID NO: 4151 - protein, 1371 aa, Artificial Sequence
  SARS-CoV-2/Congo/158/2020__EPI_ISL_417950 spike protein (1-1211)(P715C_P1069C) LumSynth construct
MFVFLVLLPLVSSQCVNLTTRTQLPPAYTNSFTRGVYYPDKVFRSSVLHSTQDLFLPFFSNVTWFHAIHVSGTNGTKRFDNPVLPFNDGVYFASTEKSNIIRGWIFGTTLDSKTQSLLIVNNATNVVIKVCEFQFCNDPFLGVYYHKNNKSWMESEFRVYSSANNCTFEYVSQPFLMDLEGKQGNFKNLREFVFKNIDGYFKIYSKHTPINLVRDLPQGFSALEPLVDLPIGINITRFQTLLALHRSYLTPGDSSSGWTAGAAAYYVGYLQPRTFLLKYNENGTITDAVDCALDPLSETKCTLKSFTVEKGIYQTSNFRVQPTESIVRFPNITNLCPFGEVFNATRFASVYAWNRKRISNCVADYSVLYNSASFSTFKCYGVSPTKLNDLCFTNVYADSFVIRGDEVRQIAPGQTGKIADYNYKLPDDFTGCVIAWNSNNLDSKVGGNYNYLYRLFRKSNLKPFERDISTEIYQAGSTPCNGVEGFNCYFPLQSYGFQPTNGVGYQPYRVVVLSFELLHAPATVCGPKKSTNLVKNKCVNFNFNGLTGTGVLTESNKKFLPFQQFGRDIADTTDAVRDPQTLEILDITPCSFGGVSVITPGTNTSNQVAVLYQDVNCTEVPVAIHADQLTPTWRVYSTGSNVFQTRAGCLIGAEHVNNSYECDIPIGAGICASYQTQTNSPRRARSVASQSIIAYTMSLGAENSVAYSNNSIAICTNFTISVTTEILPVSMTKTSVDCTMYICGDSTECSNLLLQYGSFCTQLNRALTGIAVEQDKNTQEVFAQVKQIYKTPPIKDFGGFNFSQILPDPSKPSKRSFIEDLLFNKVTLADAGFIKQYGDCLGDIAARDLICAQKFNGLTVLPPLLTDEMIAQYTSALLAGTITSGWTFGAGAALQIPFAMQMAYRFNGIGVTQNVLYENQKLIANQFNSAIGKIQDSLSSTASALGKLQDVVNQNAQALNTLVKQLSSNFGAISSVLNDILSRLDKVEAEVQIDRLITGRLQSLQTYVTQQLIRAAEIRASANLAATKMSECVLGQSKRVDFCGKGYHLMSFPQSAPHGVVFLHVTYVCAQEKNFTTAPAICHDGKAHFPREGVFVSNGTHWFVTQRNFYEPQIITTDNTFLSGNCDVVIGIVNNTVYDPLQPELDSFKEELDKYFKNHTSPDVDLGDISGINASVVNIQKEIDRLNEVAKNLNESLIDLQELGKYEQYIKGGGSGGGQIYEGKLTAEGLRFGIVASRFNHALVDRLVEGAIDAIVRHGGREEDITLVRVPGSWEIPVAAGELARKEDIDAVIAIGVLIRGATPHFDYIASEVSKGLADLSLELRKPITFGVITADTLEQAIERAGTKHGNKGWEAALSAIEMANLFKSLR

SEQ ID NO: 4152 - protein, 1371 aa, Artificial Sequence
  SARS-CoV-2/USA/UT-00034/2020__EPI_ISL_417977 spike protein (1-1211)(P715C_P1069C) LumSynth construct
MFVFLVLLPLVSSQCVNLTTRTQLPPAYTNSFTRGVYYPDKVFRSSVLHSTQDLFLPFFSNVTWFHAIHVSGTNGTKRFDNPVLPFNDGVYFASTEKSNIIRGWIFGTTLDSKTQSLLIVNNATNVVIKVCEFQFCNDPFLGVYYYKNNKSWMESEFRVYSSANNCTFEYVSQPFLMDLEGKQGNFKNLREFVFKNIDGYFKIYSKHTPINLVRDLPQGFSALEPLVDLPIGINITRFQTLLALHRSYLTPGDSSSGWTAGAAAYYVGYLQPRTFLLKYNENGTITDAVDCALDPLSETKCTLKSFTVEKGIYQTSNFRVQPTESIVRFPNITNLCPFGEVFNATRFASVYAWNRKRISNCVADYSVLYNSASFSTFKCYGVSPTKLNDLCFTNVYADSFVIRGDEVRQIAPGQTGKIADYNYKLPDDFTGCVIAWNSNNLDSKVGGNYNYLYRLFRKSNLKPFERDISTEIYQAGSTPCNGVEGFNCYFPLQSYGFQPTNGVGYQPYRVVVLSFELLHAPATVCGPKKSTNLVKNKCVNFNFNGLTGTGVLTESNKKFLPFQQFGRDIADTTDAVRDPQTLEILDITPCSFGGVSVITPGTNTSNQVAVLYQGVNCTEVPVAIHADQLTPTWRVYSTGSNVFQTRAGCLIGAEHVNNSYECDIPIGAGICASYQTQTNSPRRARSVASQSIIAYTMSLGAENSVAYSNNSIAICTNFTISVTTEILPVSMTKTSVDCTMYICGDSTECSNLLLQYGSFCTQLNRALTGIAVEQDKNTQEVFAQVKQIYKTPPIKDFGGFNFSQILPDPSKPSKRSFIEDLLFNKVTLADAGFIKQYGDCLGDIAARDLICAQKFNGLTVLPPLLTDEMIAQYTSALLAGTITSGWTFGAGAALQIPFAMQMAYRFNGIGVTQNVLYENQKLIANQFNSAIGKIQDSLSSTASALGKLQDVVNQNAQALNTLVKQLSSNFGAISSVLNDILSRLDKVEAEVQIDRLITGRLQSLQTYVTQQLIRAAEIRASANLAATKMSECVLGQSKRVDFCGKGYHLMSFPQSAPHGVVFLHVTYVCAQEKNFTTAPAICHDGKAHFPREGVFVSNGTHWFVTQRNFYEPQIITTDNTFVSGNCDVVIGIVNNTVYDPLQPELDSFKEELDKYFKNHTSPDVDLGDISGINASVVNIQKEIDRLNEVAKNLNESLIDLQELGKYEQYIKGGGSGGGQIYEGKLTAEGLRFGIVASRFNHALVDRLVEGAIDAIVRHGGREEDITLVRVPGSWEIPVAAGELARKEDIDAVIAIGVLIRGATPHFDYIASEVSKGLADLSLELRKPITFGVITADTLEQAIERAGTKHGNKGWEAALSAIEMANLFKSLR

SEQ ID NO: 4153 - protein, 1371 aa, Artificial Sequence
  SARS-CoV-2/USA/UT-00033/2020__EPI_ISL_417976 spike protein (1-1211)(P715C_P1069C) LumSynth construct
MFVFLVLLPLVSSQCVNLTTRTQLPPAYTNSFTRGVYYPDKVFRSSVLHSTQDLFLPFFSNVTWFHAIHVSGTNGTKRFDNPVLPFNDGVYFASTEKSNIIRGWIFGTTLDSKTQSLLIVNNATNVVIKVCEFQFCNDPFLGVYYHKNNKSWMESEFRVYSSANNCTFEYVSQPFLMDLEGKQGNFKNLREFVFKNIDGYFKIYSKHTPINLVRDLPQGFSALEPLVDLPIGINITRFQTLLALHRSYLTPGDSSSGLTAGAAAYYVGYLQPRTFLLKYNENGTITDAVDCALDPLSETKCTLKSFTVEKGIYQTSNFRVQPTESIVRFPNITNLCPFGEVFNATRFASVYAWNRKRISNCVADYSVLYNSASFSTFKCYGVSPTKLNDLCFTNVYADSFVIRGDEVRQIAPGQTGKIADYNYKLPDDFTGCVIAWNSNNLDSKVGGNYNYLYRLFRKSNLKPFERDISTEIYQAGSTPCNGVEGFNCYFPLQSYGFQPTNGVGYQPYRVVVLSFELLHAPATVCGPKKSTNLVKNKCVNFNFNGLTGTGVLTESNKKFLPFQQFGRDIADTTDAVRDPQTLEILDITPCSFGGVSVITPGTNTSNQVAVLYQGVNCTEVPVAIHADQLTPTWRVYSTGSNVFQTRAGCLIGAEHVNNSYECDIPIGAGICASYQTQTNSPRRARSVASQSIIAYTMSLGAENSVAYSNNSIAICTNFTISVTTEILPVSMTKTSVDCTMYICGDSTECSNLLLQYGSFCTQLNRALTGIAVEQDKNTQEVFAQVKQIYKTPPIKDFGGFNFSQILPDPSKPSKRSFIEDLLFNKVTLADAGFIKQYGDCLGDIAARDLICAQKFNGLTVLPPLLTDEMIAQYTSALLAGTITSGWTFGAGAALQIPFAMQMAYRFNGIGVTQNVLYENQKLIANQFNSAIGKIQDSLSSTASALGKLQDVVNQNAQALNTLVKQLSSNFGAISSVLNDILSRLDKVEAEVQIDRLITGRLQSLQTYVTQQLIRAAEIRASANLAATKMSECVLGQSKRVDFCGKGYHLMSFPQSAPHGVVFLHVTYVCAQEKNFTTAPAICHDGKAHFPREGVFVSNGTHWFVTQRNFYEPQIITTDNTFVSGNCDVVIGIVNNTVYDPLQPELDSFKEELDKYFKNHTSPDVDLGDISGINASVVNIQKEIDRLNEVAKNLNESLIDLQELGKYEQYIKGGGSGGGQIYEGKLTAEGLRFGIVASRFNHALVDRLVEGAIDAIVRHGGREEDITLVRVPGSWEIPVAAGELARKEDIDAVIAIGVLIRGATPHFDYIASEVSKGLADLSLELRKPITFGVITADTLEQAIERAGTKHGNKGWEAALSAIEMANLFKSLR

SEQ ID NO: 4154 - protein, 1371 aa, Artificial Sequence
  SARS-CoV-2/USA/WI-13/2020__EPI_ISL_417516 spike protein (1-1211)(P715C_P1069C) LumSynth construct
MFVFLVLLPLVSSQCVNLTTRTQLPPAYTNSFTRGVYYPDKVFRSSVLHSTQDLFLPFFSNVTWFHAIHVSGTNGTKRFDNPVLPFNDGVYFASTEKSNIIRGWIFGTTLDSKTQSLLIVNNATNVVIKVCEFQFCNDPFLGVYYHKNNKSWMESEFRVYSSANNCTFEYVSQPFLMDLEGKQGNFKNLREFVFKNIDGYFKIYSKHTPINLVRDLPQGFSALEPLVDLPIGINITRFQTLLALHRSYLTPGDSSSGWTAGAAAYYVGYLQPRTFLLKYNENGTITDAVDCALDPLSETKCTLKSFTVEKGIYQTSNFRVLPTESIVRFPNITNLCPFGEVFNATRFASVYAWNRKRISNCVADYSVLYNSASFSTFKCYGVSPTKLNDLCFTNVYADSFVIRGDEVRQIAPGQTGKIADYNYKLPDDFTGCVIAWNSNNLDSKVGGNYNYLYRLFRKSNLKPFERDISTEIYQAGSTPCNGVEGFNCYFPLQSYGFQPTNGVGYQPYRVVVLSFELLHAPATVCGPKKSTNLVKNKCVNFNFNGLTGTGVLTESNKKFLPFQQFGRDIADTTDAVRDPQTLEILDITPCSFGGVSVITPGTNTSNQVAVLYQGVNCTEVPVAIHADQLTPTWRVYSTGSNVFQTRAGCLIGAEHVNNSYECDIPIGAGICASYQTQTNSPRRARSVASQSIIAYTMSLGAENSVAYSNNSIAICTNFTISVTTEILPVSMTKTSVDCTMYICGDSTECSNLLLQYGSFCTQLNRALTGIAVEQDKNTQEVFAQVKQIYKTPPIKDFGGFNFSQILPDPSKPSKRSFIEDLLFNKVTLADAGFIKQYGDCLGDIAARDLICAQKFNGLTVLPPLLTDEMIAQYTSALLAGTITSGWTFGAGAALQIPFAMQMAYRFNGIGVTQNVLYENQKLIANQFNSAIGKIQDSLSSTASALGKLQDVVNQNAQALNTLVKQLSSNFGAISSVLNDILSRLDKVEAEVQIDRLITGRLQSLQTYVTQQLIRAAEIRASANLAATKMSECVLGQSKRVDFCGKGYHLMSFPQSAPHGVVFLHVTYVCAQEKNFTTAPAICHDGKAHFPREGVFVSNGTHWFVTQRNFYEPQIITTDNTFVSGNCDVVIGIVNNTVYDPLQPELDSFKEELDKYFKNHTSPDVDLGDISGINASVVNIQKEIDRLNEVAKNLNESLIDLQELGKYEQYIKGGGSGGGQIYEGKLTAEGLRFGIVASRFNHALVDRLVEGAIDAIVRHGGREEDITLVRVPGSWEIPVAAGELARKEDIDAVIAIGVLIRGATPHFDYIASEVSKGLADLSLELRKPITFGVITADTLEQAIERAGTKHGNKGWEAALSAIEMANLFKSLR

SEQ ID NO: 4155 - protein, 1370 aa, Artificial Sequence
  SARS-CoV-2/India/1-27/2020__EPI_ISL_413522 spike protein (1-1210)(P714C_P1068C) LumSynth construct
MFVFLVLLPLVSSQCVNLTTRTQLPPAYTNSFTRGVYYPDKVFRSSVLHSTQDLFLPFFSNVTWFHAIHVSGTNGTKRFDNPVLPFNDGVYFASTEKSNIIRGWIFGTTLDSKTQSLLIVNNATNVVIKVCEFQFCNDPFLGVYHKNNKSWMESEFRVYSSANNCTFEYVSQPFLMDLEGKQGNFKNLREFVFKNIDGYFKIYSKHTPINLVRDLPQGFSALEPLVDLPIGINITRFQTLLALHRSYLTPGDSSSGWTAGAAAYYVGYLQPRTFLLKYNENGTITDAVDCALDPLSETKCTLKSFTVEKGIYQTSNFRVQPTESIVRFPNITNLCPFGEVFNATRFASVYAWNRKRISNCVADYSVLYNSASFSTFKCYGVSPTKLNDLCFTNVYADSFVIRGDEVIQIAPGQTGKIADYNYKLPDDFTGCVIAWNSNNLDSKVGGNYNYLYRLFRKSNLKPFERDISTEIYQAGSTPCNGVEGFNCYFPLQSYGFQPTNGVGYQPYRVVVLSFELLHAPATVCGPKKSTNLVKNKCVNFNFNGLTGTGVLTESNKKFLPFQQFGRDIADTTDAVRDPQTLEILDITPCSFGGVSVITPGTNTSNQVAVLYQDVNCTEVPVAIHADQLTPTWRVYSTGSNVFQTRAGCLIGAEHVNNSYECDIPIGAGICASYQTQTNSPRRARSVASQSIIAYTMSLGAENSVAYSNNSIAICTNFTISVTTEILPVSMTKTSVDCTMYICGDSTECSNLLLQYGSFCTQLNRALTGIAVEQDKNTQEVFAQVKQIYKTPPIKDFGGFNFSQILPDPSKPSKRSFIEDLLFNKVTLADAGFIKQYGDCLGDIAARDLICAQKFNGLTVLPPLLTDEMIAQYTSALLAGTITSGWTFGAGAALQIPFAMQMAYRFNGIGVTQNVLYENQKLIANQFNSAIGKIQDSLSSTASALGKLQDVVNQNAQALNTLVKQLSSNFGAISSVLNDILSRLDKVEAEVQIDRLITGRLQSLQTYVTQQLIRAAEIRASANLAATKMSECVLGQSKRVDFCGKGYHLMSFPQSAPHGVVFLHVTYVCAQEKNFTTAPAICHDGKAHFPREGVFVSNGTHWFVTQRNFYEPQIITTDNTFVSGNCDVVIGIVNNTVYDPLQPELDSFKEELDKYFKNHTSPDVDLGDISGINASVVNIQKEIDRLNEVAKNLNESLIDLQELGKYEQYIKGGGSGGGQIYEGKLTAEGLRFGIVASRFNHALVDRLVEGAIDAIVRHGGREEDITLVRVPGSWEIPVAAGELARKEDIDAVIAIGVLIRGATPHFDYIASEVSKGLADLSLELRKPITFGVITADTLEQAIERAGTKHGNKGWEAALSAIEMANLFKSLR

SEQ ID NO: 4156 - protein, 1365 aa, Artificial Sequence
  SARS-CoV-2/pangolin/Guangxi/P4L/2017__EPI_ISL_410538 spike protein (1-1205)(P709C_P1063C) LumSynth construct
MFVFLFVLPLVSSQCVNLTTRTGIPPGYTNSSTRGVYYPDKVFRSSILHLTQDLFLPFFSNVTWFNTINYQGGFKKFDNPVLPFNDGVYFASTEKSNIIRGWIFGTTLDARTQSLLIVNNATNVVIKVCEFQFCTDPFLGVYYHNNNKTWVENEFRVYSSANNCTFEYISQPFLMDLEGKQGNFKNLREFVFKNVDGYFKIYSKHTPIDLVRDLPRGFAALEPLVDLPIGINITRFQTLLALHRSYLTPGNLESGWTTGAAAYYVGYLQQRTFLLSYNQNGTITDAVDCSLDPLSETKCTLKSLTVEKGIYQTSNFRVQPTISIVRFPNITNLCPFGEVFNASKFASVYAWNRKRISNCVADYSVLYNSTSFSTFKCYGVSPTKLNDLCFTNVYADSFVVKGDEVRQIAPGQTGVIADYNYKLPDDFTGCVIAWNSVKQDALTGGNYGYLYRLFRKSKLKPFERDISTEIYQAGSTPCNGQVGLNCYYPLERYGFHPTTGVNYQPFRVVVLSFELLNGPATVCGPKLSTTLVKDKCVNFNFNGLTGTGVLTTSKKQFLPFQQFGRDISDTTDAVRDPQTLEILDITPCSFGGVSVITPGTNTSNQVAVLYQDVNCTEVPMAIHAEQLTPAWRVYSAGANVFQTRAGCLVGAEHVNNSYECDIPVGAGICASYHSMSSLRSVNQRSIIAYTMSLGAENSVAYSNNSIAICTNFTISVTTEILPVSMTKTSVDCTMYICGDSIECSNLLLQYGSFCTQLNRALTGIAVEQDKNTQEVFAQVKQIYKTPPIKDFGGFNFSQILPDPSKPSKRSFIEDLLFNKVTLADAGFIKQYGDCLGDIAARDLICAQKFNGLTVLPPLLTDEMIAQYTSALLAGTITSGWTFGAGAALQIPFAMQMAYRFNGIGVTQNVLYENQKLIANQFNSAIGKIQDSLSSTASALGKLQDVVNQNAQALNTLVKQLSSNFGAISSVLNDILSRLDKVEAEVQIDRLITGRLQSLQTYVTQQLIRAAEIRASANLAATKMSECVLGQSKRVDFCGKGYHLMSFPQSAPHGVVFLHVTYVCAQEKNFTTAPAICHEGKAHFPREGVFVSNGTHWFITQRNFYEPQIITTDNTFVSGSCDVVIGIVNNTVYDPLQPELDSFKEELDKYFKNHTSPDVDLGDISGINASVVNIQKEIDRLNEVAKNLNESPIDLQELGKYEQYIKGGGSGGGQIYEGKLTAEGLRFGIVASRFNHALVDRLVEGAIDAIVRHGGREEDITLVRVPGSWEIPVAAGELARKEDIDAVIAIGVLIRGATPHFDYIASEVSKGLADLSLELRKPITFGVITADTLEQAIERAGTKHGNKGWEAALSAIEMANLFKSLR

SEQ ID NO: 4157 - protein, 1365 aa, Artificial Sequence
  SARS-CoV-2/pangolin/Guangxi/P5L/2017__EPI_ISL_410540 spike protein (1-1205)(P709C_P1063C) LumSynth construct
MFVFLFVLPLVSSQCVNLTTRTGIPPGYTNSSTRGVYYPDKVFRSSILHLTQDLFLPFFSNVTWFNTINYQGGFKKFDNPVLPFNDGVYFASTEKSNIIRGWIFGTTLDARTQSLLIVNNATNVVIKVCEFQFCTDPFLGVYYHNNNKTWVENEFRVYSSANNCTFEYISQPFLMDLEGKQGNFKNLREFVFKNVDGYFKIYSKHTPIDLVRDLPRGFAALEPLVDLPIGINITRFQTLLALHRSYLTPGKLESGWTTGAAAYYVGYLQQRTFLLSYNQNGTITDAVDCSLDPLSETKCTLKSLTVEKGIYQTSNFRVQPTISIVRFPNITNLCPFGEVFNASKFASVYAWNRKRISNCVADYSVLYNSTSFSTFKCYGVSPTKLNDLCFTNVYADSFVVKGDEVRQIAPGQTGVIADYNYKLPDDFTGCVIAWNSVKQDALTGGNYGYLYRLFRKSKLKPFERDISTEIYQAGSTPCNGQVGLNCYYPLERYGFHPTTGVNYQPFRVVVLSFELLNGPATVCGPKLSTTLVKDKCVNFNFNGLTGTGVLTTSKKQFLPFQQFGRDISDTTDAVRDPQTLEILDITPCSFGGVSVITPGTNTSNQVAVLYQDVNCTEVPMAIHAEQLTPAWRVYSAGANVFQTRAGCLVGAEHVNNSYECDIPVGAGICASYHSMSSFRSVNQRSIIAYTMSLGAENSVAYSNNSIAICTNFTISVTTEILPVSMTKTSVDCTMYICGDSIECSNLLLQYGSFCTQLNRALTGIAVEQDKNTQEVFAQVKQIYKTPPIKDFGGFNFSQILPDPSKPSKRSFIEDLLFNKVTLADAGFIKQYGDCLGDIAARDLICAQKFNGLTVLPPLLTDEMIAQYTSALLAGTITSGWTFGAGAALQIPFAMQMAYRFNGIGVTQNVLYENQKLIANQFNSAIGKIQDSLSSTASALGKLQDVVNQNAQALNTLVKQLSSNFGAISSVLNDILSRLDKVEAEVQIDRLITGRLQSLQTYVTQQLIRAAEIRASANLAATKMSECVLGQSKRVDFCGKGYHLMSFPQSAPHGVVFLHVTYVCAQEKNFTTAPAICHEGKAHFPREGVFVSNGTHWFITQRNFYEPQIITTDNTFVSGSCDVVIGIVNNTVYDPLQPELDSFKEELDKYFKNHTSPDVDLGDISGINASVVNIQKEIDRLNEVAKNLNESLIDLQELGKYEQYIKGGGSGGGQIYEGKLTAEGLRFGIVASRFNHALVDRLVEGAIDAIVRHGGREEDITLVRVPGSWEIPVAAGELARKEDIDAVIAIGVLIRGATPHFDYIASEVSKGLADLSLELRKPITFGVITADTLEQAIERAGTKHGNKGWEAALSAIEMANLFKSLR

SEQ ID NO: 4158 - protein, 1365 aa, Artificial Sequence
  SARS-CoV-2/pangolin/Guangxi/P5E/2017__EPI_ISL_410541 spike protein (1-1205)(P709C_P1063C) LumSynth construct
MFVFLFVLPLVSSQCVNLTTRTGIPPGYTNSSTRGVYYPDKVFRSSILHLTQDLFLPFFSNVTWFNTITYQGGSKKFDNPVLPFNDGVYFASTEKSNIIRGWIFGTTLDARTQSLLIVNNATNVVIKVCEFQFCTDPFLGVYYHNNNKTWVENEFRVYSSANNCTFEYISQPFLMDLEGKQGNFKNLREFVFKNVDGYFKIYSKHTPIDLVRDLPRGFAALEPLVDLPIGINITRFQTLLALHRSYLTPGKLESGWTTGAAAYYVGYLQQRTFLLSYNQNGTITDAVDCSLDPLSETKCTLKSLTVEKGIYQTSNFRVQPTISIVRFPNITNLCPFGEVFNASKFASVYAWNRKRISNCVADYSVLYNSTSFSTFKCYGVSPTKLNDLCFTNVYADSFVVKGDEVRQIAPGQTGVIADYNYKLPDDFTGCVIAWNSVKQDALTGDNYGYLYRLFRKSKLKPFERDISTEIYQAGSTPCNGQVGLNCYYPLERYGFHPTTGVNYQPFRVVVLSFELLNGPATVCGPKLSTTLVKDKCVNFNFNGLTGTGVLTTSKKQFLPFQQFGRDISDTTDAVRDPQTLEILDITPCSFGGVSVITPGTNTSNQVAVLYQDVNCTEVPMAIHAEQLTPAWRVYSAGANVFQTRAGCLVGAEHVNNSYECDIPVGAGICASYHSMSSFRSVNQRSIIAYTMSLGAENSVAYSNNSIAICTNFTISVTTEILPVSMTKTSVDCTMYICGDSIECSNLLLQYGSFCTQLNRALTGIAVEQDKNTQEVFAQVKQIYKTPPIKDFGGFNFSQILPDPSKPSKRSFIEDLLFNKVTLADAGFIKQYGDCLGDIAARDLICAQKFNGLTVLPPLLTDEMIAQYTSALLAGTITSGWTFGAGAALQIPFAMQMAYRFNGIGVTQNVLYENQKLIANQFNSAIGKIQDSLSSTASALGKLQDVVNQNAQALNTLVKQLSSNFGAISSVLNDILSRLDKVEAEVQIDRLITGRLQSLQTYVTQQLIRAAEIRASANLAATKMSECVLGQSKRVDFCGKGYHLMSFPQSAPHGVVFLHVTYVCAQEKNFTTAPAICHEGKAHFPREGVFVSNGTHWFITQRNFYEPQIITTDNTFVSGSCDVVIGIVNNTVYDPLQPELDSFKEELDKYFKNHTSPDVDLGDISGINASVVNIQKEIDRLNEVAKNLNESLIDLQELGKYEQYIKGGGSGGGQIYEGKLTAEGLRFGIVASRFNHALVDRLVEGAIDAIVRHGGREEDITLVRVPGSWEIPVAAGELARKEDIDAVIAIGVLIRGATPHFDYIASEVSKGLADLSLELRKPITFGVITADTLEQAIERAGTKHGNKGWEAALSAIEMANLFKSLR

SEQ ID NO: 4159 - protein, 1363 aa, Artificial Sequence
  SARS-CoV-2/pangolin/Guangxi/P1E/2017__EPI_ISL_410539 spike protein (1-1203)(P707C_P1061C) LumSynth construct
MFVFLFVLPLVSSQCVNLTTRTGIQPGYTNSSTRGVYYPDKVFRSSILHLTQDLFLPFFSNVTWFNTINYQGGFKKFDNPVLPFNDGVYFASTEKSNIIRGWIFGTTLDARTQSLLIVNNATNVVIKVCEFQFCTDPFLGVYYHNNNKTWVENEFRVYSSANNCTFEYISQPFLMDLEGKQGNFKNLREFVFKNVDGYFKIYSKHTPIDLVRDLPRGFAALEPLVDLPIGINITRFQTLLALHRSYLTPGKLESGWTTGAAAYYVGYLQQRTFLLSYNQNGTITDAVDCSLDPLSETKCTLKSLTVEKGIYQTSNFRVQPTISIVRFPNITNLCPFGEVFNASKFASVYAWNRKRISNCVADYSVLYNSTSFSTFKCYGVSPTKLNDLCFTNVYADSFVVKGDEVRQIAPGQTGVIADYNYKLPDDFTGCVIAWNSVKQDALTGGNYLYRLFRKSKLKPFERDISTEIYQAGSTPCNGQVGLNCYYPLERYGFHPTTGVNYQPFRVVVLSFELLNGPATVCGPKLSTTLVKDKCVNFNFNGLTGTGVLTTSKKQFLPFQQFGRDISDTTDAVRDPQTLEILDITPCSFGGVSVITPGTNTSNQVAVLYQDVNCTEVPMAIHAEQLTPAWRVYSAGANVFQTRAGCLVGAEHVNNSYECDIPVGAGICASYHSMSSLRSVNQRSIIAYTMSLGAENSVAYSNNSIAICTNFTISVTTEILPVSMTKTSVDCTMYICGDSIECSNLLLQYGSFCTQLNRALTGIAVEQDKNTQEVFAQVKQIYKTPPIKDFGGFNFSQILPDPSKPSKRSFIEDLLFNKVTLADAGFIKQYGDCLGDIAARDLICAQKFNGLTVLPPLLTDEMIAQYTSALLAGTITSGWTFGAGAALQIPFAMQMAYRFNGIGVTQNVLYENQKLIANQFNSAIGKIQDSLSSTASALGKLQDVVNQNAQALNTLVKQLSSNFGAISSVLNDILSRLDKVEAEVQIDRLITGRLQSLQTYVTQQLIRAAEIRASANLAATKMSECVLGQSKRVDFCGKGYHLMSFPQSAPHGVVFLHVTYVCAQEKNFTTAPAICHEGKAHFPREGVFVSNGTHWFITQRNFYEPQIITTDNTFVSGSCDVVIGIVNNTVYDPLQPELDSFKEELDKYFKNHTSPDVDLGDISGINASVVNIQKEIDRLNEVAKNLNESLIDLQELGKYEQYIKGGGSGGGQIYEGKLTAEGLRFGIVASRFNHALVDRLVEGAIDAIVRHGGREEDITLVRVPGSWEIPVAAGELARKEDIDAVIAIGVLIRGATPHFDYIASEVSKGLADLSLELRKPITFGVITADTLEQAIERAGTKHGNKGWEAALSAIEMANLFKSLR

SEQ ID NO: 4160 - protein, 1371 aa, Artificial Sequence
  SARS-CoV-2/Wuhan/WIV05/2019__EPI_ISL_402128 spike protein (1-1211)(G889C_L1034C) LumSynth construct
MFVFLVLLPLVSSQCVNLTTRTQLPPAYTNSFTRGVYYPDKVFRSSVLHSTQDLFLPFFSNVTWFHAIHVSGTNGTKRFDNPVLPFNDGVYFASTEKSNIIRGWIFGTTLDSKTQSLLIVNNATNVVIKVCEFQFCNDPFLGVYYHKNNKSWMESEFRVYSSANNCTFEYVSQPFLMDLEGKQGNFKNLREFVFKNIDGYFKIYSKHTPINLVRDLPQGFSALEPLVDLPIGINITRFQTLLALHRSYLTPGDSSSGWTAGAAAYYVGYLQPRTFLLKYNENGTITDAVDCALDPLSETKCTLKSFTVEKGIYQTSNFRVQPTESIVRFPNITNLCPFGEVFNATRFASVYAWNRKRISNCVADYSVLYNSASFSTFKCYGVSPTKLNDLCFTNVYADSFVIRGDEVRQIAPGQTGKIADYNYKLPDDFTGCVIAWNSNNLDSKVGGNYNYLYRLFRKSNLKPFERDISTEIYQAGSTPCNGVEGFNCYFPLQSYGFQPTNGVGYQPYRVVVLSFELLHAPATVCGPKKSTNLVKNKCVNFNFNGLTGTGVLTESNKKFLPFQQFGRDIADTTDAVRDPQTLEILDITPCSFGGVSVITPGTNTSNQVAVLYQDVNCTEVPVAIHADQLTPTWRVYSTGSNVFQTRAGCLIGAEHVNNSYECDIPIGAGICASYQTQTNSPRRARSVASQSIIAYTMSLGAENSVAYSNNSIAIPTNFTISVTTEILPVSMTKTSVDCTMYICGDSTECSNLLLQYGSFCTQLNRALTGIAVEQDKNTQEVFAQVKQIYKTPPIKDFGGFNFSQILPDPSKPSKRSFIEDLLFNKVTLADAGFIKQYGDCLGDIAARDLICAQKFNGLTVLPPLLTDEMIAQYTSALLAGTITSGWTFCAGAALQIPFAMQMAYRFNGIGVTQNVLYENQKLIANQFNSAIGKIQDSLSSTASALGKLQDVVNQNAQALNTLVKQLSSNFGAISSVLNDILSRLDKVEAEVQIDRLITGRLQSLQTYVTQQLIRAAEIRASANLAATKMSECVCGQSKRVDFCGKGYHLMSFPQSAPHGVVFLHVTYVPAQEKNFTTAPAICHDGKAHFPREGVFVSNGTHWFVTQRNFYEPQIITTDNTFVSGNCDVVIGIVNNTVYDPLQPELDSFKEELDKYFKNHTSPDVDLGDISGINASVVNIQKEIDRLNEVAKNLNESLIDLQELGKYEQYIKGGGSGGGQIYEGKLTAEGLRFGIVASRFNHALVDRLVEGAIDAIVRHGGREEDITLVRVPGSWEIPVAAGELARKEDIDAVIAIGVLIRGATPHFDYIASEVSKGLADLSLELRKPITFGVITADTLEQAIERAGTKHGNKGWEAALSAIEMANLFKSLR

SEQ ID NO: 4161 - protein, 1367 aa, Artificial Sequence
  SARS-CoV-2/bat/Yunnan/RaTG13/2013__EPI_ISL_402131 spike protein (1-1207)(G885C_L1030C) LumSynth construct
MFVFLVLLPLVSSQCVNLTTRTQLPPAYTNSSTRGVYYPDKVFRSSVLHLTQDLFLPFFSNVTWFHAIHVSGTNGIKRFDNPVLPFNDGVYFASTEKSNIIRGWIFGTTLDSKTQSLLIVNNATNVVIKVCEFQFCNDPFLGVYYHKNNKSWMESEFRVYSSANNCTFEYVSQPFLMDLEGKQGNFKNLREFVFKNIDGYFKIYSKHTPINLVRDLPPGFSALEPLVDLPIGINITRFQTLLALHRSYLTPGDSSSGWTAGAAAYYVGYLQPRTFLLKYNENGTITDAVDCALDPLSETKCTLKSFTVEKGIYQTSNFRVQPTDSIVRFPNITNLCPFGEVFNATTFASVYAWNRKRISNCVADYSVLYNSTSFSTFKCYGVSPTKLNDLCFTNVYADSFVITGDEVRQIAPGQTGKIADYNYKLPDDFTGCVIAWNSKHIDAKEGGNFNYLYRLFRKANLKPFERDISTEIYQAGSKPCNGQTGLNCYYPLYRYGFYPTDGVGHQPYRVVVLSFELLNAPATVCGPKKSTNLVKNKCVNFNFNGLTGTGVLTESNKKFLPFQQFGRDIADTTDAVRDPQTLEILDITPCSFGGVSVITPGTNASNQVAVLYQDVNCTEVPVAIHADQLTPTWRVYSTGSNVFQTRAGCLIGAEHVNNSYECDIPIGAGICASYQTQTNSRSVASQSIIAYTMSLGAENSVAYSNNSIAIPTNFTISVTTEILPVSMTKTSVDCTMYICGDSTECSNLLLQYGSFCTQLNRALTGIAVEQDKNTQEVFAQVKQIYKTPPIKDFGGFNFSQILPDPSKPSKRSFIEDLLFNKVTLADAGFIKQYGDCLGDIAARDLICAQKFNGLTVLPPLLTDEMIAQYTSALLAGTITSGWTFCAGAALQIPFAMQMAYRFNGIGVTQNVLYENQKLIANQFNSAIGKIQDSLSSTASALGKLQDVVNQNAQALNTLVKQLSSNFGAISSVLNDILSRLDKVEAEVQIDRLITGRLQSLQTYVTQQLIRAAEIRASANLAATKMSECVCGQSKRVDFCGKGYHLMSFPQSAPHGVVFLHVTYVPAQEKNFTTAPAICHDGKAHFPREGVFVSNGTHWFVTQRNFYEPQIITTDNTFVSGSCDVVIGIVNNTVYDPLQPELDSFKEELDKYFKNHTSPDVDLGDISGINASVVNIQKEIDRLNEVAKNLNESLIDLQELGKYEQYIKGGGSGGGQIYEGKLTAEGLRFGIVASRFNHALVDRLVEGAIDAIVRHGGREEDITLVRVPGSWEIPVAAGELARKEDIDAVIAIGVLIRGATPHFDYIASEVSKGLADLSLELRKPITFGVITADTLEQAIERAGTKHGNKGWEAALSAIEMANLFKSLR

SEQ ID NO: 4162 - protein, 1371 aa, Artificial Sequence
  SARS-CoV-2/Wuhan/HBCDC-HB-01/2019__EPI_ISL_402132 spike protein (1-1211)(G889C_L1034C) LumSynth construct
MFVFLVLLPLVSSQCVNLTTRTQLPPAYTNSITRGVYYPDKVFRSSVLHSTQDLFLPFFSNVTWFHAIHVSGTNGTKRFDNPVLPFNDGVYFASTEKSNIIRGWIFGTTLDSKTQSLLIVNNATNVVIKVCEFQFCNDPFLGVYYHKNNKSWMESEFRVYSSANNCTFEYVSQPFLMDLEGKQGNFKNLREFVFKNIDGYFKIYSKHTPINLVRDLPQGFSALEPLVDLPIGINITRFQTLLALHRSYLTPGDSSSGWTAGAAAYYVGYLQPRTFLLKYNENGTITDAVDCALDPLSETKCTLKSFTVEKGIYQTSNFRVQPTESIVRFPNITNLCPFGEVFNATRFASVYAWNRKRISNCVADYSVLYNSASFSTFKCYGVSPTKLNDLCFTNVYADSFVIRGDEVRQIAPGQTGKIADYNYKLPDDFTGCVIAWNSNNLDSKVGGNYNYLYRLFRKSNLKPFERDISTEIYQAGSTPCNGVEGFNCYFPLQSYGFQPTNGVGYQPYRVVVLSFELLHAPATVCGPKKSTNLVKNKCVNFNFNGLTGTGVLTESNKKFLPFQQFGRDIADTTDAVRDPQTLEILDITPCSFGGVSVITPGTNTSNQVAVLYQDVNCTEVPVAIHADQLTPTWRVYSTGSNVFQTRAGCLIGAEHVNNSYECDIPIGAGICASYQTQTNSPRRARSVASQSIIAYTMSLGAENSVAYSNNSIAIPTNFTISVTTEILPVSMTKTSVDCTMYICGDSTECSNLLLQYGSFCTQLNRALTGIAVEQDKNTQEVFAQVKQIYKTPPIKDFGGFNFSQILPDPSKPSKRSFIEDLLFNKVTLADAGFIKQYGDCLGDIAARDLICAQKFNGLTVLPPLLTDEMIAQYTSALLAGTITSGWTFCAGAALQIPFAMQMAYRFNGIGVTQNVLYENQKLIANQFNSAIGKIQDSLSSTASALGKLQDVVNQNAQALNTLVKQLSSNFGAISSVLNDILSRLDKVEAEVQIDRLITGRLQSLQTYVTQQLIRAAEIRASANLAATKMSECVCGQSKRVDFCGKGYHLMSFPQSAPHGVVFLHVTYVPAQEKNFTTAPAICHDGKAHFPREGVFVSNGTHWFVTQRNFYEPQIITTDNTFVSGNCDVVIGIVNNTVYDPLQPELDSFKEELDKYFKNHTSPDVDLGDISGINASVVNIQKEIDRLNEVAKNLNESLIDLQELGKYEQYIKGGGSGGGQIYEGKLTAEGLRFGIVASRFNHALVDRLVEGAIDAIVRHGGREEDITLVRVPGSWEIPVAAGELARKEDIDAVIAIGVLIRGATPHFDYIASEVSKGLADLSLELRKPITFGVITADTLEQAIERAGTKHGNKGWEAALSAIEMANLFKSLR

SEQ ID NO: 4163 - protein, 1371 aa, Artificial Sequence
  SARS-CoV-2/Guangdong/20SF028/2020__EPI_ISL_403936 spike protein (1-1211)(G889C_L1034C) LumSynth construct
MFVFLVLLPLVSSQCVNLTTRTQLPPAYTNSFTRGVYYPDKVFRSSVLYSTQDLFLPFFSNVTWFHAIHVSGTNGTKRFDNPVLPFNDGVYFASTEKSNIIRGWIFGTTLDSKTQSLLIVNNATNVVIKVCEFQFCNDPFLGVYYHKNNKSWMESEFRVYSSANNCTFEYVSQPFLMDLEGKQGNFKNLREFVFKNIDGYFKIYSKHTPINLVRDLPQGFSALEPLVDLPIGINITRFQTLLALHRSYLTPGDSSSGWTAGAAAYYVGYLQPRTFLLKYNENGTITDAVDCALDPLSETKCTLKSFTVEKGIYQTSNFRVQPTESIVRFPNITNLCPFGEVFNATRFASVYAWNRKRISNCVADYSVLYNSASFSTFKCYGVSPTKLNDLCFTNVYADSFVIRGDEVRQIAPGQTGKIADYNYKLPDDFTGCVIAWNSNNLDSKVGGNYNYLYRLFRKSNLKPFERDISTEIYQAGSTPCNGVEGFNCYFPLQSYGFQPTNGVGYQPYRVVVLSFELLHAPATVCGPKKSTNLVKNKCVNFNFNGLTGTGVLTESNKKFLPFQQFGRDIADTTDAVRDPQTLEILDITPCSFGGVSVITPGTNTSNQVAVLYQDVNCTEVPVAIHADQLTPTWRVYSTGSNVFQTRAGCLIGAEHVNNSYECDIPIGAGICASYQTQTNSPRRARSVASQSIIAYTMSLGAENSVAYSNNSIAIPTNFTISVTTEILPVSMTKTSVDCTMYICGDSTECSNLLLQYGSFCTQLNRALTGIAVEQDKNTQEVFAQVKQIYKTPPIKDFGGFNFSQILPDPSKPSKRSFIEDLLFNKVTLADAGFIKQYGDCLGDIAARDLICAQKFNGLTVLPPLLTDEMIAQYTSALLAGTITSGWTFCAGAALQIPFAMQMAYRFNGIGVTQNVLYENQKLIANQFNSAIGKIQDSLSSTASALGKLQDVVNQNAQALNTLVKQLSSNFGAISSVLNDILSRLDKVEAEVQIDRLITGRLQSLQTYVTQQLIRAAEIRASANLAATKMSECVCGQSKRVDFCGKGYHLMSFPQSAPHGVVFLHVTYVPAQEKNFTTAPAICHDGKAHFPREGVFVSNGTHWFVTQRNFYEPQIITTDNTFVSGNCDVVIGIVNNTVYDPLQPELDSFKEELDKYFKNHTSPDVDLGDISGINASVVNIQKEIDRLNEVAKNLNESLIDLQELGKYEQYIKGGGSGGGQIYEGKLTAEGLRFGIVASRFNHALVDRLVEGAIDAIVRHGGREEDITLVRVPGSWEIPVAAGELARKEDIDAVIAIGVLIRGATPHFDYIASEVSKGLADLSLELRKPITFGVITADTLEQAIERAGTKHGNKGWEAALSAIEMANLFKSLR

SEQ ID NO: 4164 - protein, 1371 aa, Artificial Sequence
  SARS-CoV-2/Shenzhen/SZTH-001/2020__EPI_ISL_406592 spike protein (1-1211)(G889C_L1034C) LumSynth construct
MFVFLVLLPLVSSQCVNLTTRTQLPPAYTNSFTRGVYYPDKVFRSSVLHSTQDLFLPFFSNVTWFHAIHVSGTNGTKRFDNPVLPFNDGVYFASTEKSNIIRGWIFGTTLDSKTQSLLIVNNATNVVIKVCEFQFCNDPFLGVYYHKNNKSWMESEFRVYSSANNCTFEYVSQPFLMDLEGKQGNFKNLREFVFKNIDGYFKIYSKHTPINLVRDLPQGFSALEPLVDLPIGINITRFQTLLALHRSYLTPGDSSSGWTAGAAAYYVGYLQPRTFLLKYNENGTITDAVDCALDPLSETKCTLKSFTVEKGIYQTSNFRVQPTESIVRFPNITNLCPFGEVFNATRFASVYAWNRKRISNCVADYSVLYNSASFSTFKCYGVSPTKLNDLCFTNVYADSFVIRGDEVRQIAPGQTGKIADYNYKLPDDFTGCVIAWNSNNLDSKVGGNYNYLYRLFRKSNLKPFERDISTEIYQAGSTPCNGVEGFNCYFPLQSYGFQPTNGVGYQPYRVVVLSFELLHAPATVCGPKKSTNLVKNKCVNFNFNGLTGTGVLTESNKKFLPFQQFGRDIADTTDAVRDPQTLEILDITPCSFGGVSVITPGTNTSNQVAVLYQDVNCTEVPVAIHADQLTPTWRVYSTGSNVFQTRAGCLIGAEHVNNSYECDIPIGAGICASYQTQTNSPRRARSVASQSIIAYTMSLGAENSVAYSNNSIAIPTNFTISVTTEILPVSMTKTSVDCTMYICGDSTECSNLLLQYGSFCTQLNRALTGIAVEQDKNTQEVFAQVKQIYKTPPIKDFGGFNFSQILPDPSKPSKRSFIEDLLFNKVTLADAGFIKQYGDCLGDIAARDLICAQKFNGLTVLPPLLTDEMIAQYTSALLAGTITSGWTFCAGAALQIPFAMQMAYRFNGIGVTQNVLYENQKLIANQFNSAIGKIQDSLSSTASALGKLQDVVNQNAQALNTLVKQLSSNFGAISSVLNDILSRLDKVEAEVQIDRLITGRLQSLQTYVTQQLIRAAEIRASANLAATKMSECVCGQSKRVDFCGKGYHLMSFPQSAPHGVVFLHVTYVPAQEKNFTTAPAICHDGKAHFPREGVFVSNGTHWFVTQRNFYEPQIITTDNTFVSGNCDVLIGIVNNTVYDPLQPELDSFKEELDKYFKNHTSPDVDLGDISGINASVVNIQKEIDRLNEVAKNLNESLIDLQELGKYEQYIKGGGSGGGQIYEGKLTAEGLRFGIVASRFNHALVDRLVEGAIDAIVRHGGREEDITLVRVPGSWEIPVAAGELARKEDIDAVIAIGVLIRGATPHFDYIASEVSKGLADLSLELRKPITFGVITADTLEQAIERAGTKHGNKGWEAALSAIEMANLFKSLR

SEQ ID NO: 4165 - protein, 1371 aa, Artificial Sequence
  SARS-CoV-2/Shenzhen/SZTH-004/2020__EPI_ISL_406595 spike protein (1-1211)(G889C_L1034C) LumSynth construct
MFVFLVLLPLVSSQCVNLTTRTQLPPAYTNSFTRGVYYPDKVFRSSVLHSTQDLFLPFFSNVTWFHAIHVSGTNGTKRFDNPVLPFNDGVYFASTEKSNIIRGWIFGTTLDSKTQSLLIVNNATNVVIKVCEFQFCNDPFLGVYYHKNNKSWMESEFRVYSSANNCTFEYVSQPFLMDLEGKQGNFKNLREFVFKNIDGYFKIYSKHTPINLVRDLPQGFSALEPLVDLPIGINITRFQTLLALHRSYLTPGDSSSGWTAGAAAYYVGYLQPRTFLLKYNENGTITDAVDCALDPLSETKCTLKSFTVEKGIYQTSNFRVQPTESIVRFPNITNLCPFGEVFNATRFASVYAWDRKRISNCVAYYSVLYNSASFSTFKCYGVSPTKLNDLCFTNVYADSFVIRGDEVRQIAPGQTGKIADYNYKLPDDFTGCVIAWNSNNLDSKVGGNYNYLYRLFRKSNLKPFERDISTEIYQAGSTPCNGVEGFNCYFPLQSYGFQPTNGVGYQPYRVVVLSFELLHAPATVCGPKKSTNLVKNKCVNFNFNGLTGTGVLTESNKKFLPFQQFGRDIADTTDAVRDPQTLEILDITPCSFGGVSVITPGTNTSNQVAVLYQDVNCTEVPVAIHADQLTPTWRVYSTGSNVFQTRAGCLIGAEHVNNSYECDIPIGAGICASYQTQTNSPRRARSVASQSIIAYTMSLGAENSVAYSNNSIAIPTNFTISVTTEILPVSMTKTSVDCTMYICGDSTECSNLLLQYGSFCTQLNRALTGIAVEQDKNTQEVFAQVKQIYKTPPIKDFGGFNFSQILPDPSKPSKRSFIEDLLFNKVTLADAGFIKQYGDCLGDIAARDLICAQKFNGLTVLPPLLTDEMIAQYTSALLAGTITSGWTFCAGAALQIPFAMQMAYRFNGIGVTQNVLYENQKLIANQFNSAIGKIQDSLSSTASALGKLQDVVNQNAQALNTLVKQLSSNFGAISSVLNDILSRLDKVEAEVQIDRLITGRLQSLQTYVTQQLIRAAEIRASANLAATKMSECVCGQSKRVDFCGKGYHLMSFPQSAPHGVVFLHVTYVPAQEKNFTTAPAICHDGKAHFPREGVFVSNGTHWFVTQRNFYEPQIITTDNTFVSGNCDVVIGIVNNTVYDPLQPELDSFKEELDKYFKNHTSPDVDLGDISGINASVVNIQKEIDRLNEVAKNLNESLIDLQELGKYEQYIKGGGSGGGQIYEGKLTAEGLRFGIVASRFNHALVDRLVEGAIDAIVRHGGREEDITLVRVPGSWEIPVAAGELARKEDIDAVIAIGVLIRGATPHFDYIASEVSKGLADLSLELRKPITFGVITADTLEQAIERAGTKHGNKGWEAALSAIEMANLFKSLR

SEQ ID NO: 4166 - protein, 1371 aa, Artificial Sequence
  SARS-CoV-2/France/IDF0372/2020__EPI_ISL_406596 spike protein (1-1211)(G889C_L1034C) LumSynth construct
MFVFLVLLPLVSSQCVNLTTRTQLPPAYTNSFTRGVYYPDKVFRSSVLHSTQDLFLPFFSNVTWFHAIHVSGTNGTKRFDNPVLPFNDGVYFASTEKSNIIRGWIFGTTLDSKTQSLLIVNNATNVVIKVCEFQFCNDPFLGVYYHKNNKSWMESEFRVYSSANNCTFEYVSQPFLMDLEGKQGNFKNLREFVFKNIDGYFKIYSKHTPINLVRDLPQGFSALEPLVDLPIGINITRFQTLLALHRSYLTPGDSSSGWTAGAAAYYVGYLQPRTFLLKYNENGTITDAVDCALDPLSETKCTLKSFTVEKGIYQTSNFRVQPTESIVRFPNITNLCPFGEVFNATRFASVYAWNRKRISNCVADYSFLYNSASFSTFKCYGVSPTKLNDLCFTNVYADSFVIRGDEVRQIAPGQTGKIADYNYKLPDDFTGCVIAWNSNNLDSKVGGNYNYLYRLFRKSNLKPFERDISTEIYQAGSTPCNGVEGFNCYFPLQSYGFQPTNGVGYQPYRVVVLSFELLHAPATVCGPKKSTNLVKNKCVNFNFNGLTGTGVLTESNKKFLPFQQFGRDIADTTDAVRDPQTLEILDITPCSFGGVSVITPGTNTSNQVAVLYQDVNCTEVPVAIHADQLTPTWRVYSTGSNVFQTRAGCLIGAEHVNNSYECDIPIGAGICASYQTQTNSPRRARSVASQSIIAYTMSLGAENSVAYSNNSIAIPTNFTISVTTEILPVSMTKTSVDCTMYICGDSTECSNLLLQYGSFCTQLNRALTGIAVEQDKNTQEVFAQVKQIYKTPPIKDFGGFNFSQILPDPSKPSKRSFIEDLLFNKVTLADAGFIKQYGDCLGDIAARDLICAQKFNGLTVLPPLLTDEMIAQYTSALLAGTITSGWTFCAGAALQIPFAMQMAYRFNGIGVTQNVLYENQKLIANQFNSAIGKIQDSLSSTASALGKLQDVVNQNAQALNTLVKQLSSNFGAISSVLNDILSRLDKVEAEVQIDRLITGRLQSLQTYVTQQLIRAAEIRASANLAATKMSECVCGQSKRVDFCGKGYHLMSFPQSAPHGVVFLHVTYVPAQEKNFTTAPAICHDGKAHFPREGVFVSNGTHWFVTQRNFYEPQIITTDNTFVSGNCDVVIGIVNNTVYDPLQPELDSFKEELDKYFKNHTSPDVDLGDISGINASVVNIQKEIDRLNEVAKNLNESLIDLQELGKYEQYIKGGGSGGGQIYEGKLTAEGLRFGIVASRFNHALVDRLVEGAIDAIVRHGGREEDITLVRVPGSWEIPVAAGELARKEDIDAVIAIGVLIRGATPHFDYIASEVSKGLADLSLELRKPITFGVITADTLEQAIERAGTKHGNKGWEAALSAIEMANLFKSLR

SEQ ID NO: 4167 - protein, 1371 aa, Artificial Sequence
  SARS-CoV-2/Australia/VIC01/2020__EPI_ISL_406844 spike protein (1-1211)(G889C_L1034C) LumSynth construct
MFVFLVLLPLVSSQCVNLTTRTQLPPAYTNSFTRGVYYPDKVFRSSVLHSTQDLFLPFFSNVTWFHAIHVSGTNGTKRFDNPVLPFNDGVYFASTEKSNIIRGWIFGTTLDSKTQSLLIVNNATNVVIKVCEFQFCNDPFLGVYYHKNNKSWMESEFRVYSSANNCTFEYVSQPFLMDLEGKQGNFKNLREFVFKNIDGYFKIYSKHTPINLVRDLPQGFSALEPLVDLPIGINITRFQTLLALHRRYLTPGDSSSGWTAGAAAYYVGYLQPRTFLLKYNENGTITDAVDCALDPLSETKCTLKSFTVEKGIYQTSNFRVQPTESIVRFPNITNLCPFGEVFNATRFASVYAWNRKRISNCVADYSVLYNSASFSTFKCYGVSPTKLNDLCFTNVYADSFVIRGDEVRQIAPGQTGKIADYNYKLPDDFTGCVIAWNSNNLDSKVGGNYNYLYRLFRKSNLKPFERDISTEIYQAGSTPCNGVEGFNCYFPLQSYGFQPTNGVGYQPYRVVVLSFELLHAPATVCGPKKSTNLVKNKCVNFNFNGLTGTGVLTESNKKFLPFQQFGRDIADTTDAVRDPQTLEILDITPCSFGGVSVITPGTNTSNQVAVLYQDVNCTEVPVAIHADQLTPTWRVYSTGSNVFQTRAGCLIGAEHVNNSYECDIPIGAGICASYQTQTNSPRRARSVASQSIIAYTMSLGAENSVAYSNNSIAIPTNFTISVTTEILPVSMTKTSVDCTMYICGDSTECSNLLLQYGSFCTQLNRALTGIAVEQDKNTQEVFAQVKQIYKTPPIKDFGGFNFSQILPDPSKPSKRSFIEDLLFNKVTLADAGFIKQYGDCLGDIAARDLICAQKFNGLTVLPPLLTDEMIAQYTSALLAGTITSGWTFCAGAALQIPFAMQMAYRFNGIGVTQNVLYENQKLIANQFNSAIGKIQDSLSSTASALGKLQDVVNQNAQALNTLVKQLSSNFGAISSVLNDILSRLDKVEAEVQIDRLITGRLQSLQTYVTQQLIRAAEIRASANLAATKMSECVCGQSKRVDFCGKGYHLMSFPQSAPHGVVFLHVTYVPAQEKNFTTAPAICHDGKAHFPREGVFVSNGTHWFVTQRNFYEPQIITTDNTFVSGNCDVVIGIVNNTVYDPLQPELDSFKEELDKYFKNHTSPDVDLGDISGINASVVNIQKEIDRLNEVAKNLNESLIDLQELGKYEQYIKGGGSGGGQIYEGKLTAEGLRFGIVASRFNHALVDRLVEGAIDAIVRHGGREEDITLVRVPGSWEIPVAAGELARKEDIDAVIAIGVLIRGATPHFDYIASEVSKGLADLSLELRKPITFGVITADTLEQAIERAGTKHGNKGWEAALSAIEMANLFKSLR

SEQ ID NO: 4168 - protein, 1371 aa, Artificial Sequence
  SARS-CoV-2/Germany/BavPat1/2020__EPI_ISL_406862 spike protein (1-1211)(G889C_L1034C) LumSynth construct
MFVFLVLLPLVSSQCVNLTTRTQLPPAYTNSFTRGVYYPDKVFRSSVLHSTQDLFLPFFSNVTWFHAIHVSGTNGTKRFDNPVLPFNDGVYFASTEKSNIIRGWIFGTTLDSKTQSLLIVNNATNVVIKVCEFQFCNDPFLGVYYHKNNKSWMESEFRVYSSANNCTFEYVSQPFLMDLEGKQGNFKNLREFVFKNIDGYFKIYSKHTPINLVRDLPQGFSALEPLVDLPIGINITRFQTLLALHRSYLTPGDSSSGWTAGAAAYYVGYLQPRTFLLKYNENGTITDAVDCALDPLSETKCTLKSFTVEKGIYQTSNFRVQPTESIVRFPNITNLCPFGEVFNATRFASVYAWNRKRISNCVADYSVLYNSASFSTFKCYGVSPTKLNDLCFTNVYADSFVIRGDEVRQIAPGQTGKIADYNYKLPDDFTGCVIAWNSNNLDSKVGGNYNYLYRLFRKSNLKPFERDISTEIYQAGSTPCNGVEGFNCYFPLQSYGFQPTNGVGYQPYRVVVLSFELLHAPATVCGPKKSTNLVKNKCVNFNFNGLTGTGVLTESNKKFLPFQQFGRDIADTTDAVRDPQTLEILDITPCSFGGVSVITPGTNTSNQVAVLYQGVNCTEVPVAIHADQLTPTWRVYSTGSNVFQTRAGCLIGAEHVNNSYECDIPIGAGICASYQTQTNSPRRARSVASQSIIAYTMSLGAENSVAYSNNSIAIPTNFTISVTTEILPVSMTKTSVDCTMYICGDSTECSNLLLQYGSFCTQLNRALTGIAVEQDKNTQEVFAQVKQIYKTPPIKDFGGFNFSQILPDPSKPSKRSFIEDLLFNKVTLADAGFIKQYGDCLGDIAARDLICAQKFNGLTVLPPLLTDEMIAQYTSALLAGTITSGWTFCAGAALQIPFAMQMAYRFNGIGVTQNVLYENQKLIANQFNSAIGKIQDSLSSTASALGKLQDVVNQNAQALNTLVKQLSSNFGAISSVLNDILSRLDKVEAEVQIDRLITGRLQSLQTYVTQQLIRAAEIRASANLAATKMSECVCGQSKRVDFCGKGYHLMSFPQSAPHGVVFLHVTYVPAQEKNFTTAPAICHDGKAHFPREGVFVSNGTHWFVTQRNFYEPQIITTDNTFVSGNCDVVIGIVNNTVYDPLQPELDSFKEELDKYFKNHTSPDVDLGDISGINASVVNIQKEIDRLNEVAKNLNESLIDLQELGKYEQYIKGGGSGGGQIYEGKLTAEGLRFGIVASRFNHALVDRLVEGAIDAIVRHGGREEDITLVRVPGSWEIPVAAGELARKEDIDAVIAIGVLIRGATPHFDYIASEVSKGLADLSLELRKPITFGVITADTLEQAIERAGTKHGNKGWEAALSAIEMANLFKSLR

SEQ ID NO: 4169 - protein, 1371 aa, Artificial Sequence
  SARS-CoV-2/Wuhan/HBCDC-HB-02/2020__EPI_ISL_412978 spike protein (1-1211)(G889C_L1034C) LumSynth construct
MFVFLVLLPLVSSQCVNLTTRTQLPPAYTNSFTRGVYYPDKVFRSSVLHSTQDLFLPFFSNVTWFHAIHVSGTNGTKRFDNPVLPFNDGVYFASTEKSNIIRGWIFGTTLDSKTQSLLIVNNATNVVIKVCEFQFCNDPFLGVYYHKNNKSWMESEFRVYSSANNCTFEYVSQPFLMDLEGKQGNFKNLREFVFKNIDGYFKIYSKHTPINLVRDLPQGFSALEPLVDLPIGINITRFQTLLALHRSYLTPGDSSSGWTAGAAAYYVGYLQPRTFLLKYNENGTITDAVDCALDPLSETKCTLKSFTVEKGIYQTSNFRVQPTESIVRFPNITNLCPFGEVFNATRFASVYAWNRKRISNCVADYSVLYNSASFSTFKCYGVSPTKLNDLCFTNVYADSFVIRGDEVRQIAPGQTGKIADYNYKLPDDFTGCVIAWNSNNLDSKVGGNYNYLYRLFRKSNLKPFERDISTEIYQAGSTPCNGVEGFNCYFPLQSYGFQPTNGVGYQPYRVVVLSFELLHAPATVCGPKKSTNLVKNKCVNFNFNGLTGTGVLTESNKKFLPFQQFGRDIADTTDAVRDPQTLEILDITPCSFGGVSVITPGTNTSNQVAVLYQDVNCTEVPVAIHADQLTPTWRVYSTGSNVFQTRAGCLIGAEHVNNSYECDIPIGAGICASYQTQTNSPRRARSVASQSIIAYTMSLGAENSVAYSNNSIAIPTNFTISVTTEILPVSMTKTSVDCTMYICGDSTECSNFLLQYGSFCTQLNRALTGIAVEQDKNTQEVFAQVKQIYKTPPIKDFGGFNFSQILPDPSKPSKRSFIEDLLFNKVTLADAGFIKQYGDCLGDIAARDLICAQKFNGLTVLPPLLTDEMIAQYTSALLAGTITSGWTFCAGAALQIPFAMQMAYRFNGIGVTQNVLYENQKLIANQFNSAIGKIQDSLSSTASALGKLQDVVNQNAQALNTLVKQLSSNFGAISSVLNDILSRLDKVEAEVQIDRLITGRLQSLQTYVTQQLIRAAEIRASANLAATKMSECVCGQSKRVDFCGKGYHLMSFPQSAPHGVVFLHVTYVPAQEKNFTTAPAICHDGKAHFPREGVFVSNGTHWFVTQRNFYEPQIITTDNTFVSGNCDVVIGIVNNTVYDPLQPELDSFKEELDKYFKNHTSPDVDLGDISGINASVVNIQKEIDRLNEVAKNLNESLIDLQELGKYEQYIKGGGSGGGQIYEGKLTAEGLRFGIVASRFNHALVDRLVEGAIDAIVRHGGREEDITLVRVPGSWEIPVAAGELARKEDIDAVIAIGVLIRGATPHFDYIASEVSKGLADLSLELRKPITFGVITADTLEQAIERAGTKHGNKGWEAALSAIEMANLFKSLR

SEQ ID NO: 4170 - protein, 1371 aa, Artificial Sequence
  SARS-CoV-2/Australia/QLD02/2020__EPI_ISL_407896 spike protein (1-1211)(G889C_L1034C) LumSynth construct
MFVFLVLLPLVSSQCVNLTTRTQLPPAYTNSFTRGVYYPDKVFRSSVLHSTQDLFLPFFSNVTWFHAIHVSGTNGTKRFDNPVLPFNDGVYFASTEKSNIIRGWIFGTTLDSKTQSLLIVNNATNVVIKVCEFQFCNDPFLGVYYHKNNKSWMESEFRVYSSANNCTFEYVSQPFLMDLEGKQGNFKNLREFVFKNIDGYFKIYSKHTPINLVRDLPQGFSALEPLVDLPIGINITRFQTLLALHRSYLTPGDSSSGWTAGAAAYYVGYLQPRTFLLKYNENGTITDAVDCALDPLSETKCTLKSFTVEKGIYQTSNFRVQPTESIVRFPNITNLCPFGEVFNATRFASVYAWNRKRISNCVADYSVLYNSASFSTFKCYGVSPTKLNDLCFTNVYADSFVIRGDEVRQIAPGQTGKIADYNYKLPDDFTGCVIAWNSNNLDSKVGGNYNYLYRLFRKSNLKPFERDISTEIYQAGSTPCNGVEGFNCYFPLQSYGFQPTNGVGYQPYRVVVLSFELLHAPATVCGPKKSTNLVKNKCVNFNFNGLTGTGVLTESNKKFLPFQQFGRDIADTTDAVRDPQTLEILDITPCSFGGVSVITPGTNTSNQVAVLYQDVNCTEVPVAIHADQLTPTWRVYSTGSNVFQTRAGCLIGAEHVNNSYECDIPIGAGICASYQTQTNSPRRARSVASQSIIAYTMSLGAENSVAYSNNSIAIPTNFTISVTTEILPVSMTKTSVDCTMYICGDSTECSNLLLQYGSFCTQLNRALTGIAVEQDKNTQEVFAQVKQIYKTPPIKDFGGFNFSQILPDPSKPSKRSFIEDLLFNKVTLADAGFIKQYGDCLGDIAARDLICAQKFNGLTVLPPLLTDEMIAQYTSALLAGTITSGWTFCAGAALQIPFAMQMAYRFNGIGVTQNVLYENQKLIANQFNSAIGKIQDSLSSTASALGKLQDVVNQNAQALNTLVKQLSSNFGAISSVLNDILSRLDKVEAEVQIDRLITGRLQSLQTYVTQQLIRAAEIRASANLAATKMSECVCGQSKRVDFCGKGYHLMSFPQSAPHGVVFLHVTYVPAQEKNFTTAPAICHDGKAHFPREGVFVSNGTHWFVTQRNFYEPQIITTDNTFVSGNCDVVIGIVNNTVYDPLQLELDSFKEELDKYFKNHTSPDVDLGDISGINASVVNIQKEIDRLNEVAKNLNESLIDLQELGKYEQYIKGGGSGGGQIYEGKLTAEGLRFGIVASRFNHALVDRLVEGAIDAIVRHGGREEDITLVRVPGSWEIPVAAGELARKEDIDAVIAIGVLIRGATPHFDYIASEVSKGLADLSLELRKPITFGVITADTLEQAIERAGTKHGNKGWEAALSAIEMANLFKSLR

SEQ ID NO: 4171 - protein, 1371 aa, Artificial Sequence
  SARS-CoV-2/India/1-31/2020__EPI_ISL_413523 spike protein (1-1211)(G889C_L1034C) LumSynth construct
MFVFLVLLPLVSSQCVNLTTRTQLPPAYTNSFTRGVYYPDKVFRSSVLHSTQDLFLPFFSNVTWFHAIHVSGTNGTKRFDNPVLPFNDGVYFASTEKSNIIRGWIFGTTLDSKTQSLLIVNNATNVVIKVCEFQFCNDPFLGVYYHKNNKSWMESEFRVYSSANNCTFEYVSQPFLMDLEGKQGNFKNLREFVFKNIDGYFKIYSKHTPINLVRDLPQGFSALEPLVDLPIGINITRFQTLLALHRSYLTPGDSSSGWTAGAAAYYVGYLQPRTFLLKYNENGTITDAVDCALDPLSETKCTLKSFTVEKGIYQTSNFRVQPTESIVRFPNITNLCPFGEVFNATRFASVYAWNRKRISNCVADYSVLYNSASFSTFKCYGVSPTKLNDLCFTNVYADSFVIRGDEVRQIAPGQTGKIADYNYKLPDDFTGCVIAWNSNNLDSKVGGNYNYLYRLFRKSNLKPFERDISTEIYQAGSTPCNGVEGFNCYFPLQSYGFQPTNGVGYQPYRVVVLSFELLHAPATVCGPKKSTNLVKNKCVNFNFNGLTGTGVLTESNKKFLPFQQFGRDIADTTDAVRDPQTLEILDITPCSFGGVSVITPGTNTSNQVAVLYQDVNCTEVPVAIHADQLTPTWRVYSTGSNVFQTRAGCLIGAEHVNNSYECDIPIGAGICASYQTQTNSPRRARSVASQSIIAYTMSLGAENSVAYSNNSIAIPTNFTISVTTEILPVSMTKTSVDCTMYICGDSTECSNLLLQYGSFCTQLNRALTGIAVEQDKNTQEVFAQVKQIYKTPPIKDFGGFNFSQILPDPSKPSKRSFIEDLLFNKVTLADAGFIKQYGDCLGDIAARDLICAQKFNGLTVLPPLLTDEMIAQYTSALLAGTITSGWTFCAGAALQIPFAMQMAYRFNGIGVTQNVLYENQKLIANQFNSVIGKIQDSLSSTASALGKLQDVVNQNAQALNTLVKQLSSNFGAISSVLNDILSRLDKVEAEVQIDRLITGRLQSLQTYVTQQLIRAAEIRASANLAATKMSECVCGQSKRVDFCGKGYHLMSFPQSAPHGVVFLHVTYVPAQEKNFTTAPAICHDGKAHFPREGVFVSNGTHWFVTQRNFYEPQIITTDNTFVSGNCDVVIGIVNNTVYDPLQPELDSFKEELDKYFKNHTSPDVDLGDISGINASVVNIQKEIDRLNEVAKNLNESLIDLQELGKYEQYIKGGGSGGGQIYEGKLTAEGLRFGIVASRFNHALVDRLVEGAIDAIVRHGGREEDITLVRVPGSWEIPVAAGELARKEDIDAVIAIGVLIRGATPHFDYIASEVSKGLADLSLELRKPITFGVITADTLEQAIERAGTKHGNKGWEAALSAIEMANLFKSLR

SEQ ID NO: 4172 - protein, 1371 aa, Artificial Sequence
  SARS-CoV-2/Guangdong/GD2020087-P0008/2020__EPI_ISL_413863 spike protein (1-1211)(G889C_L1034C) LumSynth construct
MFVFLVLLPLVSSQCVNLTTRTQLPPAYTNSFTRGVYYPDKVFRSSVLHSTQDLFLPFFSNVTWFHAIHVSGTNGTKRFDNPVLPFNDGVYFASTEKSNIIRGWIFGTTLDSKTQSLLIVNNATNVVIKVCEFQFCNDPFLGVYYHKNNKSWMESEFRVYSSANNCTFEYVSQPFLMDLEGKQGNFKNLREFVFKNIDGYFKIYSKHTPINLVRDLPQGFSALEPLVDLPIGINITRFQTLLALHRSYLTPGDSSSGWTAGAAAYYVGYLQPRTFLLKYNENGTITDAVDCALDPLSETKCTLKSFTVEKGIYQTSNFRVQPTESIVRFPNITNLCPFGEVFNATRFASVYAWNRKRISNCVADYSVLYNSASFSTFKCYGVSPTKLNDLCFTNVYADSFVIRGDEVREIAPGQTGKIADYNYKLPDDFTGCVIAWNSNNLDSKVGGNYNYLYRLFRKSNLKPFERDISTEIYQAGSTPCNGVEGFNCYFPLQSYGFQPTNGVGYQPYRVVVLSFELLHAPATVCGPKKSTNLVKNKCVNFNFNGLTGTGVLTESNKKFLPFQQFGRDIADTTDAVRDPQTLEILDITPCSFGGVSVITPGTNTSNQVAVLYQDVNCTEVPVAIHADQLTPTWRVYSTGSNVFQTRAGCLIGAEHVNNSYECDIPIGAGICASYQTQTNSPRRARSVASQSIIAYTMSLGAENSVAYSNNSIAIPTNFTISVTTEILPVSMTKTSVDCTMYICGDSTECSNLLLQYGSFCTQLNRALTGIAVEQDKNTQEVFAQVKQIYKTPPIKDFGGFNFSQILPDPSKPSKRSFIEDLLFNKVTLADAGFIKQYGDCLGDIAARDLICAQKFNGLTVLPPLLTDEMIAQYTSALLAGTITSGWTFCAGAALQIPFAMQMAYRFNGIGVTQNVLYENQKLIANQFNSAIGKIQDSLSSTASALGKLQDVVNQNAQALNTLVKQLSSNFGAISSVLNDILSRLDKVEAEVQIDRLITGRLQSLQTYVTQQLIRAAEIRASANLAATKMSECVCGQSKRVDFCGKGYHLMSFPQSAPHGVVFLHVTYVPAQEKNFTTAPAICHDGKAHFPREGVFVSNGTHWFVTQRNFYEPQIITTDNTFVSGNCDVVIGIVNNTVYDPLQPELDSFKEELDKYFKNHTSPDVDLGDISGINASVVNIQKEIDRLNEVAKNLNESLIDLQELGKYEQYIKGGGSGGGQIYEGKLTAEGLRFGIVASRFNHALVDRLVEGAIDAIVRHGGREEDITLVRVPGSWEIPVAAGELARKEDIDAVIAIGVLIRGATPHFDYIASEVSKGLADLSLELRKPITFGVITADTLEQAIERAGTKHGNKGWEAALSAIEMANLFKSLR

SEQ ID NO: 4173 - protein, 1371 aa, Artificial Sequence
  SARS-CoV-2/Sweden/01/2020__EPI_ISL_411951 spike protein (1-1211)(G889C_L1034C) LumSynth construct
MFVFLVLLPLVSSQCVNLTTRTQLPPAYTNSFTRGVYYPDKVFRSSVLHSTQDLFLPFFSNVTWFHAIHVSGTNGTKRFDNPVLPFNDGVYFASTEKSNIIRGWIFGTTLDSKTQSLLIVNNATNVVIKVCEFQFCNDPFLGVYYHKNNKSWMESEFRVYSSANNCTFEYVSQPFLMDLEGKQGNFKNLREFVFKNIDGYFKIYSKHTPINLVRDLPQGFSALEPLVDLPIGINITRFQTLLALHRSYLTPGDSSSGWTAGAAAYYVGYLQPRTFLLKYNENGTITDAVDCALDPLSETKCTLKSFTVEKGIYQTSNFRVQPTESIVRFPNITNLCPFGEVFNATRFASVYAWNRKRISNCVADYSVLYNSASFSTFKCYGVSPTKLNDLCFTNVYADSFVIRGDEVRQIAPGQTGKIADYNYKLPDDFTGCVIAWNSNNLDSKVGGNYNYLYRLFRKSNLKPFERDISTEIYQAGSTPCNGVEGFNCYFPLQSYGFQPTNGVGYQPYRVVVLSFELLHAPATVCGPKKSTNLVKNKCVNFNFNGLTGTGVLTESNKKFLPFQQFGRDIADTTDAVRDPQTLEILDITPCSFGGVSVITPGTNTSNQVAVLYQDVNCTEVPVAIHADQLTPTWRVYSTGSNVFQTRAGCLIGAEHVNNSYECDIPIGAGICASYQTQTNSPRRARSVASQSIIAYTMSLGAENSVAYSNNSIAIPTNFTISVTTEILPVSMTKTSVDCTMYICGDSTECSNLLLQYGSFCTQLNRALTGIAVEQDKNTQEVFAQVKQIYKTPPIKDCGGFNFSQILPDPSKPSKRSFIEDLLFNKVTLADAGFIKQYGDCLGDIAARDLICAQKFNGLTVLPPLLTDEMIAQYTSALLAGTITSGWTFCAGAALQIPFAMQMAYRFNGIGVTQNVLYENQKLIANQFNSAIGKIQDSLSSTASALGKLQDVVNQNAQALNTLVKQLSSNFGAISSVLNDILSRLDKVEAEVQIDRLITGRLQSLQTYVTQQLIRAAEIRASANLAATKMSECVCGQSKRVDFCGKGYHLMSFPQSAPHGVVFLHVTYVPAQEKNFTTAPAICHDGKAHFPREGVFVSNGTHWFVTQRNFYEPQIITTDNTFVSGNCDVVIGIVNNTVYDPLQPELDSFKEELDKYFKNHTSPDVDLGDISGINASVVNIQKEIDRLNEVAKNLNESLIDLQELGKYEQYIKGGGSGGGQIYEGKLTAEGLRFGIVASRFNHALVDRLVEGAIDAIVRHGGREEDITLVRVPGSWEIPVAAGELARKEDIDAVIAIGVLIRGATPHFDYIASEVSKGLADLSLELRKPITFGVITADTLEQAIERAGTKHGNKGWEAALSAIEMANLFKSLR

SEQ ID NO: 4174 - protein, 1371 aa, Artificial Sequence
  SARS-CoV-2/Tianmen/HBCDC-HB-07/2020__EPI_ISL_412983 spike protein (1-1211)(G889C_L1034C) LumSynth construct
MFVFLVLLPLVSSQCVNLTTRTQLPPAYTNSFTRGVYYPDKVFRSSVLHSTQDLFLPFFSNVTWFHAIHVSGTNGTKRFDNPVLPFNDGVYFASTEKSNIIRGWIFGTTLDSKTQSLLIVNNATNVVIKVCEFQFCNDPFLGVYYHKNNKSWMESEFRVYSSANNCTFEYVSQPFLMDLEGKQGNFKNLREFVFKNIDGYFKIYSKHTPINLVRDLPQGFSALEPLVDLPIGINITRFQTLLALHRSYLTPGDSSSGWTAGAAAYYVGYLQPRTFLLKYNENGTITDAVDCALDPLSETKCTLKSFTVEKGIYQTSNFRVQPTESIVRFPNITNLCPFGEVFNATRFASVYAWNRKRISNCVADYSVLYNSASFSTFKCYGVSPTKLNDLCFTNVYADSFVIRGDEVRQIAPGQTGKIADYNYKLPDDFTGCVIAWNSNNLDSKVGGNYNYLYRLFRKSNLKPFERDISTEIYQAGSTPCNGVEGFNCYFPLQSYGFQPTNGVGYQPYRVVVLSFELLHAPATVCGPKKSTNLVKNKCVNFNFNGLTGTGVLTESNKKFLPFQQFGRDIADTTDAVRDPQTLEILDITPCSFGGVSVITPGTNTSNQVAVLYQDLNCTEVPVAIHADQLTPTWRVYSTGSNVFQTRAGCLIGAEHVNNSYECDIPIGAGICASYQTQTNSPRRARSVASQSIIAYTMSLGAENSVAYSNNSIAIPTNFTISVTTEILPVSMTKTSVDCTMYICGDSTECSNLLLQYGSFCTQLNRALTGIAVEQDKNTQEVFAQVKQIYKTPPIKDFGGFNFSQILPDPSKPSKRSFIEDLLFNKVTLADAGFIKQYGDCLGDIAARDLICAQKFNGLTVLPPLLTDEMIAQYTSALLAGTITSGWTFCAGAALQIPFAMQMAYRFNGIGVTQNVLYENQKLIANQFNSAIGKIQDSLSSTASALGKLQDVVNQNAQALNTLVKQLSSNFGAISSVLNDILSRLDKVEAEVQIDRLITGRLQSLQTYVTQQLIRAAEIRASANLAATKMSECVCGQSKRVDFCGKGYHLMSFPQSAPHGVVFLHVTYVPAQEKNFTTAPAICHDGKAHFPREGVFVSNGTHWFVTQRNFYEPQIITTDNTFVSGNCDVVIGIVNNTVYDPLQPELDSFKEELDKYFKNHTSPDVDLGDISGINASVVNIQKEIDRLNEVAKNLNESLIDLQELGKYEQYIKGGGSGGGQIYEGKLTAEGLRFGIVASRFNHALVDRLVEGAIDAIVRHGGREEDITLVRVPGSWEIPVAAGELARKEDIDAVIAIGVLIRGATPHFDYIASEVSKGLADLSLELRKPITFGVITADTLEQAIERAGTKHGNKGWEAALSAIEMANLFKSLR

SEQ ID NO: 4175 - protein, 1371 aa, Artificial Sequence
  SARS-CoV-2/Hong Kong/case42_VM20002493/2020__EPI_ISL_414527 spike protein (1-1211)(G889C_L1034C) LumSynth construct
MFVFLVLLPLVSSQCVNLTTRTQLPPAYTNSFTRGVYYPDKVFRSSVLHSTQDLFLPFFSNVTWFHAIHVSGTNGTKRFDNPVLPFNDGVYFASTEKSNIIRGWIFGTTLDSKTQSLLIVNNATNVVIKVCEFQFCNDPFLGVYYHKNNKSWMESEFRVYSSANNCTFEYVSQPFLMDLEGKQGNFKNLREFVFKNIDGYFKIYSKHTPINLVRDLPQGFSALEPLVDLPIGINITRFQTLLALHRSYLTPGDSSSGWTAGAAAYYVGYLQPRTFLLKYNENGTITDAVDCALDPLSETKCTLKSFTVEKGIYQTSNFRVQPTESIVRFPNITNLCPFGEVFNATRFASVYAWNRKRISNCVADYSVLYNSASFSTFKCYGVSPTKLNDLCFTNVYADSFVIRGDEVRQIAPGQTGKIADYNYKLPDDFTGCVIAWNSNNLDSKVGGNYNYLYRLFRKSNLKPFERDISTEIYQAGSTPCNGVEGFNCYFPLQSYGFQPTNGVGYQPYRVVVLSFELLHAPATVCGPKKSTNLVKNKCVNFNFNGLTGTGVLTESNKKFLPFQQFGRDIADTTDAVRDPQTLEILDITPCSFGGVSVITPGTNTSNQVAVLYQDVNCTEVPVAIHADQLTPTWRVYSTGSNVFQTRAGCLIGAEHVNNSYECDIPIGAGICASYQTQTNSPRRARSVASQSIIAYTMSLGAENSVAYSNNSIAIPTNFAISVTTEILPVSMTKTSVDCTMYICGDSTECSNLLLQYGSFCTQLNRALTGIAVEQDKNTQEVFAQVKQIYKTPPIKDFGGFNFSQILPDPSKPSKRSFIEDLLFNKVTLADAGFIKQYGDCLGDIAARDLICAQKFNGLTVLPPLLTDEMIAQYTSALLAGTITSGWTFCAGAALQIPFAMQMAYRFNGIGVTQNVLYENQKLIANQFNSAIGKIQDSLSSTASALGKLQDVVNQNAQALNTLVKQLSSNFGAISSVLNDILSRLDKVEAEVQIDRLITGRLQSLQTYVTQQLIRAAEIRASANLAATKMSECVCGQSKRVDFCGKGYHLMSFPQSAPHGVVFLHVTYVPAQEKNFTTAPAICHDGKAHFPREGVFVSNGTHWFVTQRNFYEPQIITTDNTFVSGNCDVVIGIVNNTVYDPLQPELDSFKEELDKYFKNHTSPDVDLGDISGINASVVNIQKEIDRLNEVAKNLNESLIDLQELGKYEQYIKGGGSGGGQIYEGKLTAEGLRFGIVASRFNHALVDRLVEGAIDAIVRHGGREEDITLVRVPGSWEIPVAAGELARKEDIDAVIAIGVLIRGATPHFDYIASEVSKGLADLSLELRKPITFGVITADTLEQAIERAGTKHGNKGWEAALSAIEMANLFKSLR

SEQ ID NO: 4176 - protein, 1371 aa, Artificial Sequence
  SARS-CoV-2/USA/CruiseA-23/2020__EPI_ISL_414482 spike protein (1-1211)(G889C_L1034C) LumSynth construct
MFVFLVLLPLVSSQCVNLTTRTQLPPAYTNSFTRGVYYPDKVFRSSVLHSTQDLFLPFFSNVTWFHAIHVSGTNGTKRFDNPVLPFNDGVYFASTEKSNIIRGWIFGTTLDSKTQSLLIVNNATNVVIKVCEFQFCNDPFLGVYYHKNNKSWMESEFRVYSSANNCTFEYVSQPFLMDLEVKQGNFKNLREFVFKNIDGYFKIYSKHTPINLVRDLPQGFSALEPLVDLPIGINITRFQTLLALHRSYLTPGDSSSGWTAGAAAYYVGYLQPRTFLLKYNENGTITDAVDCALDPLSETKCTLKSFTVEKGIYQTSNFRVQPTESIVRFPNITNLCPFGEVFNATRFASVYAWNRKRISNCVADYSVLYNSASFSTFKCYGVSPTKLNDLCFTNVYADSFVIRGDEVRQIAPGQTGKIADYNYKLPDDFTGCVIAWNSNNLDSKVGGNYNYLYRLFRKSNLKPFERDISTEIYQAGSTPCNGVEGFNCYFPLQSYGFQPTNGVGYQPYRVVVLSFELLHAPATVCGPKKSTNLVKNKCVNFNFNGLTGTGVLTESNKKFLPFQQFGRDIADTTDAVRDPQTLEILDITPCSFGGVSVITPGTNTSNQVAVLYQDVNCTEVPVAIHADQLTPTWRVYSTGSNVFQTRAGCLIGAEHVNNSYECDIPIGAGICASYQTQTNSPRRARSVASQSIIAYTMSLGAENSVAYSNNSIAIPTNFTISVTTEILPVSMTKTSVDCTMYICGDSTECSNLLLQYGSFCTQLNRALTGIAVEQDKNTQEVFAQVKQIYKTPPIKDFGGFNFSQILPDPSKPSKRSFIEDLLFNKVTLADAGFIKQYGDCLGDIAARDLICAQKFNGLTVLPPLLTDEMIAQYTSALLAGTITSGWTFCAGAALQIPFAMQMAYRFNGIGVTQNVLYENQKLIANQFNSAIGKIQDSLSSTASALGKLQDVVNQNAQALNTLVKQLSSNFGAISSVLNDILSRLDKVEAEVQIDRLITGRLQSLQTYVTQQLIRAAEIRASANLAATKMSECVCGQSKRVDFCGKGYHLMSFPQSAPHGVVFLHVTYVPAQEKNFTTAPAICHDGKAHFPREGVFVSNGTHWFVTQRNFYEPQIITTDNTFVSGNCDVVIGIVNNTVYDPLQPELDSFKEELDKYFKNHTSPDVDLGDISGINASVVNIQKEIDRLNEVAKNLNESLIDLQELGKYEQYIKGGGSGGGQIYEGKLTAEGLRFGIVASRFNHALVDRLVEGAIDAIVRHGGREEDITLVRVPGSWEIPVAAGELARKEDIDAVIAIGVLIRGATPHFDYIASEVSKGLADLSLELRKPITFGVITADTLEQAIERAGTKHGNKGWEAALSAIEMANLFKSLR

SEQ ID NO: 4177 - protein, 1371 aa, Artificial Sequence
  SARS-CoV-2/Hong Kong/case85_VM20002868/2020__EPI_ISL_414519 spike protein (1-1211)(G889C_L1034C) LumSynth construct
MFVFLVLVPLVSSQCVNLTTRTQLPPAYTNSFTRGVYYPDKVFRSSVLHSTQDLFLPFFSNVTWFHAIHVSGTNGTKRFDNPVLPFNDGVYFASTEKSNIIRGWIFGTTLDSKTQSLLIVNNATNVVIKVCEFQFCNDPFLGVYYHKNNKSWMESEFRVYSSANNCTFEYVSQPFLMDLEGKQGNFKNLREFVFKNIDGYFKIYSKHTPINLVRDLPQGFSALEPLVDLPIGINITRFQTLLALHRSYLTPGDSSSGWTAGAAAYYVGYLQPRTFLLKYNENGTITDAVDCALDPLSETKCTLKSFTVEKGIYQTSNFRVQPTESIVRFPNITNLCPFGEVFNATRFASVYAWNRKRISNCVADYSVLYNSASFSTFKCYGVSPTKLNDLCFTNVYADSFVIRGDEVRQIAPGQTGKIADYNYKLPDDFTGCVIAWNSNNLDSKVGGNYNYLYRLFRKSNLKPFERDISTEIYQAGSTPCNGVEGFNCYFPLQSYGFQPTNGVGYQPYRVVVLSFELLHAPATVCGPKKSTNLVKNKCVNFNFNGLTGTGVLTESNKKFLPFQQFGRDIADTTDAVRDPQTLEILDITPCSFGGVSVITPGTNTSNQVAVLYQDVNCTEVPVAIHADQLTPTWRVYSTGSNVFQTRAGCLIGAEHVNNSYECDIPIGAGICASYQTQTNSPRRARSVASQSIIAYTMSLGAENSVAYSNNSIAIPTNFTISVTTEILPVSMTKTSVDCTMYICGDSTECSNLLLQYGSFCTQLNRALTGIAVEQDKNTQEVFAQVKQIYKTPPIKDFGGFNFSQILPDPSKPSKRSFIEDLLFNKVTLADAGFIKQYGDCLGDIAARDLICAQKFNGLTVLPPLLTDEMIAQYTSALLAGTITSGWTFCAGAALQIPFAMQMAYRFNGIGVTQNVLYENQKLIANQFNSAIGKIQDSLSSTASALGKLQDVVNQNAQALNTLVKQLSSNFGAISSVLNDILSRLDKVEAEVQIDRLITGRLQSLQTYVTQQLIRAAEIRASANLAATKMSECVCGQSKRVDFCGKGYHLMSFPQSAPHGVVFLHVTYVPAQEKNFTTAPAICHDGKAHFPREGVFVSNGTHWFVTQRNFYEPQIITTDNTFVSGNCDVVIGIVNNTVYDPLQPELDSFKEELDKYFKNHTSPDVDLGDISGINASVVNIQKEIDRLNEVAKNLNESLIDLQELGKYEQYIKGGGSGGGQIYEGKLTAEGLRFGIVASRFNHALVDRLVEGAIDAIVRHGGREEDITLVRVPGSWEIPVAAGELARKEDIDAVIAIGVLIRGATPHFDYIASEVSKGLADLSLELRKPITFGVITADTLEQAIERAGTKHGNKGWEAALSAIEMANLFKSLR

SEQ ID NO: 4178 - protein, 1371 aa, Artificial Sequence; identical to SEQ ID NO: 4168
  SARS-CoV-2/England/200990660/2020__EPI_ISL_414523 spike protein (1-1211)(G889C_L1034C) LumSynth construct

SEQ ID NO: 4179 - protein, 1371 aa, Artificial Sequence
  SARS-CoV-2/Australia/NSW09/2020__EPI_ISL_413595 spike protein (1-1211)(G889C_L1034C) LumSynth construct
MFVFLVLLPLVSSQCVNLTTRTQLPPAYTNSFTRGVYYPDKVFRSSVLHSTQDLFLPFFSNVTWFHAIHVSGTNGTKRFDNPVLPFNDGVYFASTEKSNIIRGWIFGTTLDSKTQSLLIVNNATNVVIKVCEFQFCNDPFLGVYYHKNNKSWMESEFRVYSSANNCTFEYVSQPFLMDLEGKQGNFKNLREFVFKNIDGYFKIYSKHTPINLVRDLPQGFSALEPLVDLPIGINITRFQTLLALHRSYLTPGDSSSGWTAGAAAYYVGYLQPRTFLLKYNENGTITDAVDCALDPLSETKCTLKSFTVEKGIYQTSNFRVQPTESIVRFPNITNLCPFGEVFNATRFASVYAWNRKRISNCVADYSVLYNSASFSTFKCYGVSPTKLNDLCFTNVYADSFVIRGDEVRQIAPGQTGKIADYNYKLPDDFTGCVIAWNSNNLDSKVGGNYNYLYRLFRKSNLKPFERDISTEIYQAGSTPCNGVEGFNCYFPLQSYGFQPTNGVGYQPYRVVVLSFELLHAPATVCGPKKSTNLVKNKCVNFNFNGLTGTGVLTESNKKFLPFQQFGRDIADTTDAVRDPQTLEILDITPCSFGGVSVITPGTNTSNQVAVLYQDVNCTEVPVAIHADQLTPTWRVYSTGSNVFQTRAGCLIGAEHVNNSYECDIPIGAGICASYQTQTNSPRRARSVASQSIIAYTMSLGAENSVAYSNNSIAIPTNFTISVTTEILPVSMTKTSVDCTMYICGDSTECSNLLLQYGSFCTQLNRALTGIAVEQDKNTQEVFAQVKQIYKTPPIKDFGGFNFSQILPDPSKPSKRSFIEDLLFNKVTLADAGFIKQYGDCLGDIAARDLICAQKFNGLTVLPPLLTDEMIAQYTSALLAGTITSGWTFCAGAALQIPFAMQMAYRFNGIGVTQNVLYENQKLIANQFNSAIGKIQDSLSFTASALGKLQDVVNQNAQALNTLVKQLSSNFGAISSVLNDILSRLDKVEAEVQIDRLITGRLQSLQTYVTQQLIRAAEIRASANLAATKMSECVCGQSKRVDFCGKGYHLMSFPQSAPHGVVFLHVTYVPAQEKNFTTAPAICHDGKAHFPREGVFVSNGTHWFVTQRNFYEPQIITTDNTFVSGNCDVVIGIVNNTVYDPLQPELDSFKEELDKYFKNHTSPDVDLGDISGINASVVNIQKEIDRLNEVAKNLNESLIDLQELGKYEQYIKGGGSGGGQIYEGKLTAEGLRFGIVASRFNHALVDRLVEGAIDAIVRHGGREEDITLVRVPGSWEIPVAAGELARKEDIDAVIAIGVLIRGATPHFDYIASEVSKGLADLSLELRKPITFGVITADTLEQAIERAGTKHGNKGWEAALSAIEMANLFKSLR

SEQ ID NO: 4180 - protein, 1371 aa, Artificial Sequence; identical to SEQ ID NO: 4160
  SARS-CoV-2/Australia/NSW10/2020__EPI_ISL_413596 spike protein (1-1211)(G889C_L1034C) LumSynth construct

SEQ ID NO: 4181 - protein, 1371 aa, Artificial Sequence
  SARS-CoV-2/Switzerland/1000477797/2020__EPI_ISL_413023 spike protein (1-1211)(G889C_L1034C) LumSynth construct
MFVFLVLLPLVSSQCVNLTTRTQLPPAYTNSFTRGVYYPDKVFRSSVLHSTQDLFLPFFSNVTWFHAIHVSGTNGTKRFDNPVLPFNDGVYFASTEKSNIIRGWIFGTTLDSKTQSLLIVNNATNVVIKVCEFQFCNDPFLGVYYHKNNKSWMESEFRVYSSANNCTFEYVSQPFLMDLEGKQGNFKNLREFVFKNIDGYFNIYSKHTPINLVRDLPQGFSALEPLVDLPIGINITRFQTLLALHRSYLTPGDSSSGWTAGAAAYYVGYLQPRTFLLKYNENGTITDAVDCALDPLSETKCTLKSFTVEKGIYQTSNFRVQPTESIVRFPNITNLCPFGEVFNATRFASVYAWNRKRISNCVADYSVLYNSASFSTFKCYGVSPTKLNDLCFTNVYADSFVIRGDEVRQIAPGQTGKIADYNYKLPDDFTGCVIAWNSNNLDSKVGGNYNYLYRLFRKSNLKPFERDISTEIYQAGSTPCNGVEGFNCYFPLQSYGFQPTNGVGYQPYRVVVLSFELLHAPATVCGPKKSTNLVKNKCVNFNFNGLTGTGVLTESNKKFLPFQQFGRDIADTTDAVRDPQTLEILDITPCSFGGVSVITPGTNTSNQVAVLYQGVNCTEVPVAIHADQLTPTWRVYSTGSNVFQTRAGCLIGAEHVNNSYECDIPIGAGICASYQTQTNSPRRARSVASQSIIAYTMSLGAENSVAYSNNSIAIPTNFTISVTTEILPVSMTKTSVDCTMYICGDSTECSNLLLQYGSFCTQLNRALTGIAVEQDKNTQEVFAQVKQIYKTPPIKDFGGFNFSQILPDPSKPSKRSFIEDLLFNKVTLADAGFIKQYGDCLGDIAARDLICAQKFNGLTVLPPLLTDEMIAQYTSALLAGTITSGWTFCAGAALQIPFAMQMAYRFNGIGVTQNVLYENQKLIANQFNSAIGKIQDSLSSTASALGKLQDVVNQNAQALNTLVKQLSSNFGAISSVLNDILSRLDKVEAEVQIDRLITGRLQSLQTYVTQQLIRAAEIRASANLAATKMSECVCGQSKRVDFCGKGYHLMSFPQSAPHGVVFLHVTYVPAQEKNFTTAPAICHDGKAHFPREGVFVSNGTHWFVTQRNFYEPQIITTDNTFVSGNCDVVIGIVNNTVYDPLQPELDSFKEELDKYFKNHTSPDVDLGDISGINASVVNIQKEIDRLNEVAKNLNESLIDLQELGKYEQYIKGGGSGGGQIYEGKLTAEGLRFGIVASRFNHALVDRLVEGAIDAIVRHGGREEDITLVRVPGSWEIPVAAGELARKEDIDAVIAIGVLIRGATPHFDYIASEVSKGLADLSLELRKPITFGVITADTLEQAIERAGTKHGNKGWEAALSAIEMANLFKSLR

SEQ ID NO: 4182 - protein, 1371 aa, Artificial Sequence
  SARS-CoV-2/Belgium/BA-02291/2020__EPI_ISL_415159 spike protein (1-1211)(G889C_L1034C) LumSynth construct
MFVFLVLLPLVSSQCVNLTTRTQLPPAYTNSFTRGVYYPDKVFRSSVLHSTQDLFLPFFSNVTWFHAIHVSGTNGTKRFDNPVLPFNDGVYFASTEKSNIIRGWIFGTTLDSKTQSLLIVNNATNVVIKVCEFQFCNDPFLGVYYHKNNKSWMESEFRVYSSANNCTFEYVSQPFLMDLEGKQGNFKNLREFVFKNIDGYFKIYSKHTPINLVRDLPQGFSALEPLVDLPIGINITRFQTLLALHRSYLTPGDSSSGWTAGAAAYYVGYLQPRTFLLKYNENGTITDAVDCALDPLSETKCTLKSFTVEKGIYQTSNFRVQPTESIVRFPNITNLCPFGEVFNATRFASVYAWNRKRISNCVADYSVLYNSASFSTFKCYGVSPTKLNDLCFTNVYADSFVIRGDEVRQIAPGQTGKIADYNYKLPDDFTGCVIAWNSNNLDSKVGGNYNYLYRLFRRSNLKPFERDISTEIYQAGSTPCNGVEGFNCYFPLQSYGFQPTNGVGYQPYRVVVLSFELLPAPATVCGPKKSTNLVKNKCVNFNFNGLTGTGVLTESNKKFLPFQQFGRDIADTTDAVRDPQTLEILDITPCSFGGVSVITPGTNTSNQVAVLYQGVNCTEVPVAIHADQLTPTWRVYSTGSNVFQTRAGCLIGAEHVNNSYECDIPIGAGICASYQTQTNSPRRARSVASQSIIAYTMSLGAENSVAYSNNSIAIPTNFTISVTTEILPVSMTKTSVDCTMYICGDSTECSNLLLQYGSFCTQLNRALTGIAVEQDKNTQEVFAQVKQIYKTPPIKDFGGFNFSQILPDPSKPSKRSFIEDLLFNKVTLADAGFIKQYGDCLGDIAARDLICAQKFNGLTVLPPLLTDEMIAQYTSALLAGTITSGWTFCAGAALQIPFAMQMAYRFNGIGVTQNVLYENQKLIANQFNSAIGKIQDSLSSAAPALGKLQDVVNQNAQALNTLVKQLSSNFGAISSVLNDILSRLDKVEAEVQIDRLITGRLQSLQTYVTQQLIRAAEIRASANLAATKMSECVCGQSKRVDFCGKGYHLMSFPQSAPHGVVFLHVTYVPAQEKNFTTAPAICHDGKAHFPREGVFVSNGTHWFVTQRNFYEPQIITTDNTFVSGNCDVVIGIVNNTVYDPLQPELDSFKEELDKYFKNHTSPDVDLGDISGINASVVNIQKEIDRLNEVAKNLNESLIDLQELGKYEQYIKGGGSGGGQIYEGKLTAEGLRFGIVASRFNHALVDRLVEGAIDAIVRHGGREEDITLVRVPGSWEIPVAAGELARKEDIDAVIAIGVLIRGATPHFDYIASEVSKGLADLSLELRKPITFGVITADTLEQAIERAGTKHGNKGWEAALSAIEMANLFKSLR

SEQ ID NO: 4183 - protein, 1371 aa, Artificial Sequence
  SARS-CoV-2/USA/WA8-UW5/2020__EPI_ISL_413486 spike protein (1-1211)(G889C_L1034C) LumSynth construct
MFVFLVLLPLVSSQCVNLTTRTQLPPAYTNSFTRGVYYPDKVFRSSVLHSTQDLFLPFFSNVTWFHAIHVSGTNGTKRFDNPVLPFNDGVYFASTEKSNIIRGWIFGTTLDSKTQSLLIVNNATNVVIKVCEFQFCNDPFLGVYYHKNNKSWMESEFRVYSSANNCTFEYVSQPFLMDLEGKQGNFKNLREFVFKNIDGYFKIYSKHTPINLVRDLPQGFSALEPLVDLPIGINITRFQTLLALHRSYLTPGDSSSGWTAGAAAYYVGYLQPRTFLLKYNENGTITDAVDCALDPLSETKCTLKSFTVEKGIYQTSNFRVQPTESIVRFPNITNLCPFGEVFNATRFASVYAWNRKRISNCVADYSVLYNSASFSTFKCYGVSPTKLNDLCFTNVYADSFVIRGDEVRQIAPGQTGKIADYNYKLPDDFTGCVIAWNSNNLDSKVGGNYNYLYRLFRKSNLKPFERDISTEIYQAGSTPCNGVEGFNCYFPLQSYGFQPTNGVGYQPYRVVVLSFELLHAPATVCGPKKSTNLVKNKCVNFNFNGLTGTGVLTESNKKFLPFQQFGRDIADTTDAVRDPQTLEILDITPCSFGGVSVITPGTNTSNQVAVLYQDVNCTEVPVAIHADQLTPTWRVYSTGSNVFQTRAGCLIGAEYVNNSYECDIPIGAGICASYQTQTNSPRRARSVASQSIIAYTMSLGAENSVAYSNNSIAIPTNFTISVTTEILPVSMTKTSVDCTMYICGDSTECSNLLLQYGSFCTQLNRALTGIAVEQDKNTQEVFAQVKQIYKTPPIKDFGGFNFSQILPDPSKPSKRSFIEDLLFNKVTLADAGFIKQYGDCLGDIAARDLICAQKFNGLTVLPPLLTDEMIAQYTSALLAGTITSGWTFCAGAALQIPFAMQMAYRFNGIGVTQNVLYENQKLIANQFNSAIGKIQDSLSSTASALGKLQDVVNQNAQALNTLVKQLSSNFGAISSVLNDILSRLDKVEAEVQIDRLITGRLQSLQTYVTQQLIRAAEIRASANLAATKMSECVCGQSKRVDFCGKGYHLMSFPQSAPHGVVFLHVTYVPAQEKNFTTAPAICHDGKAHFPREGVFVSNGTHWFVTQRNFYEPQIITTDNTFVSGNCDVVIGIVNNTVYDPLQPELDSFKEELDKYFKNHTSPDVDLGDISGINASVVNIQKEIDRLNEVAKNLNESLIDLQELGKYEQYIKGGGSGGGQIYEGKLTAEGLRFGIVASRFNHALVDRLVEGAIDAIVRHGGREEDITLVRVPGSWEIPVAAGELARKEDIDAVIAIGVLIRGATPHFDYIASEVSKGLADLSLELRKPITFGVITADTLEQAIERAGTKHGNKGWEAALSAIEMANLFKSLR

SEQ ID NO: 4184 - protein, 1371 aa, Artificial Sequence
  SARS-CoV-2/England/20102000506/2020__EPI_ISL_415147 spike protein (1-1211)(G889C_L1034C) LumSynth construct
MFVFLVLLPLVSSQCVNLTTRTQLPPAYTNSFTRGVYYPDKVFRSSVLHSTQDLFLPFFSNVTWFHAIHVSGTNGTKRFDNPVLPFNDGVYFASTEKSNIIRGWIFGTTLDSKTQSLLIVNNATNVVIKVCEFQFCNDPFLGVYYHKNNKSWMESEFRVYSSANNCTFEYVSQPFLMDLEGKQGNFKNLREFVFKNIDGYFKIYSKHTPINLVRDLPQGFSALEPLVDLPIGINITRFQTLLALHRSYLTPGDSSSGWTAGAAAYYVGYLQPRTFLLKYNENGTITDAVDCALDPLSETKCTLKSFTVEKGIYQTSNFRVQPTESIVRFPNITNLCPFGEVFNATRFASVYAWNRKRISNCVADYSVLYNSASFSTFKCYGVSPTKLNDLCFTNVYADSFVIRGDEVRQIAPGQTGKIADYNYKLPDDFTGCVIAWNSNNLDSKVGGNYNYLYRLFRKSNLKPFERDISTEIYQAGSTPCNGVEGFNCYFPLQSYGFQPTNGVGYQPYRVVVLSFELLHAPATVCGPKKSTNLVKNKCVNFNFNGLTGTGVLTESNKKFLPFQQFGRDIADTTDAVRDPQTLEILDITPCSFGGVSVITPGTNTSNQVAVLYQGVNCTEVPVAIHADQLTPTWRVYSTGSNVFQTRAGCLIGAEHVNNSYECDIPIGAGICASYQTQTNSPRRARSVASQSIIAYTMSLGAENSVAYSNNSIAIPTNFTISVTTEILPVSMTKTSVDCTMYICGDSTECSNLLLQYGSFCTQLNRALTGIAVEQDKNTQEVFAQVKQIYKTPPIKDFGGFNFSQILPDPSKPSKRSFIEDLLFNKVTLADAGFIKQYGYCLGDIAARDLICAQKFNGLTVLPPLLTDEMIAQYTSALLAGTITSGWTFCAGAALQIPFAMQMAYRFNGIGVTQNVLYENQKLIANQFNSAIGKIQDSLSSTASALGKLQDVVNQNAQALNTLVKQLSSNFGAISSVLNDILSRLDKVEAEVQIDRLITGRLQSLQTYVTQQLIRAAEIRASANLAATKMSECVCGQSKRVDFCGKGYHLMSFPQSAPHGVVFLHVTYVPAQEKNFTTAPAICHDGKAHFPREGVFVSNGTHWFVTQRNFYEPQIITTDNTFVSGNCDVVIGIVNNTVYDPLQPELDSFKEELDKYFKNHTSPDVDLGDISGINASVVNIQKEIDRLNEVAKNLNESLIDLQELGKYEQYIKGGGSGGGQIYEGKLTAEGLRFGIVASRFNHALVDRLVEGAIDAIVRHGGREEDITLVRVPGSWEIPVAAGELARKEDIDAVIAIGVLIRGATPHFDYIASEVSKGLADLSLELRKPITFGVITADTLEQAIERAGTKHGNKGWEAALSAIEMANLFKSLR

SEQ ID NO: 4185 - protein, 1371 aa, Artificial Sequence
  SARS-CoV-2/Belgium/VAG-03013/2020__EPI_ISL_415155 spike protein (1-1211)(G889C_L1034C) LumSynth construct
MFVFLVLLPLVSSQCVNLTTRTQLPPAYTNSFTRGVYYPDKVFRSSVLHSTQDLFLPFFSNVTWFHAIHVSGTNGTKRFDNPVLPFNDGVYFASTEKSNIIRGWIFGTTLDSKTQSLLIVNNATNVVIKVCEFQFCNDPFLGVYYHKNNKSWMESEFRVYSSANNCTFEYVSQPFLMDLEGKQGNFKNLREFVFKNIDGYFKIYSKHTPINLVRDLPQGFSALEPLVDLPIGINITRFQTLLALHRSYLTPGDSSSGWTAGAAAYYVGYLQPRTFLLKYNENGTITDAVDCALDPLSETKCTLKSFTVEKGIYQTSNFRVQPTESIVRFPNITNLCPFGEVFNATRFASVYAWNRKRISNCVADYSVLYNSASFSTFKCYGVSPTKLNDLCFTNVYADSFVIRGDEVRQIAPGQTGKIADYNYKLPDDFTGCVIAWNSNNLDSKVGGNYNYLYRLFRKSNLKPFERDISTEIYQAGSTPCNGVEGFNCYFPLQSYGFQPTNGVGYQPYRVVVLSFELLHAPATVCGPKKSTNLVKNKCVNFNFNGLTGTGVLTESNKKFLPFQQFGRDIADTTDAVRDPQTLEILDITPCSFGGVSVITPGTNTSNQVAVLYQGVNCTEVPVAIHADQLTPTWRVYSTGSNVFQTRAGCLIGAEHVNNSYECDIPIGAGICASYQTQTNSPRRARSVASQSIIAYTMSLGAENSVAYSNNSIAIPTNFTISVTTEILPVSMTKTSVDCTMYICGDSTECSNLLLQYGSFCTQLNRALTGIAVEQDKNTQEVFAQVKQIYKTPPIKDFGGFNFSQILPDPSKPSKRSFIEDLLFNKVTLADAGFIKQYGDCLGDIAARDLICAQKFNGLTVLPPLLTDEMIAQYTSALLAGTITSGWTFCAGAALQIPFAMQMAYRFNGIGVTQNVLYENQKLIANQFNSAIGKIQDSLSSTATALGKLQDVVNQNAQALNTLVKQLSSNFGAISSVLNDILSRLDKVEAEVQIDRLITGRLQSLQTYVTQQLIRAAEIRASANLAATKMSECVCGQSKRVDFCGKGYHLMSFPQSAPHGVVFLHVTYVPAQEKNFTTAPAICHDGKAHFPREGVFVSNGTHWFVTQRNFYEPQIITTDNTFVSGNCDVVIGIVNNTVYDPLQPELDSFKEELDKYFKNHTSPDVDLGDISGINASVVNIQKEIDRLNEVAKNLNESLIDLQELGKYEQYIKGGGSGGGQIYEGKLTAEGLRFGIVASRFNHALVDRLVEGAIDAIVRHGGREEDITLVRVPGSWEIPVAAGELARKEDIDAVIAIGVLIRGATPHFDYIASEVSKGLADLSLELRKPITFGVITADTLEQAIERAGTKHGNKGWEAALSAIEMANLFKSLR

SEQ ID NO: 4186 - protein, 1371 aa, Artificial Sequence
  SARS-CoV-2/Belgium/BC-03016/2020__EPI_ISL_415157 spike protein (1-1211)(G889C_L1034C) LumSynth construct
MFVFLVLLPLVSSQCVNLTTRTQLPPAYTNSFTRGVYYPDKVFRSSVLHSTQDLFLPFFSNVTWFHAIHVSGTNGTKRFDNPVLPFNDGVYFASTEKSNIIRGWIFGTTLDSKTQSLLIVNNATNVVIKVCEFQFCNDPFLGVYYHKNNKSWMESEFRVYSSANNCTFEYVSQPFLMDLEGKQGNFKNLREFVFKNIDGYFKIYSKHTPINLVRDLPQGFSALEPLVDLPIGINITRFQTLLALHRSYLTPGDSSSGWTAGAAAYYVGYLQPRTFLLKYNENGTITDAVDCALDPLSETKCTLKSFTVEKGIYQTSNFRVQPTESIVRFPNITNLCPFGEVFNATRFASVYAWNRKRISNCVADYSVLYNSASFSTFKCYGVSPTKLNDLCFTNVYADSFVIRGDEVRQIAPGQTGKIADYNYKLPDDFTGCVIAWNSNNLDSKVGGNYNYLYRLFRKSNLKPFERDISTEIYQAGSTPCNGVEGFNCYFPLQSYGFQPTNGVGYQPYRVVVLSFELLHAPATVCGPKKSTNLVKNKCVNFNFNGLTGTGVLTESNKKFLPFQQFGRDIADTTDAVRDPQTLEILDITPCSFGGVSVITPGTNTSNQVAVLYQGVNCTEVPVAIHADQLTPTWRVYSTGSNVFQTRAGCLIGAEHVNNSYECDIPIGAGICASYQTQTNSPRRARSVASQSIIAYTMSLGAENSVAYSNNSIAIPTNFTISVTTEILPVSMTKTSVDCTMYICGDSTECSNLLLQYGSFCTQLNRALTGIAVEQDKNTQEVFAQVKQIYKTPPIKDFGGFNFSQILPDPSKPSKRSFIEDLLFNKVTLADAGFIKQYGDCLGDIAARDLICAQKFNGLTVLPPLLTDEMIAQYTSALLAGTITSGWTFCAGAALQIPFAMQMAYRFNGIGVTQNVLYENQKLIANQFNSAIGKIQDSLSSTAPALGKLQDVVNQNAQALNTLVKQLSSNFGAISSVLNDILSRLDKVEAEVQIDRLITGRLQSLQTYVTQQLIRAAEIRASANLAATKMSECVCGQSKRVDFCGKGYHLMSFPQSAPHGVVFLHVTYVPAQEKNFTTAPAICHDGKAHFPREGVFVSNGTHWFVTQRNFYEPQIITTDNTFVSGNCDVVIGIVNNTVYDPLQPELDSFKEELDKYFKNHTSPDVDLGDISGINASVVNIQKEIDRLNEVAKNLNESLIDLQELGKYEQYIKGGGSGGGQIYEGKLTAEGLRFGIVASRFNHALVDRLVEGAIDAIVRHGGREEDITLVRVPGSWEIPVAAGELARKEDIDAVIAIGVLIRGATPHFDYIASEVSKGLADLSLELRKPITFGVITADTLEQAIERAGTKHGNKGWEAALSAIEMANLFKSLR

SEQ ID NO: 4187 - protein, 1371 aa, Artificial Sequence
  SARS-CoV-2/Germany/BavPat3/2020__EPI_ISL_414521 spike protein (1-1211)(G889C_L1034C) LumSynth construct
MFVFLVLLPLVSSQCVNLTTRTQLPPAYTNSFTRGVYYPDKVFRSSVLHSTQDLFLPFFSNVTWFHAIHVSGTNGTKRFDNPVLPFNDGVYFASTEKSNIIRGWIFGTTLDSKTQSLLIVNNATNVVIKVCEFQFCNDPFLGVYYHKNNKSWMESEFRVYSSANNCTFEYVSQPFLMDLEGKQGNFKNLREFVFKNIDGYFKIYSKHTPINLVRDLPQGFSALEPLVDLPIGINITRFQTLLALHRSYLTPGDSSSGWTAGAAAYYVGYLQPRTFLLKYNENGTITDAVDCALDPLSETKCTLKSFTVEKGIYQTSNFRVQPTESIVRFPNITNLCPFGEVFNATRFASVYAWNRKRISNCVADYSVLYNSASFSTFKCYGVSPTKLNDLCFTNVYADSFVIRGDEVRQIAPGQTGKIADYNYKLPDDFTGCVIAWNSNNLDSKVGGNYNYLYRLFRKSNLKPFERDISTEIYQAGSTPCNGVEGFNCYFPLQSYGFQPTNGVGYQPYRVVVLSFELLHAPATVCGPKKSTNLVKNKCVNFNFNGLTGTGVLTESNKKFLPFQQFGRDIADTTDAVRDPQTLEILDITPCSFGGVSVITPGTNTSNQVAVLYQDVNCTEVPVAIHADQLTPTWRVYSTGSNVFQTRAGCLIGAEHVNNSYECDIPIGAGICASYQTQTNSPRRARSVASQSIIAYTMSLGAENSVAYSNNSIAIPTNFTISVTTEILPVSMTKTSVDCTMYICGDSTECSNLLLQYGSFCTQLNRALTGIAVEQDKNTQQVFAQVKQIYKTPPIKDFGGFNFSQILPDPSKPSKRSFIEDLLFNKVTLADAGFIKQYGDCLGDIAARDLICAQKFNGLTVLPPLLTDEMIAQYTSALLAGTITSGWTFCAGAALQIPFAMQMAYRFNGIGVTQNVLYENQKLIANQFNSAIGKIQDSLSSTASALGKLQDVVNQNAQALNTLVKQLSSNFGAISSVLNDILSRLDKVEAEVQIDRLITGRLQSLQTYVTQQLIRAAEIRASANLAATKMSECVCGQSKRVDFCGKGYHLMSFPQSAPHGVVFLHVTYVPAQEKNFTTAPAICHDGKAHFPREGVFVSNGTHWFVTQRNFYEPQIITTDNTFVSGNCDVVIGIVNNTVYDPLQPELDSFKEELDKYFKNHTSPDVDLGDISGINASVVNIQKEIDRLNEVAKNLNESLIDLQELGKYEQYIKGGGSGGGQIYEGKLTAEGLRFGIVASRFNHALVDRLVEGAIDAIVRHGGREEDITLVRVPGSWEIPVAAGELARKEDIDAVIAIGVLIRGATPHFDYIASEVSKGLADLSLELRKPITFGVITADTLEQAIERAGTKHGNKGWEAALSAIEMANLFKSLR

SEQ ID NO: 4188 - protein, 1371 aa, Artificial Sequence
  SARS-CoV-2/France/HF1805/2020__EPI_ISL_414628 spike protein (1-1211)(G889C_L1034C) LumSynth construct
MFVFLVLLPLVSSQCVNLTTRTQLPPAYTNSFTRGVYYPDKVFRSSVLHSTQDLFLPFFSNVTWFHAIHVSGTNGTKRFDNPVLPFNDGVYFASTEKSNIIRGWIFGTTLDSKTQSLLIVNNATNVVIKVCEFQFCNDPFLGVYYHKNNKSWMESEFRVYSSANNCTFEYVSQPFLMDLEGKQGNFKNLREFVFKNIDGYFKIYSKHTPINLVRDLPQGFSALEPLVDLPIGINITRFQTLLALHRSYLTPGDSSSGWTAGAAAYYVGYLQPRTFLLKYNENGTITDAVDCALDPLSETKCTLKSFTVEKGIYQTSNFRVQPTESIVRFPNITNLCPFGEVFNATRFASVYAWNRKRISNCVADYSVLYNSASFSTFKCYGVSPTKLNDLCFTNVYADSFVIRGDEVRQIAPGQTGKIADYNYKLPDDFTGCVIAWNSNNLDSKVGGNYNYLYRLFRKSNLKPFERDISTEIYQAGSTPCNGVEGFNCYFPLQSYGFQPTNGVGYQPYRVVVLSFELLHAPATVCGPKKSTNLVKNKCVNFNFNGLTGTGVLTESNKKFLPFQQFGRDIADTTDAVRDPQTLEILDITPCSFGGVSVITPGTNTSNQVAVLYQGVNCTEVPVAIHADQLTPTWRVYSTGSNVFQTRAGCLIGAEHVNNSYECDIPIGAGICASYQTQTNSPRRARSVASQSIIAYTMSLGAENSVAYSNNSIAIPTNFTISVTTEILPVSMTKTSVDCTMYICGDSTECSNLLLQYGSFCTQLNRALTGIAVEQDKNTQEVFAQVKQIYKTPPIKDFGGFNFSQILPDPSKPSKRSFIEDLLFNKVTLADAGFIKQYGDCLGDIAARDLICAQKFNGLTVLPPLLTDEMIAQYTSALLAGTITSGWTFCAGAALQIPFAMQMAYRFNGIGVTQNVLYENQKLIANQFNSAIGKIQDSLSSTASALGKLQDVVNQNAQALNTLVKQLSSNFGAISSVLNDILSRLDKVEAEVQIDRLITGRLQSLQTYVTQQLIRAAEIRASANLAATKMSECVCGQSKRVDFCGKGYHLMSFPQSAPHGVVFLHVTYVPAQEKNFTTAPAICHDGKAHFPREGVFVSNGTHWFVTQRNFYEPQIITTDNTFVSGNCDVVIGVVNNTVYDPLQPELDSFKEELDKYFKNHTSPDVDLGDISGINASVVNIQKEIDRLNEVAKNLNESLIDLQELGKYEQYIKGGGSGGGQIYEGKLTAEGLRFGIVASRFNHALVDRLVEGAIDAIVRHGGREEDITLVRVPGSWEIPVAAGELARKEDIDAVIAIGVLIRGATPHFDYIASEVSKGLADLSLELRKPITFGVITADTLEQAIERAGTKHGNKGWEAALSAIEMANLFKSLR

SEQ ID NO: 4189 - protein, 1371 aa, Artificial Sequence
  SARS-CoV-2/Netherlands/ZuidHolland_9/2020__EPI_ISL_414445 spike protein (1-1211)(G889C_L1034C) LumSynth construct
MFVFLVLLPLVSSQCVNLTTRTQLPPAYTNSFTRGVYYPDKVFRSSVLHSTQDLFLPFFSNVTWFHAIHVSGTNGTKRFDNPVLPFNDGVYFASTEKSNIIRGWIFGTTLDSKTQSLLIVNNATNVVIKVCEFQFCNDPFLGVYYHKNNKSWMESEFRVYSSANNCTFEYVSQPFLMDLEGKQGNFKNLREFVFKNIDGYFKIYSKHTPINLVRDLPQGFSALEPLVDLPIGINITRFQTLLALHRSYLTPGDSSSGWTAGAAAYYVGYLQPRTFLLKYNENGTITDAVDCALDPLSETKCTLKSFTVEKGIYQTSNFRVQPTESIVRFPNITNLCPFGEVFNATRFASVYAWNRKRISNCVADYSVLYNSASFSTFKCYGVSPTKLNDLCFTNVYADSFVIRGDEVRQIAPGQTGKIADYNYKLPDDFTGCVIAWNSNNLDSKVGGNYNYLYRLFRKSNLKPFERDISTEIYQAGSTPCNGVEGFNCYFPLQSYGFQPTNGVGYQPYRVVVLSFELLHAPATVCGPKKSTNLVKNKCVNFNFNGLTGTGVLTESNKKFLPFQQFGRDIADTTDAVRDPQTLEILDITPCSFGGVSVITPGTNTSNQVAVLYQGVNCTEVPVAIHADQLTPTWRVYSTGSNVFQTRAGCLIGAEHVNNSYECDIPIGAGICASYQTQTNSPRRARSVASQSIIAYTMSLGAENSVAYSNNSIAIPTNFTISVTTEILPVSMTKTSVDCTMYICGDSTECSNLLLQYGSFCTQLNRALTGIAVEQDKNTQEVFAQVKQIYKTPPIKDFGGFNFSQILPDPSKPSKRSFIEDLLFNKVTLADAGFIKQYGDCLGDIAARDLICVQKFNGLTVLPPLLTDEMIAQYTSALLAGTITSGWTFCAGAALQIPFAMQMAYRFNGIGVTQNVLYENQKLIANQFNSAIGKIQDSLSSTASALGKLQDVVNQNAQALNTLVKQLSSNFGAISSVLNDILSRLDKVEAEVQIDRLITGRLQSLQTYVTQQLIRAAEIRASANLAATKMSECVCGQSKRVDFCGKGYHLMSFPQSAPHGVVFLHVTYVPAQEKNFTTAPAICHDGKAHFPREGVFVSNGTHWFVTQRNFYEPQIITTDNTFVSGNCDVVIGIVNNTVYDPLQPELDSFKEELDKYFKNHTSPDVDLGDISGINASVVNIQKEIDRLNEVAKNLNESLIDLQELGKYEQYIKGGGSGGGQIYEGKLTAEGLRFGIVASRFNHALVDRLVEGAIDAIVRHGGREEDITLVRVPGSWEIPVAAGELARKEDIDAVIAIGVLIRGATPHFDYIASEVSKGLADLSLELRKPITFGVITADTLEQAIERAGTKHGNKGWEAALSAIEMANLFKSLR

SEQ ID NO: 4190 - protein, 1371 aa, Artificial Sequence
  SARS-CoV-2/Finland/FIN03032020A/2020__EPI_ISL_413602 spike protein (1-1211)(G889C_L1034C) LumSynth construct
MFVFLVLLPLVSSQCVNLTTRTQLPPAYTNSFTRGVYYPDKVFRSSVLHSTQDLFLPFFSNVTWFHAIHVSGTNGTKRFDNPVLPFNDGVYFASTEKSNIIRGWIFGTTLDSKTQSLLIVNNATNVVIKVCEFQFCNDPFLGVYYHKNNKSWMESEFRVYSSANNCTFEYVSQPFLMDLEGKQGNFKNLREFVFKNIDGYFKIYSKHTPINLVRDLPQGFSALEPLVDLPIGINITRFQTLLALHRSYLTPGDSSSGWTAGAAAYYVGYLQPRTFLLKYNENGTITDAVDCALDPLSETKCTLKSFTVEKGIYQTSNFRVQPTESIVRFPNITNLCPFGEVFNATRFASVYAWNRKRISNCVADYSVLYNSASFSTFKCYGVSPTKLNDLCFTNVYADSFVIRGDEVRQIAPGQTGKIADYNYKLPDDFTGCVISWNSNNLDSKVGGNYNYLYRLFRKSNLKPFERDISTEIYQAGSTPCNGVEGFNCYFPLQSYGFQPTNGVGYQPYRVVVLSFELLHAPATVCGPKKSTNLVKNKCVNFNFNGLTGTGVLTESNKKFLPFQQFGRDIADTTDAVRDPQTLEILDITPCSFGGVSVITPGTNTSNQVAVLYQGVNCTEVPVAIHADQLTPTWRVYSTGSNVFQTRAGCLIGAEHVNNSYECDIPIGAGICASYQTQTNSPRRARSVASQSIIAYTMSLGAENSVAYSNNSIAIPTNFTISVTTEILPVSMTKTSVDCTMYICGDSTECSNLLLQYGSFCTQLNRALTGIAVEQDKNTQEVFAQVKQIYKTPPIKDFGGFNFSQILPDPSKPSKRSFIEDLLFNKVTLADAGFIKQYGDCLGDIAARDLICAQKFNGLTVLPPLLTDEMIAQYTSALLAGTITSGWTFCAGAALQIPFAMQMAYRFNGIGVTQNVLYENQKLIANQFNSAIGKIQDSLSSTASALGKLQDVVNQNAQALNTLVKQLSSNFGAISSVLNDILSRLDKVEAEVQIDRLITGRLQSLQTYVTQQLIRAAEIRASANLAATKMSECVCGQSKRVDFCGKGYHLMSFPQSAPHGVVFLHVTYVPAQEKNFTTAPAICHDGKAHFPREGVFVSNGTHWFVTQRNFYEPQIITTDNTFVSGNCDVVIGIVNNTVYDPLQPELDSFKEELDKYFKNHTSPDVDLGDISGINASVVNIQKEIDRLNEVAKNLNESLIDLQELGKYEQYIKGGGSGGGQIYEGKLTAEGLRFGIVASRFNHALVDRLVEGAIDAIVRHGGREEDITLVRVPGSWEIPVAAGELARKEDIDAVIAIGVLIRGATPHFDYIASEVSKGLADLSLELRKPITFGVITADTLEQAIERAGTKHGNKGWEAALSAIEMANLFKSLR

SEQ ID NO: 4191 - protein, 1371 aa, Artificial Sequence
  SARS-CoV-2/France/GE1977/2020__EPI_ISL_414632 spike protein (1-1211)(G889C_L1034C) LumSynth construct
MFVFLVLLPLVSSQCVNLTTRTQLPPAYTNSFTRGVYYPDKVFRSSVLHSTQDLFLPFFSNVTWFHAIHVSGTNGTKRFDNPVLPFNDGVYFASTEKSNIIRGWIFGTTLDSKTQSLLIVNNATNVVIKVCEFQFCNDPFLGVYYHKNNKSWMESEFRVYSSANNCTFEYVSQPFLMDLEGKQGNFKNLREFVFKNIDGYFKIYSKHTPINLVRDLPQGFSALEPLVDLPIGINITRFQTLLALHRSYLTPGDSSSGWTAGAAAYYVGYLQPRTFLLKYNENGTITDAVDCALDPLSETKCTLKSFTVEKGIYQTSNFRVQPTESIVRFPNITNLCPFGEVFNATRFASVYAWNRKRISNCVADYSVLYNSASFSTFKCYGVSPTKLNDLCFTNVYADSFVIRGDEVRQIAPGQTGKIADYNYKLPDDFTGCVIAWNSNNLDSKVGGNYNYLYRLFRKSNLKPFERDISTEIYQAGSTPCNGVEGFNCYFPLQSYGFQPTNGVGYQPYRVVVLSFELLHAPATVCGPKKSTNLVKNKCVNFNFNGLTGTGVLTESNKKFLPFQQFGRDIADTTDAVRDPQTLEILDITPCSFGGVSVITPGTNTSNQVAVLYQGVNCTEVPVAIHADQLTPTWRVYSTGSNVFQTRAGCLIGAEHVNNSYECDIPIGAGICASYQTQTNSPRRARSVASQSIIAYTMSLGAENSVAYSNNSIAIPTNFTISVTTEILPVSMTKTSVDCTMYICGDSTECSNLLLQYGSFCTQLNRALTGIAVEQDKNTQEVFAQVKQIYKTPPIKDFGGFNFSQILPDPSKPSKRSFIEDLLFNKVTLADAGFIKQYGDCLGDIAARDLICAQKFNGLTVLPPLLTDEMIAQYTSALLAGTITSGWTFCAGAALQIPFAMQMAYRFNGIGVTQNVLYENQKLIANQFNSAIGKIQDSLFSTASALGKLQDVVNQNAQALNTLVKQLSSNFGAISSVLNDILSRLDKVEAEVQIDRLITGRLQSLQTYVTQQLIRAAEIRASANLAATKMSECVCGQSKRVDFCGKGYHLMSFPQSAPHGVVFLHVTYVPAQEKNFTTAPAICHDGKAHFPREGVFVSNGTHWFVTQRNFYEPQIITTDNTFVSGNCDVVIGIVNNTVYDPLQPELDSFKEELDKYFKNHTSPDVDLGDISGINASVVNIQKEIDRLNEVAKNLNESLIDLQELGKYEQYIKGGGSGGGQIYEGKLTAEGLRFGIVASRFNHALVDRLVEGAIDAIVRHGGREEDITLVRVPGSWEIPVAAGELARKEDIDAVIAIGVLIRGATPHFDYIASEVSKGLADLSLELRKPITFGVITADTLEQAIERAGTKHGNKGWEAALSAIEMANLFKSLR

SEQ ID NO: 4192 - protein, 1371 aa, Artificial Sequence
  SARS-CoV-2/Finland/FIN-313/2020__EPI_ISL_414641 spike protein (1-1211)(G889C_L1034C) LumSynth construct
MFVFLVLLPLVSSQCVNLTTRTQLPPAYTNSFTRGVYYPDKVFRSSVLHSTQDLFLPFFSNVTWFHAIHVSGTNGTKRFDNPVLPFNDGVYFASTEKSNIIRGWIFGTTLDSKTQSLLIVNNATNVVIKVCEFQFCNDPFLGVYYHKNNKSWMESEFRVYSSANNCTFEYVSQPFLMDLEGKQGNFKNLREFVFKNIDGYFKIYSKHTPINLVRDLPQGFSALEPLVDLPIGINITRFKTLLALHRSYLTPGDSSSGWTAGAAAYYVGYLQPRTFLLKYNENGTITDAVDCALDPLSETKCTLKSFTVEKGIYQTSNFRVQPTESIVRFPNITNLCPFGEVFNATRFASVYAWNRKRISNCVADYSVLYNSASFSTFKCYGVSPTKLNDLCFTNVYADSFVIRGDEVRQIAPGQTGKIADYNYKLPDDFTGCVIAWNSNNLDSKVGGNYNYLYRLFRKSNLKPFERDISTEIYQAGSTPCNGVEGFNCYFPLQSYGFQPTNGVGYQPYRVVVLSFELLHAPATVCGPKKSTNLVKNKCVNFNFNGLTGTGVLTESNKKFLPFQQFGRDIADTTDAVRDPQTLEILDITPCSFGGVSVITPGTNTSNQVAVLYQGVNCTEVPVAIHADQLTPTWRVYSTGSNVFQTRAGCLIGAEHVNNSYECDIPIGAGICASYQTQTNSPRRARSVASQSIIAYTMSLGAENSVAYSNNSIAIPTNFTISVTTEILPVSMTKTSVDCTMYICGDSTECSNLLLQYGSFCTQLNRALTGIAVEQDKNTQEVFAQVKQIYKTPPIKDFGGFNFSQILPDPSKPSKRSFIEDLLFNKVTLADAGFIKQYGDCLGDIAARDLICAQKFNGLTVLPPLLTDEMIAQYTSALLAGTITSGWTFCAGAALQIPFAMQMAYRFNGIGVTQNVLYENQKLIANQFNSAIGKIQDSLSSTASALGKLQDVVNQNAQALNTLVKQLSSNFGAISSVLNDILSRLDKVEAEVQIDRLITGRLQSLQTYVTQQLIRAAEIRASANLAATKMSECVCGQSKRVDFCGKGYHLMSFPQSAPHGVVFLHVTYVPAQEKNFTTAPAICHDGKAHFPREGVFVSNGTHWFVTQRNFYEPQIITTDNTFVSGNCDVVIGIVNNTVYDPLQPELDSFKEELDKYFKNHTSPDVDLGDISGINASVVNIQKEIDRLNEVAKNLNESLIDLQELGKYEQYIKGGGSGGGQIYEGKLTAEGLRFGIVASRFNHALVDRLVEGAIDAIVRHGGREEDITLVRVPGSWEIPVAAGELARKEDIDAVIAIGVLIRGATPHFDYIASEVSKGLADLSLELRKPITFGVITADTLEQAIERAGTKHGNKGWEAALSAIEMANLFKSLR

SEQ ID NO: 4193 - protein, 1371 aa, Artificial Sequence
  SARS-CoV-2/Netherlands/ZuidHolland_2/2020__EPI_ISL_414556 spike protein (1-1211)(G889C_L1034C) LumSynth construct
MFVFLVLLPLVSSQCVNLTTRTQLPPAYTNSFTRGVYYPDKVFRSSVLHSTQDLFLPFFSNVTWFHAIHVSGTNGTKRFDNPVLPFNDGVYFASTEKSNIIRGWIFGTTLDSKTQSLLIVNNATNVVIKVCEFQFCNDPFLGVYYHKNNKSWMESEFRVYSSANNCTFEYVSQPFLMDLEGKQGNFKNLREFVFKNIDGYFKIYSKHTPINLVRDLPQGFSALEPLVDLPIGINITRFQTLLALHRSYLTPGDSSSGWTAGAAAYYVGYLQPRTFLLKYNENGTITDAVDCALDPLSETKCTLKSFTVEKGIYQTSNFRVQPTESIVRFPNITNLCPFGEVFNATRFASVYAWNRKRISNCVADYSVLYNSASFSTFKCYGVSPTKLNDLCFTNVYADSFVIRGDEVRQIAPGQTGKIADYNYKLPDDFTGCVIAWNSNNLDSKVGGNYNYLYRLFRKSNLKPFERDISTEIYQAGSTPCNGVEGFNCYFPLQSYGFQPTNGVGYQPYRVVVLSFELLHAPATVCGPKKSTNLVKNKCVNFNFNGLTGTGVLTESNKKFLPFQQFGRDIADTTDAVRDPQTLEILDITPCSFGGVSVITPGTNTSNQVAVLYQGVNCTEVPVAIHADQLTPTWRVYSTGSNVFQTRAGCLIGAEHVNNSYECDIPIGAGICASYQTQTNSPRRARSVASQSIIAYTMSLGAENSVAYSNNSIAIPTNFTISVTTEILPVSMTKTSVDCTMYICGDSTECSNLLLQYGSFCTQLNRALTGIALEQDKNTQEVFAQVKQIYKTPPIKDFGGFNFSQILPDPSKPSKRSFIEDLLFNKVTLADAGFIKQYGDCLGDIAARDLICAQKFNGLTVLPPLLTDEMIAQYTSALLAGTITSGWTFCAGAALQIPFAMQMAYRFNGIGVTQNVLYENQKLIANQFNSAIGKIQDSLSSTASALGKLQDVVNQNAQALNTLVKQLSSNFGAISSVLNDILSRLDKVEAEVQIDRLITGRLQSLQTYVTQQLIRAAEIRASANLAATKMSECVCGQSKRVDFCGKGYHLMSFPQSAPHGVVFLHVTYVPAQEKNFTTAPAICHDGKAHFPREGVFVSNGTHWFVTQRNFYEPQIITTDNTFVSGNCDVVIGIVNNTVYDPLQPELDSFKEELDKYFKNHTSPDVDLGDISGINASVVNIQKEIDRLNEVAKNLNESLIDLQELGKYEQYIKGGGSGGGQIYEGKLTAEGLRFGIVASRFNHALVDRLVEGAIDAIVRHGGREEDITLVRVPGSWEIPVAAGELARKEDIDAVIAIGVLIRGATPHFDYIASEVSKGLADLSLELRKPITFGVITADTLEQAIERAGTKHGNKGWEAALSAIEMANLFKSLR

SEQ ID NO: 4194 - protein, 1371 aa, Artificial Sequence
  SARS-CoV-2/USA/WA-UW31/2020__EPI_ISL_414618 spike protein (1-1211)(G889C_L1034C) LumSynth construct
MFVFLVLLPLVSSQCVNLTTRTQLPPAYTNSFTRGVYYPDKVFRSSVLHSTQDLFLPFFSNVTWFHAIHVSGTNGTKRFDNPVLPFNDGVYFASTEKSNIIRGWIFGTTLDSKTQSLLIVNNATNVVIKVCEFQFCNDPFLGVYYHKNNKSWMESEFRVYSSANNCTFEYVSQPFLMDLEGKQGNFKNLREFVFKNIDGYFKIYSKHTPINLVRDLPQGFSALEPLVDLPIGINITRFQTLLALHRSYLTPGDSSSGWTAGAAAYYVGYLQPRTFLLKYNENGTITDAVDCALDPLSETKCTLKSFTVEKGIYQTSNFRVQPTESIVRFPNITNLCPFGEVFNATRFASVYAWNRKRISNCVADYSVLYNSASFSTFKCYGVSPTKLNDLCFTNVYADSFVIRGDEVRQIAPGQTGKIADYNYKLPDDFTGCVIAWNSNNLDSKVGGNYNYLYRLFRKSNLKPFERDISTEIYQAGSTPCNGAEGFNCYFPLQSYGFQPTNGVGYQPYRVVVLSFELLHAPATVCGPKKSTNLVKNKCVNFNFNGLTGTGVLTESNKKFLPFQQFGRDIADTTDAVRDPQTLEILDITPCSFGGVSVITPGTNTSNQVAVLYQDVNCTEVPVAIHADQLTPTWRVYSTGSNVFQTRAGCLIGAEHVNNSYECDIPIGAGICASYQTQTNSPRRARSVASQSIIAYTMSLGAENSVAYSNNSIAIPTNFTISVTTEILPVSMTKTSVDCTMYICGDSTECSNLLLQYGSFCTQLNRALTGIAVEQDKNTQEVFAQVKQIYKTPPIKDFGGFNFSQILPDPSKPSKRSFIEDLLFNKVTLADAGFIKQYGDCLGDIAARDLICAQKFNGLTVLPPLLTDEMIAQYTSALLAGTITSGWTFCAGAALQIPFAMQMAYRFNGIGVTQNVLYENQKLIANQFNSAIGKIQDSLSSTASALGKLQDVVNQNAQALNTLVKQLSSNFGAISSVLNDILSRLDKVEAEVQIDRLITGRLQSLQTYVTQQLIRAAEIRASANLAATKMSECVCGQSKRVDFCGKGYHLMSFPQSAPHGVVFLHVTYVPAQEKNFTTAPAICHDGKAHFPREGVFVSNGTHWFVTQRNFYEPQIITTDNTFVSGNCDVVIGIVNNTVYDPLQPELDSFKEELDKYFKNHTSPDVDLGDISGINASVVNIQKEIDRLNEVAKNLNESLIDLQELGKYEQYIKGGGSGGGQIYEGKLTAEGLRFGIVASRFNHALVDRLVEGAIDAIVRHGGREEDITLVRVPGSWEIPVAAGELARKEDIDAVIAIGVLIRGATPHFDYIASEVSKGLADLSLELRKPITFGVITADTLEQAIERAGTKHGNKGWEAALSAIEMANLFKSLR

SEQ ID NO: 4195 - protein, 1371 aa, Artificial Sequence
  SARS-CoV-2/South Korea/SNU01/2020__EPI_ISL_411929 spike protein (1-1211)(G889C_L1034C) LumSynth construct
MFVFLVLLPLVSSQCVNLTTRTQLPPAYTNSFTRGVYYPDKVFRSSVLHSTQDLFLPFFSNVTWFHAIHVSGTNGTKRFDNPVLPFNDGVYFASTEKSNIIRGWIFGTTLDSKTQSLLIVNNATNVVIKVCEFQFCNDPFLGVYYHKNNKSWMESEFRVYSSANNCTFEYVSQPFLMDLEGKQGNFKNLREFVFKNIDGYFKIYSKHTPINLVRDLPQGFWALEPLVDLPIGINITRFQTLLALHRSYLTPGDSSSGWTAGAAAYYVGYLQPRTFLLKYNENGTITDAVDCALDPLSETKCTLKSFTVEKGIYQTSNFRVQPTESIVRFPNITNLCPFGEVFNATRFASVYAWNRKRISNCVADYSVLYNSASFSTFKCYGVSPTKLNDLCFTNVYADSFVIRGDEVRQIAPGQTGKIADYNYKLPDDFTGCVIAWNSNNLDSKVGGNYNYLYRLFRKSNLKPFERDISTEIYQAGSTPCNGVEGFNCYFPLQSYGFQPTNGVGYQPYRVVVLSFELLHAPATVCGPKKSTNLVKNKCVNFNFNGLTGTGVLTESNKKFLPFQQFGRDIADTTDAVRDPQTLEILDITPCSFGGVSVITPGTNTSNQVAVLYQDVNCTEVPVAIHADQLTPTWRVYSTGSNVFQTRAGCLIGAEHVNNSYECDIPIGAGICASYQTQTNSPRRARSVASQSIIAYTMSLGAENSVAYSNNSIAIPTNFTISVTTEILPVSMTKTSVDCTMYICGDSTECSNLLLQYGSFCTQLNRALTGIAVEQDKNTQEVFAQVKQIYKTPPIKDFGGFNFSQILPDPSKPSKRSFIEDLLFNKVTLADAGFIKQYGDCLGDIAARDLICAQKFNGLTVLPPLLTDEMIAQYTSALLAGTITSGWTFCAGAALQIPFAMQMAYRFNGIGVTQNVLYENQKLIANQFNSAIGKIQDSLSSTASALGKLQDVVNQNAQALNTLVKQLSSNFGAISSVLNDILSRLDKVEAEVQIDRLITGRLQSLQTYVTQQLIRAAEIRASANLAATKMSECVCGQSKRVDFCGKGYHLMSFPQSAPHGVVFLHVTYVPAQEKNFTTAPAICHDGKAHFPREGVFVSNGTHWFVTQRNFYEPQIITTDNTFVSGNCDVVIGIVNNTVYDPLQPELDSFKEELDKYFKNHTSPDVDLGDISGINASVVNIQKEIDRLNEVAKNLNESLIDLQELGKYEQYIKGGGSGGGQIYEGKLTAEGLRFGIVASRFNHALVDRLVEGAIDAIVRHGGREEDITLVRVPGSWEIPVAAGELARKEDIDAVIAIGVLIRGATPHFDYIASEVSKGLADLSLELRKPITFGVITADTLEQAIERAGTKHGNKGWEAALSAIEMANLFKSLR

SEQ ID NO: 4196 - protein, 1371 aa, Artificial Sequence
  SARS-CoV-2/China/WF0004/2020__EPI_ISL_413694 spike protein (1-1211)(G889C_L1034C) LumSynth construct
MFVFLVLLPLVSSQCVNLTTRTQLPPAYTNSFTRGVYYPDKVFRSSVLHSTQDLFLPFFSNVTWFHAIHVSGTNGTKRFDNPVLPFNDGVYFASTEKSNIIRGWIFGTTLDSKTQSLLIVNNATNVVIKVCEFQFCNDPFLGVYYHKNNKSWTESEFRVYSSANNCTFEYVSQPFLMDLEGKQGNFKNLREFVFKNIDGYFKIYSKHTPINLVRDLPQGFSALEPLVDLPIGINITRFQTLLALHRSYLTPGDSSSGWTAGAAAYYVGYLQPRTFLLKYNENGTITDAVDCALDPLSETKCTLKSFTVEKGIYQTSNFRVQPTESIVRFPNITNLCPFGEVFNATRFASVYAWNRKRISNCVADYSVLYNSASFSTFKCYGVSPTKLNDLCFTNVYADSFVIRGDEVRQIAPGQTGKIADYNYKLPDDFTGCVIAWNSNNLDSKVGGNYNYLYRLFRKSNLKPFERDISTEIYQAGSTPCNGVEGFNCYFPLQSYGFQPTNGVGYQPYRVVVLSFELLHAPATVCGPKKSTNLVKNKCVNFNFNGLTGTGVLTESNKKFLPFQQFGRDIADTTDAVRDPQTLEILDITPCSFGGVSVITPGTNTSNQVAVLYQDVNCTEVPVAIHADQLTPTWRVYSTGSNVFQTRAGCLIGAEHVNNSYECDIPIGAGICASYQTQTNSPRRARSVASQSIIAYTMSLGAENSVAYSNNSIAIPTNFTISVTTEILPVSMTKTSVDCTMYICGDSTECSNLLLQYGSFCTQLNRALTGIAVEQDKNTQEVFAQVKQIYKTPPIKDFGGFNFSQILPDPSKPSKRSFIEDLLFNKVTLADAGFIKQYGDCLGDIAARDLICAQKFNGLTVLPPLLTDEMIAQYTSALLAGTITSGWTFCAGAALQIPFAMQMAYRFNGIGVTQNVLYENQKLIANQFNSAIGKIQDSLSSTASALGKLQDVVNQNAQALNTLVKQLSSNFGAISSVLNDILSRLDKVEAEVQIDRLITGRLQSLQTYVTQQLIRAAEIRASANLAATKMSECVCGQSKRFDFCGKGYHLMSFPQSAPHGVVFLHVTYVPAQEKNFTTAPAICHDGKAHFPREGVFVSNGTHWFVTQRNFYEPQIITTDNTFVSGNCDVVIGIVNNTVYDPLQPELDSFKEELDKYFKNHTSPDVDLGDISGINASVVNIQKEIDRLNEVAKNLNESLIDLQELGKYEQYIKGGGSGGGQIYEGKLTAEGLRFGIVASRFNHALVDRLVEGAIDAIVRHGGREEDITLVRVPGSWEIPVAAGELARKEDIDAVIAIGVLIRGATPHFDYIASEVSKGLADLSLELRKPITFGVITADTLEQAIERAGTKHGNKGWEAALSAIEMANLFKSLR

SEQ ID NO: 4197 - protein, 1371 aa, Artificial Sequence
  SARS-CoV-2/China/WF0028/2020__EPI_ISL_413791 spike protein (1-1211)(G889C_L1034C) LumSynth construct
MFVFLVLLPLVSSQCVNLTTRTQLPPAYTNSFTRGVYYPDKVFRSSVLHSTQDLFLPFFSNVTWFHAIHVSGTNGTKRFDNPVLPFNDGVYFASTEKSNIIRGWIFGTTLDSKTQSLLIVNNATNVVIKVCEFQFCNDPFLGVYYHKNNKSWMESEFRVYSSANNCTFEYVSQPFLMDLEGKQGNFKNLREFVFKNIDGYFKIYSKHTPINLVRDLPQGFSALEPLVDLPIGINITRFQTLLALHRSYLTPGDSSSGWTAGAAAYYVGYLQPRTFLLKYNENGTITDAVDCALDPLSETKCTLKSFTVEKGIYQTSNFRVQPTESIVRFPNITNLCPFGEVFNATRFASVYAWNRKRISNCVADYSVLYNSASFSTFKCYGVSPTKLNDLCFTNVYADSFVIRGDEVRQIAPGQTGKIADYNYKLPDDFTGCVIAWNSNNLDSKVGGNYNYLYRLFRKSNLKPFERDISTEIYQAGSTPCNGVEGFNCYFPLQSYGFQPTNGVGYQPYRVVVLSFELLHAPATVCGPKKSTNLVKNKCVNFNFNGLTGTGVLTESNKKFLPFQQFGRDIADTTDAVRDPQTLEILDITPCSFGGVSVITPGTNTSNQVAVLYQDVNCTEVPVAIHADQLTPTWRVYSTGSNVFQTRAGCLIGAEHVNNSYECDIPIGAGICASYQTQTNSPRRARSVASQSIIAYTMSLGAENSVAYSNNSIAIPTNFTISVTTEILPVSMTKTSVDCTMYICGDSTECSNLLLQYGSFCTQLNRALTGIAVEQDKNTQEVFAQVKQIYKTPPIKDFGGFNFSQILPDPSKPSKRSFIEDLLFNKVTLADAGFIKQYGDCLGDIAARDLICAQKFNGLTVLPPLLTDEMIAQYTSALLAGTITSGWTFCAGAALQIPFAMQMAYRFNGIGVTQNVLYENQKLIANQFNSAIGKIQDSLSSTASALGKLQDVVNQNAQALNTLVKQLSSNFGAISSVLNDILSRLDKVEAEVQIDRLITGRLQSLQTYVTQQLIRAAEIRASANLAATKMSECVCGQSKRVDFCGKGYHLMSFPQSAPHGVVFLHVTYVPAQEKNFTTAPAICHDGKAHFPREGVFVSNGTHWFVTQRNFYEPQIITTDNTFVSGNCDVVIGIVNNTVYDPLQPELESFKEELDKYFKNHTSPDVDLGDISGINASVVNIQKEIDRLNEVAKNLNESLIDLQELGKYEQYIKGGGSGGGQIYEGKLTAEGLRFGIVASRFNHALVDRLVEGAIDAIVRHGGREEDITLVRVPGSWEIPVAAGELARKEDIDAVIAIGVLIRGATPHFDYIASEVSKGLADLSLELRKPITFGVITADTLEQAIERAGTKHGNKGWEAALSAIEMANLFKSLR

SEQ ID NO: 4198 - protein, 1371 aa, Artificial Sequence
  SARS-CoV-2/2019-nCoV/USA-CruiseA-18/2020__MT159716.1 spike protein (1-1211)(G889C_L1034C) LumSynth construct
MFVFLVLLPLVSSQCVNLTTRTQLPPAYTNSFTRGVYYPDKVFRSSVLHSTQDLFLPFFSNVTWFHAIHVSGTNGTKRFDNPVLPFNDGVYFASTEKSNIIRGWIFGTTLDSKTQSLLIVNNATNVVIKVCEFQFCNDPFLGVYYHKNNKSWMESELRVYSSANNCTFEYVSQPFLMDLEGKQGNFKNLREFVFKNIDGYFKIYSKHTPINLVRDLPQGFSALEPLVDLPIGINITRFQTLLALHRSYLTPGDSSSGWTAGAAAYYVGYLQPRTFLLKYNENGTITDAVDCALDPLSETKCTLKSFTVEKGIYQTSNFRVQPTESIVRFPNITNLCPFGEVFNATRFASVYAWNRKRISNCVADYSVLYNSASFSTFKCYGVSPTKLNDLCFTNVYADSFVIRGDEVRQIAPGQTGKIADYNYKLPDDFTGCVIAWNSNNLDSKVGGNYNYLYRLFRKSNLKPFERDISTEIYQAGSTPCNGVEGFNCYFPLQSYGFQPTNGVGYQPYRVVVLSFELLHAPATVCGPKKSTNLVKNKCVNFNFNGLTGTGVLTESNKKFLPFQQFGRDIADTTDAVRDPQTLEILDITPCSFGGVSVITPGTNTSNQVAVLYQDVNCTEVPVAIHADQLTPTWRVYSTGSNVFQTRAGCLIGAEHVNNSYECDIPIGAGICASYQTQTNSPRRARSVASQSIIAYTMSLGAENSVAYSNNSIAIPTNFTISVTTEILPVSMTKTSVDCTMYICGDSTECSNLLLQYGSFCTQLNRALTGIAVEQDKNTQEVFAQVKQIYKTPPIKDFGGFNFSQILPDPSKPSKRSFIEDLLFNKVTLADAGFIKQYGDCLGDIAARDLICAQKFNGLTVLPPLLTDEMIAQYTSALLAGTITSGWTFCAGAALQIPFAMQMAYRFNGIGVTQNVLYENQKLIANQFNSAIGKIQDSLSSTASALGKLQDVVNQNAQALNTLVKQLSSNFGAISSVLNDILSRLDKVEAEVQIDRLITGRLQSLQTYVTQQLIRAAEIRASANLAATKMSECVCGQSKRVDFCGKGYHLMSFPQSAPHGVVFLHVTYVPAQEKNFTTAPAICHDGKAHFPREGVFVSNGTHWFVTQRNFYEPQIITTDNTFVSGNCDVVIGIVNNTVYDPLQPELDSFKEELDKYFKNHTSPDVDLGDISGINASVVNIQKEIDRLNEVAKNLNESLIDLQELGKYEQYIKGGGSGGGQIYEGKLTAEGLRFGIVASRFNHALVDRLVEGAIDAIVRHGGREEDITLVRVPGSWEIPVAAGELARKEDIDAVIAIGVLIRGATPHFDYIASEVSKGLADLSLELRKPITFGVITADTLEQAIERAGTKHGNKGWEAALSAIEMANLFKSLR

SEQ ID NO: 4199 - protein, 1371 aa, Artificial Sequence
  SARS-CoV-2/SARS-CoV-2/Yunnan-01/human/2020/CHN__MT049951.1 spike protein (1-1211)(G889C_L1034C) LumSynth construct
MFVFLVLLPLVSSQCVNLTTRTQLPPANTNSFTRGVYYPDKVFRSSVLHSTQDLFLPFFSNVTWFHAIHVSGTNGTKRFDNPVLPFNDGVYFASTEKSNIIRGWIFGTTLDSKTQSLLIVNNATNVVIKVCEFQFCNDPFLGVYYHKNNKSWMESEFRVYSSANNCTFEYVSQPFLMDLEGKQGNFKNLREFVFKNIDGYFKIYSKHTPINLVRDLPQGFSALEPLVDLPIGINITRFQTLLALHRSYLTPGDSSSGWTAGAAAYYVGYLQPRTFLLKYNENGTITDAVDCALDPLSETKCTLKSFTVEKGIYQTSNFRVQPTESIVRFPNITNLCPFGEVFNATRFASVYAWNRKRISNCVADYSVLYNSASFSTFKCYGVSPTKLNDLCFTNVYADSFVIRGDEVRQIAPGQTGKIADYNYKLPDDFTGCVIAWNSNNLDSKVGGNYNYLYRLFRKSNLKPFERDISTEIYQAGSTPCNGVEGFNCYFPLQSYGFQPTNGVGYQPYRVVVLSFELLHAPATVCGPKKSTNLVKNKCVNFNFNGLTGTGVLTESNKKFLPFQQFGRDIADTTDAVRDPQTLEILDITPCSFGGVSVITPGTNTSNQVAVLYQDVNCTEVPVAIHADQLTPTWRVYSTGSNVFQTRAGCLIGAEHVNNSYECDIPIGAGICASYQTQTNSPRRARSVASQSIIAYTMSLGAENSVAYSNNSIAIPTNFTISVTTEILPVSMTKTSVDCTMYICGDSTECSNLLLQYGSFCTQLNRALTGIAVEQDKNTQEVFAQVKQIYKTPPIKDFGGFNFSQILPDPSKPSKRSFIEDLLFNKVTLADAGFIKQYGDCLGDIAARDLICAQKFNGLTVLPPLLTDEMIAQYTSALLAGTITSGWTFCAGAALQIPFAMQMAYRFNGIGVTQNVLYENQKLIANQFNSAIGKIQDSLSSTASALGKLQDVVNQNAQALNTLVKQLSSNFGAISSVLNDILSRLDKVEAEVQIDRLITGRLQSLQTYVTQQLIRAAEIRASANLAATKMSECVCGQSKRVDFCGKGYHLMSFPQSAPHGVVFLHVTYVPAQEKNFTTAPAICHDGKAHFPREGVFVSNGTHWFVTQRNFYEPQIITTDNTFVSGNCDVVIGIVNNTVYDPLQPELDSFKEELDKYFKNHTSPDVDLGDISGINASVVNIQKEIDRLNEVAKNLNESLIDLQELGKYEQYIKGGGSGGGQIYEGKLTAEGLRFGIVASRFNHALVDRLVEGAIDAIVRHGGREEDITLVRVPGSWEIPVAAGELARKEDIDAVIAIGVLIRGATPHFDYIASEVSKGLADLSLELRKPITFGVITADTLEQAIERAGTKHGNKGWEAALSAIEMANLFKSLR

SEQ ID NO: 4200 - protein, 1371 aa, Artificial Sequence
  SARS-CoV-2/USA/WA-UW292/2020__EPI_ISL_418077 spike protein (1-1211)(G889C_L1034C) LumSynth construct
MFVFLVLLPLVSSQCVNLTTRTQLPPAYTNSFTRGVYYPDKVFRSSVLHSTQDLFLPFFSNVTWFHAIHVSGTNGTKRFDNPVLPFNDGVYFASTEKSNIIRGWIFGTTLDSKTQSLLIVNNATNVVIKVCEFQFCNDPFLGVYYHKNNKSWMESEFRVYSSANNCTFEYVSQPFLMDLEGKQGNFKNLREFVFKNIDGYFKIYSKHTPINLVRDLPQGFSALEPLVDLPIGINITRFQTLLALHRSYLTPGDSSSGWTAGAAAYYVGYLQPRTFLLKYNENGTITDAVDCALDPLSETKCTLKSFTVEKGIYQTSNFRVQPTESIVRFPNITNLCPFGEVFNATRFASVYAWNRKRISNCVADYSVLYNSASFSTFKCYGVSPTKLNDLCFTNVYADSFVIRGDEVRQIAPGQTGKIADYNYKLPDDFTGCVIAWNSNNLDSKVGGNYNYLYRLFRKSNLKPFERDISTEIYQASSTPCNGVEGFNCYFPLQSYGFQPTNGVGYQPYRVVVLSFELLHAPATVCGPKKSTNLVKNKCVNFNFNGLTGTGVLTESNKKFLPFQQFGRDIADTTDAVRDPQTLEILDITPCSFGGVSVITPGTNTSNQVAVLYQDVNCTEVPVAIHADQLTPTWRVYSTGSNVFQTRAGCLIGAEHVNNSYECDIPIGAGICASYQTQTNSPRRARSVASQSIIAYTMSLGAENSVAYSNNSIAIPTNFTISVTTEILPVSMTKTSVDCTMYICGDSTECSNLLLQYGSFCTQLNRALTGIAVEQDKNTQEVFAQVKQIYKTPPIKDFGGFNFSQILPDPSKPSKRSFIEDLLFNKVTLADAGFIKQYGDCLGDIAARDLICAQKFNGLTVLPPLLTDEMIAQYTSALLAGTITSGWTFCAGAALQIPFAMQMAYRFNGIGVTQNVLYENQKLIANQFNSAIGKIQDSLSSTASALGKLQDVVNQNAQALNTLVKQLSSNFGAISSVLNDILSRLDKVEAEVQIDRLITGRLQSLQTYVTQQLIRAAEIRASANLAATKMSECVCGQSKRVDFCGKGYHLMSFPQSAPHGVVFLHVTYVPAQEKNFTTAPAICHDGKAHFPREGVFVSNGTHWFVTQRNFYEPQIITTDNTFVSGNCDVVIGIVNNTVYDPLQPELDSFKEELDKYFKNHTSPDVDLGDISGINASVVNIQKEIDRLNEVAKNLNESLIDLQELGKYEQYIKGGGSGGGQIYEGKLTAEGLRFGIVASRFNHALVDRLVEGAIDAIVRHGGREEDITLVRVPGSWEIPVAAGELARKEDIDAVIAIGVLIRGATPHFDYIASEVSKGLADLSLELRKPITFGVITADTLEQAIERAGTKHGNKGWEAALSAIEMANLFKSLR

SEQ ID NO: 4201 - protein, 1371 aa, Artificial Sequence
  SARS-CoV-2/Iceland/192/2020__EPI_ISL_417819 spike protein (1-1211)(G889C_L1034C) LumSynth construct
MFVFFVLLPLVSSQCVNLTTRTQLPPAYTNSFTRGVYYPDKVFRSSVLHSTQDLFLPFFSNVTWFHAIHVSGTNGTKRFDNPVLPFNDGVYFASTEKSNIIRGWIFGTTLDSKTQSLLIVNNATNVVIKVCEFQFCNDPFLGVYYHKNNKSWMESEFRVYSSANNCTFEYVSQPFLMDLEGKQGNFKNLREFVFKNIDGYFKIYSKHTPINLVRDLPQGFSALEPLVDLPIGINITRFQTLLALHRSYLTPGDSSSGWTAGAAAYYVGYLQPRTFLLKYNENGTITDAVDCALDPLSETKCTLKSFTVEKGIYQTSNFRVQPTESIVRFPNITNLCPFGEVFNATRFASVYAWNRKRISNCVADYSVLYNSASFSTFKCYGVSPTKLNDLCFTNVYADSFVIRGDEVRQIAPGQTGKIADYNYKLPDDFTGCVIAWNSNNLDSKVGGNYNYLYRLFRKSNLKPFERDISTEIYQAGSTPCNGVEGFNCYFPLQSYGFQPTNGVGYQPYRVVVLSFELLHAPATVCGPKKSTNLVKNKCVNFNFNGLTGTGVLTESNKKFLPFQQFGRDIADTTDAVRDPQTLEILDITPCSFGGVSVITPGTNTSNQVAVLYQGVNCTEVPVAIHADQLTPTWRVYSTGSNVFQTRAGCLIGAEHVNNSYECDIPIGAGICASYQTQTNSPRRARSVASQSIIAYTMSLGAENSVAYSNNSIAIPTNFTISVTTEILPVSMTKTSVDCTMYICGDSTECSNLLLQYGSFCTQLNRALTGIAVEQDKNTQEVFAQVKQIYKTPPIKDFGGFNFSQILPDPSKPSKRSFIEDLLFNKVTLADAGFIKQYGDCLGDIAARDLICAQKFNGLTVLPPLLTDEMIAQYTSALLAGTITSGWTFCAGAALQIPFAMQMAYRFNGIGVTQNVLYENQKLIANQFNSAIGKIQDSLSSTASALGKLQDVVNQNAQALNTLVKQLSSNFGAISSVLNDILSRLDKVEAEVQIDRLITGRLQSLQTYVTQQLIRAAEIRASANLAATKMSECVCGQSKRVDFCGKGYHLMSFPQSAPHGVVFLHVTYVPAQEKNFTTAPAICHDGKAHFPREGVFVSNGTHWFVTQRNFYEPQIITTDNTFVSGNCDVVIGIVNNTVYDPLQPELDSFKEELDKYFKNHTSPDVDLGDISGINASVVNIQKEIDRLNEVAKNLNESLIDLQELGKYEQYIKGGGSGGGQIYEGKLTAEGLRFGIVASRFNHALVDRLVEGAIDAIVRHGGREEDITLVRVPGSWEIPVAAGELARKEDIDAVIAIGVLIRGATPHFDYIASEVSKGLADLSLELRKPITFGVITADTLEQAIERAGTKHGNKGWEAALSAIEMANLFKSLR

SEQ ID NO: 4202 - protein, 1371 aa, Artificial Sequence
  SARS-CoV-2/Belgium/ULG-6939/2020__EPI_ISL_417020 spike protein (1-1211)(G889C_L1034C) LumSynth construct
MFVFLVLLPLVSSQCVNLTTRTQLPPAYTNSFTRGVYYPDKVFRSSVLHSTQDLFLPFFSNVTWFHAIHVSGTNGTKRFDNPVLPFNDGVYFASTEKSNIIRGWIFGTTLDSKTQSLLIVNNATNVVIKVCEFQFCNDPFLGVYYHKNNKSWMESEFRVYSSANNCTFEYVSQPFLMDLEGKQGNFKNLREFVFKNIDGYFKIYSKHTPINLVRDLPQGFSALEPLVDLPIGINITRFQTLLALHRSYLTPGDSSSGWTAGAAAYYVGYLQPRTFLLKYNENGTITDAVDCALDPLSETKCTLKSFTVEKGIYQTSNFRVQPTESIVRFPNITNLCPFGEVFNATRFASVYAWNRKRISNCVADYSVLYNSASFSTFKCYGVSPTKLNDLCFTNVYADSFVIRGDEVRQIAPGQTGKIADYNYKLPDDFTGCVIAWNSNNLDSKVGGNYNYLYRLFRKSNLKPFERDISTEIYQAGSTPCNGVEGFNCYFPLQSYGFQPTNGVGYQPYRVVVLSFELLHAPATVCGPKKSTNLVKNKCVNFNFNGLTGTGVLTESNKKFLPFQQFGRDIADTTDAVRDPQTLEILDITPCSFGGVSVITPGTNTSNQVAVLYQGVNCTEVPVAIHADQLTPTWRVYSTGSNVFQTRAGCLIGAEHVNNSYECDIPIGAGICASYQTQTNSPRRARSVASQSIIAYTMSLGAENSVVYSNNSIAIPTNFTISVTTEILPVSMTKTSVDCTMYICGDSTECSNLLLQYGSFCTQLNRALTGIAVEQDKNTQEVFAQVKQIYKTPPIKDFGGFNFSQILPDPSKPSKRSFIEDLLFNKVTLADAGFIKQYGDCLGDIAARDLICAQKFNGLTVLPPLLTDEMIAQYTSALLAGTITSGWTFCAGAALQIPFAMQMAYRFNGIGVTQNVLYENQKLIANQFNSAIGKIQDSLSSTASALGKLQDVVNQNAQALNTLVKQLSSNFGAISSVLNDILSRLDKVEAEVQIDRLITGRLQSLQTYVTQQLIRAAEIRASANLAATKMSECVCGQSKRVDFCGKGYHLMSFPQSAPHGVVFLHVTYVPAQEKNFTTAPAICHDGKAHFPREGVFVSNGTHWFVTQRNFYEPQIITTDNTFVSGNCDVVIGIVNNTVYDPLQPELDSFKEELDKYFKNHTSPDVDLGDISGINASVVNIQKEIDRLNEVAKNLNESLIDLQELGKYEQYIKGGGSGGGQIYEGKLTAEGLRFGIVASRFNHALVDRLVEGAIDAIVRHGGREEDITLVRVPGSWEIPVAAGELARKEDIDAVIAIGVLIRGATPHFDYIASEVSKGLADLSLELRKPITFGVITADTLEQAIERAGTKHGNKGWEAALSAIEMANLFKSLR

SEQ ID NO: 4203 - protein, 1371 aa, Artificial Sequence
  SARS-CoV-2/France/HF2496/2020__EPI_ISL_418231 spike protein (1-1211)(G889C_L1034C) LumSynth construct
MFVFLVLLPLVSSQCVNLTTRTQLPPAYTNSFTRGVYYPDKVFRSSVLHSTQDLFLPFFSNVTWFHAIHVSGTNGTKRFDNPVLPFNDGVYFASTEKSNIIRGWIFGTTLDSKTQSLLIVNNATNVVIKVCEFQFCNDPFLGVYYHKNNKSWMESEFRVYSSANNCTFEYVSQPFLMDLEGKQGNFKNLREFVFKNIDGYFKIYSKHTPINLVRDLPQGFSALEPLVDLPIGINITRFQTLLALHRSYLTPGDSSSGWTAGAAAYYVGYLQPRTFLLKYNENGTITDAVDCALDPLSETKCTLKSFTVEKGIYQTSNFRVQPTESIVRFPNITNLCPFGEVFNATRFASVYAWNRKRISNCVADYSVLYNSASFSTFKCYGVSPTKLNDLCFTNVYADSFVIRGDEVRQIAPGQTGKIADYNYKLPDDFTGCVIAWNSNNLDSKVGGNYNYLYRLFRKSNLKPFERDISTEIYQAGSTPCNGVEGFNCYFPLQSYGFQPTNGVGYQPYRVVVLSFELLHAPATVCGPKKSTNLVKNKCVNFNFNGLTGTGVLTESNKKFLPFQQFGRDIADTTDAVRDPQTLEILDITPCSFGGVSVITPGTNTSNQVAVLYQGVNCTEVPVAIHADQLTPTWRVYSTGSNVFQTRAGCLIGAEHVNNSYECDIPIGAGICASYQTQTNSPRRARSVASQSIIAYTMSLGAENSVAYSNNSIAIPTNFTISVTTEILPVSMTKTSVDCTMYICGDSTECSNLLLQYGSFCTQLNRALTGIAVEQDKNTQEVFAQVKQIYKTPPIKDFGGFNFSQILPDPSKPSKRSFIEDLLFNKVTLADAGFIKQYGDCLGDIVARDLICAQKFNGLTVLPPLLTDEMIAQYTSALLAGTITSGWTFCAGAALQIPFAMQMAYRFNGIGVTQNVLYENQKLIANQFNSAIGKIQDSLSSTASALGKLQDVVNQNAQALNTLVKQLSSNFGAISSVLNDILSRLDKVEAEVQIDRLITGRLQSLQTYVTQQLIRAAEIRASANLAATKMSECVCGQSKRVDFCGKGYHLMSFPQSAPHGVVFLHVTYVPAQEKNFTTAPAICHDGKAHFPREGVFVSNGTHWFVTQRNFYEPQIITTDNTFVSGNCDVVIGIVNNTVYDPLQPELDSFKEELDKYFKNHTSPDVDLGDISGINASVVNIQKEIDRLNEVAKNLNESLIDLQELGKYEQYIKGGGSGGGQIYEGKLTAEGLRFGIVASRFNHALVDRLVEGAIDAIVRHGGREEDITLVRVPGSWEIPVAAGELARKEDIDAVIAIGVLIRGATPHFDYIASEVSKGLADLSLELRKPITFGVITADTLEQAIERAGTKHGNKGWEAALSAIEMANLFKSLR

SEQ ID NO: 4204 - protein, 1371 aa, Artificial Sequence
  SARS-CoV-2/USA/WA-UW291/2020__EPI_ISL_418076 spike protein (1-1211)(G889C_L1034C) LumSynth construct
MFVFLVLLPLVSSQCVNLTTRTQLPPAYTNSFTRGVYYPDKVFRSSVLHSTQDLFLPFFSNVTWFHAIHVSGTNGTKRFDNPVLPFNDGVYFASTEKSNIIRGWIFGTTLDSKTQSLLIVNNATNVVIKVCEFQFCNDPFLGVYYHKNNKSWMESEFRVYSSANNCTFEYVSQPFLMDLEGKQGNFKNLREFVFKNIDGYFKIYSKHTPINLVRDLPQGFSALEPLVDLPIGINITRFQTLLALHRSYLTPGDSSSGWTAGAAAYYVGYLQPRTFLLKYNENGTITDAVDCALDPLSETKCTLKSFTVEKGIYQTSNFRVQPTESIVRFPNITNLCPFGEVFNATRFASVYAWNRKRISNCVADYSVLYNSASFSTFKCYGVSPTKLNDLCFTNVYADSFVIRGDEVRQIAPGQTGKIADYNYKLPDDFTGCVIAWNSNNLDSKVGGNYNYLYRLFRKSNLKPFERDISTEIYQAGSTPCNGVEGFNCYFPLQSYGFQPTNGVGYQPYRVVVLSFELLHAPATVCGPKKSTNLVKNKCVNFNFNGLTGTGVLTESNKKFLPFQQFGRDIADTTDAVRDPQTLEILDITPCSFGGVSVITPGTNTSNQVAVLYQGVNCTEVPVAIHADQLTPTWRVYSTGSNVFQTRAGCLIGAEHVNNSYECDIPIGAGICASYQTQTNSPRRARSVASQSIIAYTMSLGAENSVAYSNNSIAIPTNFTISVTTEILPVSMTKTSVDCTMYICGDSTECSNLLLQYGSFCTQLNRALTGIAVEQDKNTQEVFAQVKQIYKTPPIKDFGGFNFSQILPDPSKPSKRSFIEDLLFNKVTLADAGFIKQYGDCLGDIAARDLICAQKFNGLTVLPPLLTDEMIAQYTSALLAGTITSGWTFCAGAALQIPFAMQMAYRFNGIGVTQNVLYENQKLIANQFNSAIGKIQYSLSSTASALGKLQDVVNQNAQALNTLVKQLSSNFGAISSVLNDILSRLDKVEAEVQIDRLITGRLQSLQTYVTQQLIRAAEIRASANLAATKMSECVCGQSKRVDFCGKGYHLMSFPQSAPHGVVFLHVTYVPAQEKNFTTAPAICHDGKAHFPREGVFVSNGTHWFVTQRNFYEPQIITTDNTFVSGNCDVVIGIVNNTVYDPLQPELDSFKEELDKYFKNHTSPDVDLGDISGINASVVNIQKEIDRLNEVAKNLNESLIDLQELGKYEQYIKGGGSGGGQIYEGKLTAEGLRFGIVASRFNHALVDRLVEGAIDAIVRHGGREEDITLVRVPGSWEIPVAAGELARKEDIDAVIAIGVLIRGATPHFDYIASEVSKGLADLSLELRKPITFGVITADTLEQAIERAGTKHGNKGWEAALSAIEMANLFKSLR

SEQ ID NO: 4205 - protein, 1371 aa, Artificial Sequence; identical to SEQ ID NO: 4168
  SARS-CoV-2/Portugal/PT0034/2020__EPI_ISL_418019 spike protein (1-1211)(G889C_L1034C) LumSynth construct

SEQ ID NO: 4206 - protein, 1371 aa, Artificial Sequence
  SARS-CoV-2/Iceland/202/2020__EPI_ISL_417750 spike protein (1-1211)(G889C_L1034C) LumSynth construct
MFVFLVLLPLVSSQCVNLTTRTQLPPAYTNSFTRGVYYPDKVFRSSVLHSTQDLFLPFFSNVTWFHAIHVSGTNGTKRFDNPVLPFNDGVYFASTEKSNIIRGWIFGTTLDSKTQSLLIVNNATNVVIKVCEFQFCNDPFLGVYYHKNNKSWMESEFRVYSSANNCTFEYVSQPFLMDLEGKQGNFKNLREFVFKNIDGYFKIYSKHTPINLVRDLPQGFSALEPLVDLPIGINITRFQTLLALHRSYLTPGDSSSGWTAGAAAYYVGYLQPRTFLLKYNENGTITDAVDCALDPLSETKCTLKSFTVEKGIYQTSNFRVQPTESIVRFPNITNLCPFGEVFNATRFASVYAWNRKRISNCVADYSVLYNSASFSTFKCYGVSPTKLNDLCFTNVYADSFVIRGDEVRQIAPGQTGKIADYNYKLPDDFTGCVIAWNSNNLDSKVGGNYNYLYRLFRKSNLKPFERDISTEIYQAGSTPCNGVEGFNCYFPLQSYGFQPTNGVGYQPYRVVVLSFELLHAPATVCGPKKSTNLVKNKCVNFNFNGLTGTGVLTESNKKFLPFQQFGRDIADTTDAVRDPQTLEILDITPCSFGGVSVITPGTNTSNQVAVLYQDVNCTEVPVAIHADQLTPTWRVYSTGSNVFQTRAGCLIGAEHVNNSYECDIPIGAGICASYQTQTNSPRRARSVASQSIIAYTMSLGAENSVAYSNNSIAIPTNFTISVTTEILPVSMTKTSVDCTMYICGDSTECSNLLLQYGSFCTQLNRALTGIAVEQDKNTQEVFAQVKQIYKTPPIKDFGGFNFSQILPDPSKPSKRSFIEDLLFNKVTLADAGFIKQYGDCLGDIAARDLICAQKFNGLTVLPPLLTDEMIAQYTSALLAGTITSGWTFCAGAALQIPFAMQMAYRFNGIGVTQNVLYENQKLIANQFNSAIGKIQDSLSSTASALGKLQDVVNQNAQALNTLVKQLSSNFGAISSVLNDILSRLDKVEAEVQIDRLITGRLQSLQTYVTQQLIRAAEIRASANLAATKMSECVCGQSKRVDFCGKGYHLMSFPQSAPHGVVFLHVTYVPAQEKNFTTAPAICHDGKAHFPREGVFVSNGTHWFVTQRNFYEPQIITTDNTFVSGNCDVVIGIVNNTVYDPLQPELDSFKEELDKYFKNHTSPDVDLGDIPGINASVVNIQKEIDRLNEVAKNLNESLIDLQELGKYEQYIKGGGSGGGQIYEGKLTAEGLRFGIVASRFNHALVDRLVEGAIDAIVRHGGREEDITLVRVPGSWEIPVAAGELARKEDIDAVIAIGVLIRGATPHFDYIASEVSKGLADLSLELRKPITFGVITADTLEQAIERAGTKHGNKGWEAALSAIEMANLFKSLR

SEQ ID NO: 4207 - protein, 1371 aa, Artificial Sequence
  SARS-CoV-2/USA/WA-UW261/2020__EPI_ISL_418046 spike protein (1-1211)(G889C_L1034C) LumSynth construct
MFVFLVLLPLVSSQCVNLTTRTQLPPAYTNSFTRGVYYPDKVFRSSVLHSTQDLFLPFFSNVTWFHAIHVSGTNGTKRFDNPVLPFNDGVYFASTEKSNIIRGWIFGTTLDSKTQSLLIVNNATNVVIKVCEFQFCNDPFLGVYYHKNNKSWMESEFRVYSSANNCTFEYVSQPFLMDLEGKQGNFKNLREFVFKNIDGYFKIYSKHTPINLVRDLPQGFSALEPLVDLPIGINITRFQTLLALHRSYLTPGDSSSGWTAGAAAYYVGYLQPRTFLLKYNENGTITDAVDCALDPLSETKCTLKSFTVEKGIYQTSNFRVQPTESIVRFPNITNLCPFGEVFNATRFTSVYAWNRKRISNCVADYSVLYNSASFSTFKCYGVSPTKLNDLCFTNVYADSFVIRGDEVRQIAPGQTGKIADYNYKLPDDFTGCVIAWNSNNLDSKVGGNYNYLYRLFRKSNLKPFERDISTEIYQAGSTPCNGVEGFNCYFPLQSYGFQPTNGVGYQPYRVVVLSFELLHAPATVCGPKKSTNLVKNKCVNFNFNGLTGTGVLTESNKKFLPFQQFGRDIADTTDAVRDPQTLEILDITPCSFGGVSVITPGTNTSNQVAVLYQDVNCTEVPVAIHADQLTPTWRVYSTGSNVFQTRAGCLIGAEHVNNSYECDIPIGAGICASYQTQTNSPRRARSVASQSIIAYTMSLGAENSVAYSNNSIAIPTNFTISVTTEILPVSMTKTSVDCTMYICGDSTECSNLLLQYGSFCTQLNRALTGIAVEQDKNTQEVFAQVKQIYKTPPIKDFGGFNFSQILPDPSKPSKRSFIEDLLFNKVTLADAGFIKQYGDCLGDIAARDLICAQKFNGLTVLPPLLTDEMIAQYTSALLAGTITSGWTFCAGAALQIPFAMQMAYRFNGIGVTQNVLYENQKLIANQFNSAIGKIQDSLSSTASALGKLQDVVNQNAQALNTLVKQLSSNFGAISSVLNDILSRLDKVEAEVQIDRLITGRLQSLQTYVTQQLIRAAEIRASANLAATKMSECVCGQSKRVDFCGKGYHLMSFPQSAPHGVVFLHVTYVPAQEKNFTTAPAICHDGKAHFPREGVFVSNGTHWFVTQRNFYEPQIITTDNTFVSGNCDVVIGIVNNTVYDPLQPELDSFKEELDKYFKNHTSPDVDLGDISGINASVVNIQKEIDRLNEVAKNLNESLIDLQELGKYEQYIKGGGSGGGQIYEGKLTAEGLRFGIVASRFNHALVDRLVEGAIDAIVRHGGREEDITLVRVPGSWEIPVAAGELARKEDIDAVIAIGVLIRGATPHFDYIASEVSKGLADLSLELRKPITFGVITADTLEQAIERAGTKHGNKGWEAALSAIEMANLFKSLR

SEQ ID NO: 4208 - protein, 1371 aa, Artificial Sequence
  SARS-CoV-2/Portugal/PT0035/2020__EPI_ISL_418020 spike protein (1-1211)(G889C_L1034C) LumSynth construct
MFVFLVLLPLVSSQCVNLTTRTQLPPAYTNSFTRGVYYPDKVFRSSVLHSTQDLFLPFFSNVTWFHAIHVSGTNGTKRFDNPVLPFNDGVYFASTEKSNIIRGWIFGTTLDSKTQSLLIVNNATNVVIKVCEFQFCNDPFLGVYYHKNNKSWMESEFRVYSSANNCTFEYVSQPFLMDLEGKQGNFKNLREFVFKNIDGYFKIYSKHTPINLVRDLPQGFSALEPLVDLPIGINITRFQTLLALHRSYLTPGDSSSGWTAGAAAYYVGYLQPRTFLLKYNENGTITDAVDCALDPLSETKCTLKSFTVEKGIYQTSNFRVQPTESIVRFPNITNLCPFGEVFNATRFASVYAWNRKRISNCVADYSVLYNSASFSTFKCYGVSPTKLNDLCFTNVYADSFVIRGDEVRQIAPGQTGKIADYNYKLPDDFTGCVIAWNSNNLDSKVGGNYNYLYRLFRKSNLKPFERDISTEIYQAGSTPCNGVEGFNCYFPLQSYGFQPTNGVGYQPYRVVVLSFELLHAPATVCGPKKSTNLVKNKCVNFNFNGLTGTGVLTESNKKFLPFQQFGRDIADTTDAVRDPQTLEILDITPCSFGGVSVITPGTNTSNQVAVLYQDVNCTEVPVAIHADQLTPTWRVYSTGSNVFQTRAGCLIGAEHVNNSYECDIPIGAGICASYQTQTNSPRRARSVASQSIIAYTMSLGAENSVAYSNNSIAIPTNFTISVTTEILPVSMTKTSVDCTMYICGDSTECSNLLLQYGSFCTQLNRALTGIAVEQDKNTQEVFAQVKQIYKTPPIKDFGGFNFSQILPDPSKPSKRSFIEDLLFNKVTLADAGFIKQYGDCLGDISARDLICAQKFNGLTVLPPLLTDEMIAQYTSALLAGTITSGWTFCAGAALQIPFAMQMAYRFNGIGVTQNVLYENQKLIANQFNSAIGKIQDSLSSTASALGKLQDVVNQNAQALNTLVKQLSSNFGAISSVLNDILSRLDKVEAEVQIDRLITGRLQSLQTYVTQQLIRAAEIRASANLAATKMSECVCGQSKRVDFCGKGYHLMSFPQSAPHGVVFLHVTYVPAQEKNFTTAPAICHDGKAHFPREGVFVSNGTHWFVTQRNFYEPQIITTDNTFVSGNCDVVIGIVNNTVYDPLQPELDSFKEELDKYFKNHTSPDVDLGDISGINASVVNIQKEIDRLNEVAKNLNESLIDLQELGKYEQYIKGGGSGGGQIYEGKLTAEGLRFGIVASRFNHALVDRLVEGAIDAIVRHGGREEDITLVRVPGSWEIPVAAGELARKEDIDAVIAIGVLIRGATPHFDYIASEVSKGLADLSLELRKPITFGVITADTLEQAIERAGTKHGNKGWEAALSAIEMANLFKSLR

SEQ ID NO: 4209 - protein, 1371 aa, Artificial Sequence
  SARS-CoV-2/USA/NY-NYUMC7/2020__EPI_ISL_418192 spike protein (1-1211)(G889C_L1034C) LumSynth construct
MFVFLVLLPLVSSQCVNLTTRTQLPPAYTNSFTRGVYYPDKVFRSSVLHSTQDLFLPFFSNVTWFHAIHVSGTNGTKRFDNPVLPFNDGVYFASTEKSNIIRGWIFGTTLDSKTQSLLIVNNATNVVIKVCEFQFCNDPFLGVYHHKNNKSWMESEFRVYSSANNCTFEYVSQPFLMDLEGKQGNFKNLREFVFKNIDGYFKIYSKHTPINLVRDLPQGFSALEPLVDLPIGINITRFQTLLALHRSYLTPGDSSSGWTAGAAAYYVGYLQPRTFLLKYNENGTITDAVDCALDPLSETKCTLKSFTVEKGIYQTSNFRVQPTESIVRFPNITNLCPFGEVFNATRFASVYAWNRKRISNCVADYSVLYNSASFSTFKCYGVSPTKLNDLCFTNVYADSFVIRGDEVRQIAPGQTGKIADYNYKLPDDFTGCVIAWNSNNLDSKVGGNYNYLYRLFRKSNLKPFERDISTEIYQAGSTPCNGVEGFNCYFPLQSYGFQPTNGVGYQPYRVVVLSFELLHAPATVCGPKKSTNLVKNKCVNFNFNGLTGTGVLTESNKKFLPFQQFGRDIADTTDAVRDPQTLEILDITPCSFGGVSVITPGTNTSNQVAVLYQGVNCTEVPVAIHADQLTPTWRVYSTGSNVFQTRAGCLIGAEHVNNSYECDIPIGAGICASYQTQTNSPRRARSVASQSIIAYTMSLGAENSVAYSNNSIAIPTNFTISVTTEILPVSMTKTSVDCTMYICGDSTECSNLLLQYGSFCTQLNRALTGIAVEQDKNTQEVFAQVKQIYKTPPIKDFGGFNFSQILPDPSKPSKRSFIEDLLFNKVTLADAGFIKQYGDCLGDIAARDLICAQKFNGLTVLPPLLTDEMIAQYTSALLAGTITSGWTFCAGAALQIPFAMQMAYRFNGIGVTQNVLYENQKLIANQFNSAIGKIQDSLSSTASALGKLQDVVNQNAQALNTLVKQLSSNFGAISSVLNDILSRLDKVEAEVQIDRLITGRLQSLQTYVTQQLIRAAEIRASANLAATKMSECVCGQSKRVDFCGKGYHLMSFPQSAPHGVVFLHVTYVPAQEKNFTTAPAICHDGKAHFPREGVFVSNGTHWFVTQRNFYEPQIITTDNTFVSGNCDVVIGIVNNTVYDPLQPELDSFKEELDKYFKNHTSPDVDLGDISGINASVVNIQKEIDRLNEVAKNLNESLIDLQELGKYEQYIKGGGSGGGQIYEGKLTAEGLRFGIVASRFNHALVDRLVEGAIDAIVRHGGREEDITLVRVPGSWEIPVAAGELARKEDIDAVIAIGVLIRGATPHFDYIASEVSKGLADLSLELRKPITFGVITADTLEQAIERAGTKHGNKGWEAALSAIEMANLFKSLR

SEQ ID NO: 4210 - protein, 1371 aa, Artificial Sequence
  SARS-CoV-2/Iceland/189/2020__EPI_ISL_417709 spike protein (1-1211)(G889C_L1034C) LumSynth construct
MFVFLVLLPLVSSQCVNLTTRTQLPPAYTNSFTRGVYYPDKVFRSSVLHSTQDLFLPFFSNVTWFHAIHVSGTNGTKRFDNPVLPFNDGVYFASTEKSNIIRGWIFGTTLDSKTQSLLIVNNATNVVIKVCEFQFCNDPFLGVYYHKNNKSWMESEFRVYSSANNCTFEYVSQPFLMDLEGKQGNFKNLREFVFKNIDGYFKIYSKHTPINLVRDLPQGFSALEPLVDLPIGINITRFQTLLALHRSYLTPGDSSSGWTAGAAAYYVGYLQPRTFLLKYNENGTITDAVDCALDPLSETKCTLKSFTVEKGIYQTSNFRVQPTESIVRFPNITNLCPFGEVFNATRFASVYAWNRKRISNCVADYSVLYNSASFSTFKCYGVSPTKLNDLCFTNVYADSFVIRGDEVRQIAPGQTGKIADYNYKLPDDFTGCVIAWNSNNLDSKVGGNYNYLYRLFRKSNLKPFERDISTEIYQAGSTPCNGVEGFNCYFPLQSYGFQPTNGVGYQPYRVVVLSFELLHAPATVCGPKKSTNLVKNKCVNFNFNGLTGTGVLTESNKKFLPFQQFGRDIADTTDAVRDPQTLEILDITPCSFGGVSVITPGTNTSNQVAVLYQGVNCTEVPVAIHADQLTPTWRVYSTGSNVFQTRAGCLIGAEHVNNSYECDIPIGAGICASYQTQTNSPRRARSVASQSIIAYTMSLGAENSVAYSNNSIAIPTNFTISVTTEILPVSMTKTSVDCTMYICGDSTECSNLLLQYGSFCTQLNRALTGIAVEQDKNTQEVFAQVKQIYKTPPIKDFGGFNFSQILPDPSKPSKRSFIEDLLFNKVTLADAGFTKQYGDCLGDIAARDLICAQKFNGLTVLPPLLTDEMIAQYTSALLAGTITSGWTFCAGAALQIPFAMQMAYRFNGIGVTQNVLYENQKLIANQFNSAIGKIQDSLSSTASALGKLQDVVNQNAQALNTLVKQLSSNFGAISSVLNDILSRLDKVEAEVQIDRLITGRLQSLQTYVTQQLIRAAEIRASANLAATKMSECVCGQSKRVDFCGKGYHLMSFPQSAPHGVVFLHVTYVPAQEKNFTTAPAICHDGKAHFPREGVFVSNGTHWFVTQRNFYEPQIITTDNTFVSGNCDVVIGIVNNTVYDPLQPELDSFKEELDKYFKNHTSPDVDLGDISGINASVVNIQKEIDRLNEVAKNLNESLIDLQELGKYEQYIKGGGSGGGQIYEGKLTAEGLRFGIVASRFNHALVDRLVEGAIDAIVRHGGREEDITLVRVPGSWEIPVAAGELARKEDIDAVIAIGVLIRGATPHFDYIASEVSKGLADLSLELRKPITFGVITADTLEQAIERAGTKHGNKGWEAALSAIEMANLFKSLR

SEQ ID NO: 4211 - protein, 1371 aa, Artificial Sequence
  SARS-CoV-2/Australia/NSW56/2020__EPI_ISL_417408 spike protein (1-1211)(G889C_L1034C) LumSynth construct
MFVFLVLLPLVSSQCVNLTTRTQLPPAYTNSFTRGVYYPDKVFRSSVLHSTQDLFLPFFSNVTWFHAIHVSGTNGTKRFDNPVLPFNDGVYFASTEKSNIIRGWIFGTTLDSKTQSLLIVNNATNVVIKVCEFQFCNDPFLGVYYHKNNKSWMESEFRVYSSANNCTFEYVSQPFLMDLEGKQGNFKNLREFVFKNIDGYFKIYSKHTPINLVRDLPQGFSALEPLVDLPIGINITRFQTLLALHRSYLTPGDSSSGWTAGAAAYYVGYLQPRTFLLKYNENGTITDAVDCALDPLSETKCTLKSFTVEKGIYQTSNFRVQPTESIVRFPNITNLCPFGEVFNATRFASVYAWNRKRISNCVADYSVLYNSASFSTFKCYGVSPTKLNDLCFTNVYADSFVIRGDEVRQIAPGQTGKIADYNYKLPDDFTGCVIAWNSNNLDSKVGGNYNYLYRLFRKSNLKPFERDISTEIYQAGSTPCNGVEGFNCYFPLQSYGFQPTNGVGYQPYRVVVLSFELLHAPATVCGPKKSTNLVKNKCVNFNFNGLTGTGVLTESNKKFLPFQQFGRDIADTTDAVRDPQTLEILDITPCSFGGVSVITPGTNTSNQVAVLYQDVNCTEVPVAIHADQLTPTWRVYSTGSNVFQTRAGCLIGAEHVNNSYECDIPIGAGICASYQTQTNSPRRARSVASQSIIAYTMSLGAENSVAYSNNSIAIPTNFTISVTTEILPVSMTKTSVDCTMYICGDSTECSNLLLQYGSFCTQLNRALTGIAVEQDKNTQEVFAQVKQIYKTPPIKDFGGFNFSQILPDSSKPSKRSFIEDLLFNKVTLADAGFIKQYGDCLGDIAARDLICAQKFNGLTVLPPLLTDEMIAQYTSALLAGTITSGWTFCAGAALQIPFAMQMAYRFNGIGVTQNVLYENQKLIANQFNSAIGKIQDSLSSTASALGKLQDVVNQNAQALNTLVKQLSSNFGAISSVLNDILSRLDKVEAEVQIDRLITGRLQSLQTYVTQQLIRAAEIRASANLAATKMSECVCGQSKRVDFCGKGYHLMSFPQSAPHGVVFLHVTYVPAQEKNFTTAPAICHDGKAHFPREGVFVSNGTHWFVTQRNFYEPQIITTDNTFVSGNCDVVIGIVNNTVYDPLQPELDSFKEELDKYFKNHTSPDVDLGDISGINASVVNIQKEIDRLNEVAKNLNESLIDLQELGKYEQYIKGGGSGGGQIYEGKLTAEGLRFGIVASRFNHALVDRLVEGAIDAIVRHGGREEDITLVRVPGSWEIPVAAGELARKEDIDAVIAIGVLIRGATPHFDYIASEVSKGLADLSLELRKPITFGVITADTLEQAIERAGTKHGNKGWEAALSAIEMANLFKSLR

SEQ ID NO: 4212 - protein, 1371 aa, Artificial Sequence
  SARS-CoV-2/Iceland/280/2020__EPI_ISL_417608 spike protein (1-1211)(G889C_L1034C) LumSynth construct
MFVFLVLLPLVSSQCVNLTTRTQLPPAYTNSFTRGVYYPDKVFRSSVLHSTQDLFLPFFSNVTWFHAIHVSGTNGTKRFDNPVLPFNDGVYFASTEKSNIIRGWIFGTTLDSKTQSLLIVNNATNVVIKVCEFQFCNDPFLGVYYHKNNKSWMESEFRVYSSANNCTFEYVSQPFLMDLEGKQGNFKNLREFVFKNIDGYFKIYSKHTPINLVRDLPQGFSALEPLVDLPIGINITRFQTLLALHRSYLTPGDSSSGWTAGAAAYYVGYLQPRTFLLKYNENGTITDAVDCALDPLSETKCTLKSFTVEKGIYQTSNFRVQPTESIVRFPNITNLCPFGEVFNATRFASVYAWNRKRISNCVADYSVLYNSASFSTFKCYGVSPTKLNDLCFTNVYADSFVIRGDEVRQIAPGQTGKIADYNYKLPDDFTGCVIAWNSNNLDSKVGGNYNYLYRLFRKSNLKPFERDISTEIYQAGSTPCNGVEGFNCYFPLQSYGFQPTNGVGYQPYRVVVLSFELLHAPATVCGPKKSTNLVKNKCVNFNFNGLTGTGVLTESNKKFLPFQQFGRDIADTTDAVRDPQTLEILDITPCSFGGVSVITPGTNTSNQVAVLYQGVNCTEVPVAIHADQLTPTWRVYSTGSNVFQTRAGCLIGAEHVNNSYECDIPIGAGICASYHTQTNSPRRARSVASQSIIAYTMSLGAENSVAYSNNSIAIPTNFTISVTTEILPVSMTKTSVDCTMYICGDSTECSNLLLQYGSFCTQLNRALTGIAVEQDKNTQEVFAQVKQIYKTPPIKDFGGFNFSQILPDPSKPSKRSFIEDLLFNKVTLADAGFIKQYGDCLGDIAARDLICAQKFNGLTVLPPLLTDEMIAQYTSALLAGTITSGWTFCAGAALQIPFAMQMAYRFNGIGVTQNVLYENQKLIANQFNSAIGKIQDSLSSTASALGKLQDVVNQNAQALNTLVKQLSSNFGAISSVLNDILSRLDKVEAEVQIDRLITGRLQSLQTYVTQQLIRAAEIRASANLAATKMSECVCGQSKRVDFCGKGYHLMSFPQSAPHGVVFLHVTYVPAQEKNFTTAPAICHDGKAHFPREGVFVSNGTHWFVTQRNFYEPQIITTDNTFVSGNCDVVIGIVNNTVYDPLQPELDSFKEELDKYFKNHTSPDVDLGDISGINASVVNIQKEIDRLNEVAKNLNESLIDLQELGKYEQYIKGGGSGGGQIYEGKLTAEGLRFGIVASRFNHALVDRLVEGAIDAIVRHGGREEDITLVRVPGSWEIPVAAGELARKEDIDAVIAIGVLIRGATPHFDYIASEVSKGLADLSLELRKPITFGVITADTLEQAIERAGTKHGNKGWEAALSAIEMANLFKSLR

SEQ ID NO: 4213 - protein, 1371 aa, Artificial Sequence; identical to SEQ ID NO: 4168
  SARS-CoV-2/Iceland/247/2020__EPI_ISL_417575 spike protein (1-1211)(G889C_L1034C) LumSynth construct

SEQ ID NO: 4214 - protein, 1371 aa, Artificial Sequence
  SARS-CoV-2/Iceland/238/2020__EPI_ISL_417566 spike protein (1-1211)(G889C_L1034C) LumSynth construct
MFVFLVLLPLVSSQCVNLTTRTQLPPAYTNSFTRGVYYPDKVFRSSVLHSTQDLFLPFFSNVTWFHAIHVSGTNGTKRFDNPVLPFNDGVYFASTEKSNIIRGWIFGTTLDSKTQSLLIVNNATNVVIKVCEFQFCNDPFLGVYYHKNNKSWMESEFRVYSSANNCTFEYVSQPFLMDLEGKQGNFKNLREFVFKNIDGYFKIYSKHTPINLVRDLPQGFSALEPLVDLPIGINITRFQTLLALHRSYLTPGDSSSGWTAGAAAYYVGYLQPRTFLLKYNENGTITDAVDCALDPLSETKCTLKSFTVEKGIYQTSNFRVQPTESIVRFPNITNLCPFGEVFNATRFASVYAWNRKRISNCVADYSVLYNSASFSTFKCYGVSPTKLNDLCFTNVYADSFVIRGDEVRQIAPGQTGKIADYNYKLPDDFTGCVIAWNSNNLDSKVGGNYNYLYRLFRKSNLKPFERDISTEIYQAGSTPCNGVEGFNCYFPLQSYGFQPTNGVGYQPYRVVVLSFELLHAPATVCGPKKSTNLVKNKCVNFNFNGLTGTGVLTESNKKFLPFQQFGRDIADTTDAVRDPQTLEILDITPCSFGGVSVITPGTNTSNQVAVLYQGVNCTEVPVAIHADQLTPTWRVYSTGSNVFQTRAGCLIGAEHVNNSYECDIPIGAGICASYQTQTNSPRRARSVASQSIIAYTMSLGAENSVAYSNNSIAIPTNFTISVTTEILPVSMTKTSVDCTMYICGDSTECSNLLLQYGSFCTQLNRALTGIAVEQDKNTQEVFAQVKQIYKTPPIKDFGGFNFSQILPDPSKPSKRSFIEDLLFNKVTLADVGFIKQYGDCLGDIAARDLICAQKFNGLTVLPPLLTDEMIAQYTSALLAGTITSGWTFCAGAALQIPFAMQMAYRFNGIGVTQNVLYENQKLIANQFNSAIGKIQDSLSSTASALGKLQDVVNQNAQALNTLVKQLSSNFGAISSVLNDILSRLDKVEAEVQIDRLITGRLQSLQTYVTQQLIRAAEIRASANLAATKMSECVCGQSKRVDFCGKGYHLMSFPQSAPHGVVFLHVTYVPAQEKNFTTAPAICHDGKAHFPREGVFVSNGTHWFVTQRNFYEPQIITTDNTFVSGNCDVVIGIVNNTVYDPLQPELDSFKEELDKYFKNHTSPDVDLGDISGINASVVNIQKEIDRLNEVAKNLNESLIDLQELGKYEQYIKGGGSGGGQIYEGKLTAEGLRFGIVASRFNHALVDRLVEGAIDAIVRHGGREEDITLVRVPGSWEIPVAAGELARKEDIDAVIAIGVLIRGATPHFDYIASEVSKGLADLSLELRKPITFGVITADTLEQAIERAGTKHGNKGWEAALSAIEMANLFKSLR

SEQ ID NO: 4215 - protein, 1371 aa, Artificial Sequence
  SARS-CoV-2/Greece/16/2020__EPI_ISL_418265 spike protein (1-1211)(G889C_L1034C) LumSynth construct
MFVFLVLLPLVSSQCVNLTTRTQLPPAYTNSFTRGVYYPDKVFRSSVLHSTQDLFLPFFSNVTWFHAIHVSGTNGTKRFDNPVLPFNDGVYFASTEKSNIIRGWIFGTTLDSKTQSLLIVNNATNVVIKVCEFQFCNDPFLGVYYHKNNKSWMESEFRVYSSANNCTFEYVSQPFLMDLEGKQGNFKNLREFVFKNVDGYFKIYSKHTPINLVRDLPQGFSALEPLVDLPIGINITRFQTLLALHRSYLTPGDSSSGWTAGAAAYYVGYLQPRTFLLKYNENGTITDAVDCALDPLSETKCTLKSFTVEKGIYQTSNFRVQPTESIVRFPNITNLCPFGEVFNATRFASVYAWNRKRISNCVADYSVLYNSASFSTFKCYGVSPTKLNDLCFTNVYADSFVIRGDEVRQIAPGQTGKIADYNYKLPDDFTGCVIAWNSNNLDSKVGGNYNYLYRLFRKSNLKPFERDISTEIYQAGSTPCNGVEGFNCYFPLQSYGFQPTNGVGYQPYRVVVLSFELLHAPATVCGPKKSTNLVKNKCVNFNFNGLTGTGVLTESNKKFLPFQQFGRDIADTTDAVRDPQTLEILDITPCSFGGVSVITPGTNTSNQVAVLYQDVNCTEVPVAIHADQLTPTWRVYSTGSNVFQTRAGCLIGAEHVNNSYECDIPIGAGICASYQTQTNSPRRARSVASQSIIAYTMSLGAENSVAYSNNSIAIPTNFTISVTTEILPVSMTKTSVDCTMYICGDSTECSNLLLQYGSFCTQLNRALTGIAVEQDKNTQEVFAQVKQIYKTPPIKDFGGFNFSQILPDPSKPSKRSFIEDLLFNKVTLADAGFIKQYGDCLGDIAARDLICAQKFNGLTVLPPLLTDEMIAQYTSALLAGTITSGWTFCAGAALQIPFAMQMAYRFNGIGVTQNVLYENQKLIANQFNSAIGKIQDSLSSTASALGKLQDVVNQNAQALNTLVKQLSSNFGAISSVLNDILSRLDKVEAEVQIDRLITGRLQSLQTYVTQQLIRAAEIRASANLAATKMSECVCGQSKRVDFCGKGYHLMSFPQSAPHGVVFLHVTYVPAQEKNFTTAPAICHDGKAHFPREGVFVSNGTHWFVTQRNFYEPQIITTDNTFVSGNCDVVIGIVNNTVYDPLQPELDSFKEELDKYFKNHTSPDVDLGDISGINASVVNIQKEIDRLNEVAKNLNESLIDLQELGKYEQYIKGGGSGGGQIYEGKLTAEGLRFGIVASRFNHALVDRLVEGAIDAIVRHGGREEDITLVRVPGSWEIPVAAGELARKEDIDAVIAIGVLIRGATPHFDYIASEVSKGLADLSLELRKPITFGVITADTLEQAIERAGTKHGNKGWEAALSAIEMANLFKSLR

SEQ ID NO: 4216 - protein, 1371 aa, Artificial Sequence
  SARS-CoV-2/Iceland/319/2020__EPI_ISL_417648 spike protein (1-1211)(G889C_L1034C) LumSynth construct
MFVFLVLLPLVSSQCVNLTTRTQLPPAYTNSFTRGVYYPDKVFRSSVLHSTQDLFLPFFSNVTWFHAIHVSGTNGTKRFDNPVLPFNDGVYFASTEKSNIIRGWIFGTTLDSKTQSLLIVNNATNVVIKVCEFQFCNDPFLGVYYHKNNKSWMESEFRVYSSANNCTFEYVSQPFLIDLEGKQGNFKNLREFVFKNIDGYFKIYSKHTPINLVRDLPQGFSALEPLVDLPIGINITRFQTLLALHRSYLTPGDSSSGWTAGAAAYYVGYLQPRTFLLKYNENGTITDAVDCALDPLSETKCTLKSFTVEKGIYQTSNFRVQPTESIVRFPNITNLCPFGEVFNATRFASVYAWNRKRISNCVADYSVLYNSASFSTFKCYGVSPTKLNDLCFTNVYADSFVIRGDEVRQIAPGQTGKIADYNYKLPDDFTGCVIAWNSNNLDSKVGGNYNYLYRLFRKSNLKPFERDISTEIYQAGSTPCNGVEGFNCYFPLQSYGFQPTNGVGYQPYRVVVLSFELLHAPATVCGPKKSTNLVKNKCVNFNFNGLTGTGVLTESNKKFLPFQQFGRDIADTTDAVRDPQTLEILDITPCSFGGVSVITPGTNTSNQVAVLYQGVNCTEVPVAIHADQLTPTWRVYSTGSNVFQTRAGCLIGAEHVNNSYECDIPIGAGICASYQTQTNSPRRARSVASQSIIAYTMSLGAENSVAYSNNSIAIPTNFTISVTTEILPVSMTKTSVDCTMYICGDSTECSNLLLQYGSFCTQLNRALTGIAVEQDKNTQEVFAQVKQIYKTPPIKDFGGFNFSQILPDPSKPSKRSFIEDLLFNKVTLADAGFIKQYGDCLGDIAARDLICAQKFNGLTVLPPLLTDEMIAQYTSALLAGTITSGWTFCAGAALQIPFAMQMAYRFNGIGVTQNVLYENQKLIANQFNSAIGKIQDSLSSTASALGKLQDVVNQNAQALNTLVKQLSSNFGAISSVLNDILSRLDKVEAEVQIDRLITGRLQSLQTYVTQQLIRAAEIRASANLAATKMSECVCGQSKRVDFCGKGYHLMSFPQSAPHGVVFLHVTYVPAQEKNFTTAPAICHDGKAHFPREGVFVSNGTHWFVTQRNFYEPQIITTDNTFVSGNCDVVIGIVNNTVYDPLQPELDSFKEELDKYFKNHTSPDVDLGDISGINASVVNIQKEIDRLNEVAKNLNESLIDLQELGKYEQYIKGGGSGGGQIYEGKLTAEGLRFGIVASRFNHALVDRLVEGAIDAIVRHGGREEDITLVRVPGSWEIPVAAGELARKEDIDAVIAIGVLIRGATPHFDYIASEVSKGLADLSLELRKPITFGVITADTLEQAIERAGTKHGNKGWEAALSAIEMANLFKSLR

SEQ ID NO: 4217 - protein, 1371 aa, Artificial Sequence
  SARS-CoV-2/Congo/94/2020__EPI_ISL_417947 spike protein (1-1211)(G889C_L1034C) LumSynth construct
MFVFLVLLPLVSSQCVNLTTRTQLPPAYTNSFTRGVYYPDKVFRSSVLHSTQDLFLPFFSNVTWFHAIHVSGTNGTKRFDNPVLPFNDGVYFASTEKSNIIRGWIFGTTLDSKTQSLLIVNNATNVVIKVCEFQFCNDPFLGVYYHKNNKSWMESEFRVYSSANNCTFEYVSQPFLMDLEGKQGNFKNLREFVFKNIDGYFKIYSKHTPINLVRDLPQGFSALEPLVDLPIGINITRFQTLLALHRSYLTPGDSSSGWTAGAAAYYVGYLQPRTFLLKYNENGTITDAVDCALDPLSETKCTLKSFTVEKGIYQTSNFRVQPTESIVRFPNITNLCPFGEVFNATRFASVYAWNRKRISNCVADYSVLYNSASFSTFKCYGVSPTKLNDLCFTNVYADSFVIRGDEVRQIAPGQTGKIADYNYKLPDDFTGCVIAWNSNNLDSKVGGNYNYLYRLFRKSNLKPFERDISTEIYQAGSTPCNGVEGFNCYFPLQSYGFQPTNGVGYQPYRVVVLSFELLHAPATVCGPKKSTNLVKNKCVNFNFNGLTGTGVLTESNKKFLPFQQFGRDIADTTDAVRDPQTLEILDITPCSFGGVSVITPGTNTSNQVAVLYQGVNCTEVPVAIHADQLTPTWRVYSTGSNVFQTRAGCLIGAEHVNNSYECDIPIGAGICASYQTQTNSPRRARSVASQSIIAYTMSLGAENSVAYSNNSIAIPTNFTISVTTEILPVSMTKTSVDCTMYICGDSTECSNLLLQYGSFCTQLNRALTGIAVEQDKNTQEVFAQVKQIYKTPPIKDFGGFNFSQILPDPSKPSKRSFIEDILFNKVTLADAGFIKQYGDCLGDIAARDLICAQKFNGLTVLPPLLTDEMIAQYTSALLAGTITSGWTFCAGAALQIPFAMQMAYRFNGIGVTQNVLYENQKLIANQFNSAIGKIQDSLSSTASALGKLQDVVNQNAQALNTLVKQLSSNFGAISSVLNDILSRLDKVEAEVQIDRLITGRLQSLQTYVTQQLIRAAEIRASANLAATKMSECVCGQSKRVDFCGKGYHLMSFPQSAPHGVVFLHVTYVPAQEKNFTTAPAICHDGKAHFPREGVFVSNGTHWFVTQRNFYEPQIITTDNTFVSGNCDVVIGIVNNTVYDPLQPELDSFKEELDKYFKNHTSPDVDLGDISGINASVVNIQKEIDRLNEVAKNLNESLIDLQELGKYEQYIKGGGSGGGQIYEGKLTAEGLRFGIVASRFNHALVDRLVEGAIDAIVRHGGREEDITLVRVPGSWEIPVAAGELARKEDIDAVIAIGVLIRGATPHFDYIASEVSKGLADLSLELRKPITFGVITADTLEQAIERAGTKHGNKGWEAALSAIEMANLFKSLR

SEQ ID NO: 4218 - protein, 1371 aa, Artificial Sequence
  SARS-CoV-2/Congo/158/2020__EPI_ISL_417950 spike protein (1-1211)(G889C_L1034C) LumSynth construct
MFVFLVLLPLVSSQCVNLTTRTQLPPAYTNSFTRGVYYPDKVFRSSVLHSTQDLFLPFFSNVTWFHAIHVSGTNGTKRFDNPVLPFNDGVYFASTEKSNIIRGWIFGTTLDSKTQSLLIVNNATNVVIKVCEFQFCNDPFLGVYYHKNNKSWMESEFRVYSSANNCTFEYVSQPFLMDLEGKQGNFKNLREFVFKNIDGYFKIYSKHTPINLVRDLPQGFSALEPLVDLPIGINITRFQTLLALHRSYLTPGDSSSGWTAGAAAYYVGYLQPRTFLLKYNENGTITDAVDCALDPLSETKCTLKSFTVEKGIYQTSNFRVQPTESIVRFPNITNLCPFGEVFNATRFASVYAWNRKRISNCVADYSVLYNSASFSTFKCYGVSPTKLNDLCFTNVYADSFVIRGDEVRQIAPGQTGKIADYNYKLPDDFTGCVIAWNSNNLDSKVGGNYNYLYRLFRKSNLKPFERDISTEIYQAGSTPCNGVEGFNCYFPLQSYGFQPTNGVGYQPYRVVVLSFELLHAPATVCGPKKSTNLVKNKCVNFNFNGLTGTGVLTESNKKFLPFQQFGRDIADTTDAVRDPQTLEILDITPCSFGGVSVITPGTNTSNQVAVLYQDVNCTEVPVAIHADQLTPTWRVYSTGSNVFQTRAGCLIGAEHVNNSYECDIPIGAGICASYQTQTNSPRRARSVASQSIIAYTMSLGAENSVAYSNNSIAIPTNFTISVTTEILPVSMTKTSVDCTMYICGDSTECSNLLLQYGSFCTQLNRALTGIAVEQDKNTQEVFAQVKQIYKTPPIKDFGGFNFSQILPDPSKPSKRSFIEDLLFNKVTLADAGFIKQYGDCLGDIAARDLICAQKFNGLTVLPPLLTDEMIAQYTSALLAGTITSGWTFCAGAALQIPFAMQMAYRFNGIGVTQNVLYENQKLIANQFNSAIGKIQDSLSSTASALGKLQDVVNQNAQALNTLVKQLSSNFGAISSVLNDILSRLDKVEAEVQIDRLITGRLQSLQTYVTQQLIRAAEIRASANLAATKMSECVCGQSKRVDFCGKGYHLMSFPQSAPHGVVFLHVTYVPAQEKNFTTAPAICHDGKAHFPREGVFVSNGTHWFVTQRNFYEPQIITTDNTFLSGNCDVVIGIVNNTVYDPLQPELDSFKEELDKYFKNHTSPDVDLGDISGINASVVNIQKEIDRLNEVAKNLNESLIDLQELGKYEQYIKGGGSGGGQIYEGKLTAEGLRFGIVASRFNHALVDRLVEGAIDAIVRHGGREEDITLVRVPGSWEIPVAAGELARKEDIDAVIAIGVLIRGATPHFDYIASEVSKGLADLSLELRKPITFGVITADTLEQAIERAGTKHGNKGWEAALSAIEMANLFKSLR

SEQ ID NO: 4219 - protein, 1371 aa, Artificial Sequence
  SARS-CoV-2/USA/UT-00034/2020__EPI_ISL_417977 spike protein (1-1211)(G889C_L1034C) LumSynth construct
MFVFLVLLPLVSSQCVNLTTRTQLPPAYTNSFTRGVYYPDKVFRSSVLHSTQDLFLPFFSNVTWFHAIHVSGTNGTKRFDNPVLPFNDGVYFASTEKSNIIRGWIFGTTLDSKTQSLLIVNNATNVVIKVCEFQFCNDPFLGVYYYKNNKSWMESEFRVYSSANNCTFEYVSQPFLMDLEGKQGNFKNLREFVFKNIDGYFKIYSKHTPINLVRDLPQGFSALEPLVDLPIGINITRFQTLLALHRSYLTPGDSSSGWTAGAAAYYVGYLQPRTFLLKYNENGTITDAVDCALDPLSETKCTLKSFTVEKGIYQTSNFRVQPTESIVRFPNITNLCPFGEVFNATRFASVYAWNRKRISNCVADYSVLYNSASFSTFKCYGVSPTKLNDLCFTNVYADSFVIRGDEVRQIAPGQTGKIADYNYKLPDDFTGCVIAWNSNNLDSKVGGNYNYLYRLFRKSNLKPFERDISTEIYQAGSTPCNGVEGFNCYFPLQSYGFQPTNGVGYQPYRVVVLSFELLHAPATVCGPKKSTNLVKNKCVNFNFNGLTGTGVLTESNKKFLPFQQFGRDIADTTDAVRDPQTLEILDITPCSFGGVSVITPGTNTSNQVAVLYQGVNCTEVPVAIHADQLTPTWRVYSTGSNVFQTRAGCLIGAEHVNNSYECDIPIGAGICASYQTQTNSPRRARSVASQSIIAYTMSLGAENSVAYSNNSIAIPTNFTISVTTEILPVSMTKTSVDCTMYICGDSTECSNLLLQYGSFCTQLNRALTGIAVEQDKNTQEVFAQVKQIYKTPPIKDFGGFNFSQILPDPSKPSKRSFIEDLLFNKVTLADAGFIKQYGDCLGDIAARDLICAQKFNGLTVLPPLLTDEMIAQYTSALLAGTITSGWTFCAGAALQIPFAMQMAYRFNGIGVTQNVLYENQKLIANQFNSAIGKIQDSLSSTASALGKLQDVVNQNAQALNTLVKQLSSNFGAISSVLNDILSRLDKVEAEVQIDRLITGRLQSLQTYVTQQLIRAAEIRASANLAATKMSECVCGQSKRVDFCGKGYHLMSFPQSAPHGVVFLHVTYVPAQEKNFTTAPAICHDGKAHFPREGVFVSNGTHWFVTQRNFYEPQIITTDNTFVSGNCDVVIGIVNNTVYDPLQPELDSFKEELDKYFKNHTSPDVDLGDISGINASVVNIQKEIDRLNEVAKNLNESLIDLQELGKYEQYIKGGGSGGGQIYEGKLTAEGLRFGIVASRFNHALVDRLVEGAIDAIVRHGGREEDITLVRVPGSWEIPVAAGELARKEDIDAVIAIGVLIRGATPHFDYIASEVSKGLADLSLELRKPITFGVITADTLEQAIERAGTKHGNKGWEAALSAIEMANLFKSLR

SEQ ID NO: 4220 - protein, 1371 aa, Artificial Sequence
  SARS-CoV-2/USA/UT-00033/2020__EPI_ISL_417976 spike protein (1-1211)(G889C_L1034C) LumSynth construct
MFVFLVLLPLVSSQCVNLTTRTQLPPAYTNSFTRGVYYPDKVFRSSVLHSTQDLFLPFFSNVTWFHAIHVSGTNGTKRFDNPVLPFNDGVYFASTEKSNIIRGWIFGTTLDSKTQSLLIVNNATNVVIKVCEFQFCNDPFLGVYYHKNNKSWMESEFRVYSSANNCTFEYVSQPFLMDLEGKQGNFKNLREFVFKNIDGYFKIYSKHTPINLVRDLPQGFSALEPLVDLPIGINITRFQTLLALHRSYLTPGDSSSGLTAGAAAYYVGYLQPRTFLLKYNENGTITDAVDCALDPLSETKCTLKSFTVEKGIYQTSNFRVQPTESIVRFPNITNLCPFGEVFNATRFASVYAWNRKRISNCVADYSVLYNSASFSTFKCYGVSPTKLNDLCFTNVYADSFVIRGDEVRQIAPGQTGKIADYNYKLPDDFTGCVIAWNSNNLDSKVGGNYNYLYRLFRKSNLKPFERDISTEIYQAGSTPCNGVEGFNCYFPLQSYGFQPTNGVGYQPYRVVVLSFELLHAPATVCGPKKSTNLVKNKCVNFNFNGLTGTGVLTESNKKFLPFQQFGRDIADTTDAVRDPQTLEILDITPCSFGGVSVITPGTNTSNQVAVLYQGVNCTEVPVAIHADQLTPTWRVYSTGSNVFQTRAGCLIGAEHVNNSYECDIPIGAGICASYQTQTNSPRRARSVASQSIIAYTMSLGAENSVAYSNNSIAIPTNFTISVTTEILPVSMTKTSVDCTMYICGDSTECSNLLLQYGSFCTQLNRALTGIAVEQDKNTQEVFAQVKQIYKTPPIKDFGGFNFSQILPDPSKPSKRSFIEDLLFNKVTLADAGFIKQYGDCLGDIAARDLICAQKFNGLTVLPPLLTDEMIAQYTSALLAGTITSGWTFCAGAALQIPFAMQMAYRFNGIGVTQNVLYENQKLIANQFNSAIGKIQDSLSSTASALGKLQDVVNQNAQALNTLVKQLSSNFGAISSVLNDILSRLDKVEAEVQIDRLITGRLQSLQTYVTQQLIRAAEIRASANLAATKMSECVCGQSKRVDFCGKGYHLMSFPQSAPHGVVFLHVTYVPAQEKNFTTAPAICHDGKAHFPREGVFVSNGTHWFVTQRNFYEPQIITTDNTFVSGNCDVVIGIVNNTVYDPLQPELDSFKEELDKYFKNHTSPDVDLGDISGINASVVNIQKEIDRLNEVAKNLNESLIDLQELGKYEQYIKGGGSGGGQIYEGKLTAEGLRFGIVASRFNHALVDRLVEGAIDAIVRHGGREEDITLVRVPGSWEIPVAAGELARKEDIDAVIAIGVLIRGATPHFDYIASEVSKGLADLSLELRKPITFGVITADTLEQAIERAGTKHGNKGWEAALSAIEMANLFKSLR

SEQ ID NO: 4221 - protein, 1371 aa, Artificial Sequence
  SARS-CoV-2/USA/WI-13/2020__EPI_ISL_417516 spike protein (1-1211)(G889C_L1034C) LumSynth construct
MFVFLVLLPLVSSQCVNLTTRTQLPPAYTNSFTRGVYYPDKVFRSSVLHSTQDLFLPFFSNVTWFHAIHVSGTNGTKRFDNPVLPFNDGVYFASTEKSNIIRGWIFGTTLDSKTQSLLIVNNATNVVIKVCEFQFCNDPFLGVYYHKNNKSWMESEFRVYSSANNCTFEYVSQPFLMDLEGKQGNFKNLREFVFKNIDGYFKIYSKHTPINLVRDLPQGFSALEPLVDLPIGINITRFQTLLALHRSYLTPGDSSSGWTAGAAAYYVGYLQPRTFLLKYNENGTITDAVDCALDPLSETKCTLKSFTVEKGIYQTSNFRVLPTESIVRFPNITNLCPFGEVFNATRFASVYAWNRKRISNCVADYSVLYNSASFSTFKCYGVSPTKLNDLCFTNVYADSFVIRGDEVRQIAPGQTGKIADYNYKLPDDFTGCVIAWNSNNLDSKVGGNYNYLYRLFRKSNLKPFERDISTEIYQAGSTPCNGVEGFNCYFPLQSYGFQPTNGVGYQPYRVVVLSFELLHAPATVCGPKKSTNLVKNKCVNFNFNGLTGTGVLTESNKKFLPFQQFGRDIADTTDAVRDPQTLEILDITPCSFGGVSVITPGTNTSNQVAVLYQGVNCTEVPVAIHADQLTPTWRVYSTGSNVFQTRAGCLIGAEHVNNSYECDIPIGAGICASYQTQTNSPRRARSVASQSIIAYTMSLGAENSVAYSNNSIAIPTNFTISVTTEILPVSMTKTSVDCTMYICGDSTECSNLLLQYGSFCTQLNRALTGIAVEQDKNTQEVFAQVKQIYKTPPIKDFGGFNFSQILPDPSKPSKRSFIEDLLFNKVTLADAGFIKQYGDCLGDIAARDLICAQKFNGLTVLPPLLTDEMIAQYTSALLAGTITSGWTFCAGAALQIPFAMQMAYRFNGIGVTQNVLYENQKLIANQFNSAIGKIQDSLSSTASALGKLQDVVNQNAQALNTLVKQLSSNFGAISSVLNDILSRLDKVEAEVQIDRLITGRLQSLQTYVTQQLIRAAEIRASANLAATKMSECVCGQSKRVDFCGKGYHLMSFPQSAPHGVVFLHVTYVPAQEKNFTTAPAICHDGKAHFPREGVFVSNGTHWFVTQRNFYEPQIITTDNTFVSGNCDVVIGIVNNTVYDPLQPELDSFKEELDKYFKNHTSPDVDLGDISGINASVVNIQKEIDRLNEVAKNLNESLIDLQELGKYEQYIKGGGSGGGQIYEGKLTAEGLRFGIVASRFNHALVDRLVEGAIDAIVRHGGREEDITLVRVPGSWEIPVAAGELARKEDIDAVIAIGVLIRGATPHFDYIASEVSKGLADLSLELRKPITFGVITADTLEQAIERAGTKHGNKGWEAALSAIEMANLFKSLR

SEQ ID NO: 4222 - protein, 1370 aa, Artificial Sequence
  SARS-CoV-2/India/1-27/2020__EPI_ISL_413522 spike protein (1-1210)(G888C_L1033C) LumSynth construct
MFVFLVLLPLVSSQCVNLTTRTQLPPAYTNSFTRGVYYPDKVFRSSVLHSTQDLFLPFFSNVTWFHAIHVSGTNGTKRFDNPVLPFNDGVYFASTEKSNIIRGWIFGTTLDSKTQSLLIVNNATNVVIKVCEFQFCNDPFLGVYHKNNKSWMESEFRVYSSANNCTFEYVSQPFLMDLEGKQGNFKNLREFVFKNIDGYFKIYSKHTPINLVRDLPQGFSALEPLVDLPIGINITRFQTLLALHRSYLTPGDSSSGWTAGAAAYYVGYLQPRTFLLKYNENGTITDAVDCALDPLSETKCTLKSFTVEKGIYQTSNFRVQPTESIVRFPNITNLCPFGEVFNATRFASVYAWNRKRISNCVADYSVLYNSASFSTFKCYGVSPTKLNDLCFTNVYADSFVIRGDEVIQIAPGQTGKIADYNYKLPDDFTGCVIAWNSNNLDSKVGGNYNYLYRLFRKSNLKPFERDISTEIYQAGSTPCNGVEGFNCYFPLQSYGFQPTNGVGYQPYRVVVLSFELLHAPATVCGPKKSTNLVKNKCVNFNFNGLTGTGVLTESNKKFLPFQQFGRDIADTTDAVRDPQTLEILDITPCSFGGVSVITPGTNTSNQVAVLYQDVNCTEVPVAIHADQLTPTWRVYSTGSNVFQTRAGCLIGAEHVNNSYECDIPIGAGICASYQTQTNSPRRARSVASQSIIAYTMSLGAENSVAYSNNSIAIPTNFTISVTTEILPVSMTKTSVDCTMYICGDSTECSNLLLQYGSFCTQLNRALTGIAVEQDKNTQEVFAQVKQIYKTPPIKDFGGFNFSQILPDPSKPSKRSFIEDLLFNKVTLADAGFIKQYGDCLGDIAARDLICAQKFNGLTVLPPLLTDEMIAQYTSALLAGTITSGWTFCAGAALQIPFAMQMAYRFNGIGVTQNVLYENQKLIANQFNSAIGKIQDSLSSTASALGKLQDVVNQNAQALNTLVKQLSSNFGAISSVLNDILSRLDKVEAEVQIDRLITGRLQSLQTYVTQQLIRAAEIRASANLAATKMSECVCGQSKRVDFCGKGYHLMSFPQSAPHGVVFLHVTYVPAQEKNFTTAPAICHDGKAHFPREGVFVSNGTHWFVTQRNFYEPQIITTDNTFVSGNCDVVIGIVNNTVYDPLQPELDSFKEELDKYFKNHTSPDVDLGDISGINASVVNIQKEIDRLNEVAKNLNESLIDLQELGKYEQYIKGGGSGGGQIYEGKLTAEGLRFGIVASRFNHALVDRLVEGAIDAIVRHGGREEDITLVRVPGSWEIPVAAGELARKEDIDAVIAIGVLIRGATPHFDYIASEVSKGLADLSLELRKPITFGVITADTLEQAIERAGTKHGNKGWEAALSAIEMANLFKSLR

SEQ ID NO: 4223 - protein, 1365 aa, Artificial Sequence
  SARS-CoV-2/pangolin/Guangxi/P4L/2017__EPI_ISL_410538 spike protein (1-1205)(G883C_L1028C) LumSynth construct
MFVFLFVLPLVSSQCVNLTTRTGIPPGYTNSSTRGVYYPDKVFRSSILHLTQDLFLPFFSNVTWFNTINYQGGFKKFDNPVLPFNDGVYFASTEKSNIIRGWIFGTTLDARTQSLLIVNNATNVVIKVCEFQFCTDPFLGVYYHNNNKTWVENEFRVYSSANNCTFEYISQPFLMDLEGKQGNFKNLREFVFKNVDGYFKIYSKHTPIDLVRDLPRGFAALEPLVDLPIGINITRFQTLLALHRSYLTPGNLESGWTTGAAAYYVGYLQQRTFLLSYNQNGTITDAVDCSLDPLSETKCTLKSLTVEKGIYQTSNFRVQPTISIVRFPNITNLCPFGEVFNASKFASVYAWNRKRISNCVADYSVLYNSTSFSTFKCYGVSPTKLNDLCFTNVYADSFVVKGDEVRQIAPGQTGVIADYNYKLPDDFTGCVIAWNSVKQDALTGGNYGYLYRLFRKSKLKPFERDISTEIYQAGSTPCNGQVGLNCYYPLERYGFHPTTGVNYQPFRVVVLSFELLNGPATVCGPKLSTTLVKDKCVNFNFNGLTGTGVLTTSKKQFLPFQQFGRDISDTTDAVRDPQTLEILDITPCSFGGVSVITPGTNTSNQVAVLYQDVNCTEVPMAIHAEQLTPAWRVYSAGANVFQTRAGCLVGAEHVNNSYECDIPVGAGICASYHSMSSLRSVNQRSIIAYTMSLGAENSVAYSNNSIAIPTNFTISVTTEILPVSMTKTSVDCTMYICGDSIECSNLLLQYGSFCTQLNRALTGIAVEQDKNTQEVFAQVKQIYKTPPIKDFGGFNFSQILPDPSKPSKRSFIEDLLFNKVTLADAGFIKQYGDCLGDIAARDLICAQKFNGLTVLPPLLTDEMIAQYTSALLAGTITSGWTFCAGAALQIPFAMQMAYRFNGIGVTQNVLYENQKLIANQFNSAIGKIQDSLSSTASALGKLQDVVNQNAQALNTLVKQLSSNFGAISSVLNDILSRLDKVEAEVQIDRLITGRLQSLQTYVTQQLIRAAEIRASANLAATKMSECVCGQSKRVDFCGKGYHLMSFPQSAPHGVVFLHVTYVPAQEKNFTTAPAICHEGKAHFPREGVFVSNGTHWFITQRNFYEPQIITTDNTFVSGSCDVVIGIVNNTVYDPLQPELDSFKEELDKYFKNHTSPDVDLGDISGINASVVNIQKEIDRLNEVAKNLNESPIDLQELGKYEQYIKGGGSGGGQIYEGKLTAEGLRFGIVASRFNHALVDRLVEGAIDAIVRHGGREEDITLVRVPGSWEIPVAAGELARKEDIDAVIAIGVLIRGATPHFDYIASEVSKGLADLSLELRKPITFGVITADTLEQAIERAGTKHGNKGWEAALSAIEMANLFKSLR

SEQ ID NO: 4224 - protein, 1365 aa, Artificial Sequence
  SARS-CoV-2/pangolin/Guangxi/P5L/2017__EPI_ISL_410540 spike protein (1-1205)(G883C_L1028C) LumSynth construct
MFVFLFVLPLVSSQCVNLTTRTGIPPGYTNSSTRGVYYPDKVFRSSILHLTQDLFLPFFSNVTWFNTINYQGGFKKFDNPVLPFNDGVYFASTEKSNIIRGWIFGTTLDARTQSLLIVNNATNVVIKVCEFQFCTDPFLGVYYHNNNKTWVENEFRVYSSANNCTFEYISQPFLMDLEGKQGNFKNLREFVFKNVDGYFKIYSKHTPIDLVRDLPRGFAALEPLVDLPIGINITRFQTLLALHRSYLTPGKLESGWTTGAAAYYVGYLQQRTFLLSYNQNGTITDAVDCSLDPLSETKCTLKSLTVEKGIYQTSNFRVQPTISIVRFPNITNLCPFGEVFNASKFASVYAWNRKRISNCVADYSVLYNSTSFSTFKCYGVSPTKLNDLCFTNVYADSFVVKGDEVRQIAPGQTGVIADYNYKLPDDFTGCVIAWNSVKQDALTGGNYGYLYRLFRKSKLKPFERDISTEIYQAGSTPCNGQVGLNCYYPLERYGFHPTTGVNYQPFRVVVLSFELLNGPATVCGPKLSTTLVKDKCVNFNFNGLTGTGVLTTSKKQFLPFQQFGRDISDTTDAVRDPQTLEILDITPCSFGGVSVITPGTNTSNQVAVLYQDVNCTEVPMAIHAEQLTPAWRVYSAGANVFQTRAGCLVGAEHVNNSYECDIPVGAGICASYHSMSSFRSVNQRSIIAYTMSLGAENSVAYSNNSIAIPTNFTISVTTEILPVSMTKTSVDCTMYICGDSIECSNLLLQYGSFCTQLNRALTGIAVEQDKNTQEVFAQVKQIYKTPPIKDFGGFNFSQILPDPSKPSKRSFIEDLLFNKVTLADAGFIKQYGDCLGDIAARDLICAQKFNGLTVLPPLLTDEMIAQYTSALLAGTITSGWTFCAGAALQIPFAMQMAYRFNGIGVTQNVLYENQKLIANQFNSAIGKIQDSLSSTASALGKLQDVVNQNAQALNTLVKQLSSNFGAISSVLNDILSRLDKVEAEVQIDRLITGRLQSLQTYVTQQLIRAAEIRASANLAATKMSECVCGQSKRVDFCGKGYHLMSFPQSAPHGVVFLHVTYVPAQEKNFTTAPAICHEGKAHFPREGVFVSNGTHWFITQRNFYEPQIITTDNTFVSGSCDVVIGIVNNTVYDPLQPELDSFKEELDKYFKNHTSPDVDLGDISGINASVVNIQKEIDRLNEVAKNLNESLIDLQELGKYEQYIKGGGSGGGQIYEGKLTAEGLRFGIVASRFNHALVDRLVEGAIDAIVRHGGREEDITLVRVPGSWEIPVAAGELARKEDIDAVIAIGVLIRGATPHFDYIASEVSKGLADLSLELRKPITFGVITADTLEQAIERAGTKHGNKGWEAALSAIEMANLFKSLR

SEQ ID NO: 4225 - protein, 1365 aa, Artificial Sequence
  SARS-CoV-2/pangolin/Guangxi/P5E/2017__EPI_ISL_410541 spike protein (1-1205)(G883C_L1028C) LumSynth construct
MFVFLFVLPLVSSQCVNLTTRTGIPPGYTNSSTRGVYYPDKVFRSSILHLTQDLFLPFFSNVTWFNTITYQGGSKKFDNPVLPFNDGVYFASTEKSNIIRGWIFGTTLDARTQSLLIVNNATNVVIKVCEFQFCTDPFLGVYYHNNNKTWVENEFRVYSSANNCTFEYISQPFLMDLEGKQGNFKNLREFVFKNVDGYFKIYSKHTPIDLVRDLPRGFAALEPLVDLPIGINITRFQTLLALHRSYLTPGKLESGWTTGAAAYYVGYLQQRTFLLSYNQNGTITDAVDCSLDPLSETKCTLKSLTVEKGIYQTSNFRVQPTISIVRFPNITNLCPFGEVFNASKFASVYAWNRKRISNCVADYSVLYNSTSFSTFKCYGVSPTKLNDLCFTNVYADSFVVKGDEVRQIAPGQTGVIADYNYKLPDDFTGCVIAWNSVKQDALTGDNYGYLYRLFRKSKLKPFERDISTEIYQAGSTPCNGQVGLNCYYPLERYGFHPTTGVNYQPFRVVVLSFELLNGPATVCGPKLSTTLVKDKCVNFNFNGLTGTGVLTTSKKQFLPFQQFGRDISDTTDAVRDPQTLEILDITPCSFGGVSVITPGTNTSNQVAVLYQDVNCTEVPMAIHAEQLTPAWRVYSAGANVFQTRAGCLVGAEHVNNSYECDIPVGAGICASYHSMSSFRSVNQRSIIAYTMSLGAENSVAYSNNSIAIPTNFTISVTTEILPVSMTKTSVDCTMYICGDSIECSNLLLQYGSFCTQLNRALTGIAVEQDKNTQEVFAQVKQIYKTPPIKDFGGFNFSQILPDPSKPSKRSFIEDLLFNKVTLADAGFIKQYGDCLGDIAARDLICAQKFNGLTVLPPLLTDEMIAQYTSALLAGTITSGWTFCAGAALQIPFAMQMAYRFNGIGVTQNVLYENQKLIANQFNSAIGKIQDSLSSTASALGKLQDVVNQNAQALNTLVKQLSSNFGAISSVLNDILSRLDKVEAEVQIDRLITGRLQSLQTYVTQQLIRAAEIRASANLAATKMSECVCGQSKRVDFCGKGYHLMSFPQSAPHGVVFLHVTYVPAQEKNFTTAPAICHEGKAHFPREGVFVSNGTHWFITQRNFYEPQIITTDNTFVSGSCDVVIGIVNNTVYDPLQPELDSFKEELDKYFKNHTSPDVDLGDISGINASVVNIQKEIDRLNEVAKNLNESLIDLQELGKYEQYIKGGGSGGGQIYEGKLTAEGLRFGIVASRFNHALVDRLVEGAIDAIVRHGGREEDITLVRVPGSWEIPVAAGELARKEDIDAVIAIGVLIRGATPHFDYIASEVSKGLADLSLELRKPITFGVITADTLEQAIERAGTKHGNKGWEAALSAIEMANLFKSLR

SEQ ID NO: 4226 - protein, 1363 aa, Artificial Sequence
  SARS-CoV-2/pangolin/Guangxi/P1E/2017__EPI_ISL_410539 spike protein (1-1203)(G881C_L1026C) LumSynth construct
MFVFLFVLPLVSSQCVNLTTRTGIQPGYTNSSTRGVYYPDKVFRSSILHLTQDLFLPFFSNVTWFNTINYQGGFKKFDNPVLPFNDGVYFASTEKSNIIRGWIFGTTLDARTQSLLIVNNATNVVIKVCEFQFCTDPFLGVYYHNNNKTWVENEFRVYSSANNCTFEYISQPFLMDLEGKQGNFKNLREFVFKNVDGYFKIYSKHTPIDLVRDLPRGFAALEPLVDLPIGINITRFQTLLALHRSYLTPGKLESGWTTGAAAYYVGYLQQRTFLLSYNQNGTITDAVDCSLDPLSETKCTLKSLTVEKGIYQTSNFRVQPTISIVRFPNITNLCPFGEVFNASKFASVYAWNRKRISNCVADYSVLYNSTSFSTFKCYGVSPTKLNDLCFTNVYADSFVVKGDEVRQIAPGQTGVIADYNYKLPDDFTGCVIAWNSVKQDALTGGNYLYRLFRKSKLKPFERDISTEIYQAGSTPCNGQVGLNCYYPLERYGFHPTTGVNYQPFRVVVLSFELLNGPATVCGPKLSTTLVKDKCVNFNFNGLTGTGVLTTSKKQFLPFQQFGRDISDTTDAVRDPQTLEILDITPCSFGGVSVITPGTNTSNQVAVLYQDVNCTEVPMAIHAEQLTPAWRVYSAGANVFQTRAGCLVGAEHVNNSYECDIPVGAGICASYHSMSSLRSVNQRSIIAYTMSLGAENSVAYSNNSIAIPTNFTISVTTEILPVSMTKTSVDCTMYICGDSIECSNLLLQYGSFCTQLNRALTGIAVEQDKNTQEVFAQVKQIYKTPPIKDFGGFNFSQILPDPSKPSKRSFIEDLLFNKVTLADAGFIKQYGDCLGDIAARDLICAQKFNGLTVLPPLLTDEMIAQYTSALLAGTITSGWTFCAGAALQIPFAMQMAYRFNGIGVTQNVLYENQKLIANQFNSAIGKIQDSLSSTASALGKLQDVVNQNAQALNTLVKQLSSNFGAISSVLNDILSRLDKVEAEVQIDRLITGRLQSLQTYVTQQLIRAAEIRASANLAATKMSECVCGQSKRVDFCGKGYHLMSFPQSAPHGVVFLHVTYVPAQEKNFTTAPAICHEGKAHFPREGVFVSNGTHWFITQRNFYEPQIITTDNTFVSGSCDVVIGIVNNTVYDPLQPELDSFKEELDKYFKNHTSPDVDLGDISGINASVVNIQKEIDRLNEVAKNLNESLIDLQELGKYEQYIKGGGSGGGQIYEGKLTAEGLRFGIVASRFNHALVDRLVEGAIDAIVRHGGREEDITLVRVPGSWEIPVAAGELARKEDIDAVIAIGVLIRGATPHFDYIASEVSKGLADLSLELRKPITFGVITADTLEQAIERAGTKHGNKGWEAALSAIEMANLFKSLR

SEQ ID NO: 4227 - protein, 1371 aa, Artificial Sequence
  SARS-CoV-2/Wuhan/WIV05/2019__EPI_ISL_402128 spike protein (1-1211)(I909C_Y1047C) LumSynth construct
MFVFLVLLPLVSSQCVNLTTRTQLPPAYTNSFTRGVYYPDKVFRSSVLHSTQDLFLPFFSNVTWFHAIHVSGTNGTKRFDNPVLPFNDGVYFASTEKSNIIRGWIFGTTLDSKTQSLLIVNNATNVVIKVCEFQFCNDPFLGVYYHKNNKSWMESEFRVYSSANNCTFEYVSQPFLMDLEGKQGNFKNLREFVFKNIDGYFKIYSKHTPINLVRDLPQGFSALEPLVDLPIGINITRFQTLLALHRSYLTPGDSSSGWTAGAAAYYVGYLQPRTFLLKYNENGTITDAVDCALDPLSETKCTLKSFTVEKGIYQTSNFRVQPTESIVRFPNITNLCPFGEVFNATRFASVYAWNRKRISNCVADYSVLYNSASFSTFKCYGVSPTKLNDLCFTNVYADSFVIRGDEVRQIAPGQTGKIADYNYKLPDDFTGCVIAWNSNNLDSKVGGNYNYLYRLFRKSNLKPFERDISTEIYQAGSTPCNGVEGFNCYFPLQSYGFQPTNGVGYQPYRVVVLSFELLHAPATVCGPKKSTNLVKNKCVNFNFNGLTGTGVLTESNKKFLPFQQFGRDIADTTDAVRDPQTLEILDITPCSFGGVSVITPGTNTSNQVAVLYQDVNCTEVPVAIHADQLTPTWRVYSTGSNVFQTRAGCLIGAEHVNNSYECDIPIGAGICASYQTQTNSPRRARSVASQSIIAYTMSLGAENSVAYSNNSIAIPTNFTISVTTEILPVSMTKTSVDCTMYICGDSTECSNLLLQYGSFCTQLNRALTGIAVEQDKNTQEVFAQVKQIYKTPPIKDFGGFNFSQILPDPSKPSKRSFIEDLLFNKVTLADAGFIKQYGDCLGDIAARDLICAQKFNGLTVLPPLLTDEMIAQYTSALLAGTITSGWTFGAGAALQIPFAMQMAYRFNGCGVTQNVLYENQKLIANQFNSAIGKIQDSLSSTASALGKLQDVVNQNAQALNTLVKQLSSNFGAISSVLNDILSRLDKVEAEVQIDRLITGRLQSLQTYVTQQLIRAAEIRASANLAATKMSECVLGQSKRVDFCGKGCHLMSFPQSAPHGVVFLHVTYVPAQEKNFTTAPAICHDGKAHFPREGVFVSNGTHWFVTQRNFYEPQIITTDNTFVSGNCDVVIGIVNNTVYDPLQPELDSFKEELDKYFKNHTSPDVDLGDISGINASVVNIQKEIDRLNEVAKNLNESLIDLQELGKYEQYIKGGGSGGGQIYEGKLTAEGLRFGIVASRFNHALVDRLVEGAIDAIVRHGGREEDITLVRVPGSWEIPVAAGELARKEDIDAVIAIGVLIRGATPHFDYIASEVSKGLADLSLELRKPITFGVITADTLEQAIERAGTKHGNKGWEAALSAIEMANLFKSLR

SEQ ID NO: 4228 - protein, 1367 aa, Artificial Sequence
  SARS-CoV-2/bat/Yunnan/RaTG13/2013__EPI_ISL_402131 spike protein (1-1207)(I905C_Y1043C) LumSynth construct
MFVFLVLLPLVSSQCVNLTTRTQLPPAYTNSSTRGVYYPDKVFRSSVLHLTQDLFLPFFSNVTWFHAIHVSGTNGIKRFDNPVLPFNDGVYFASTEKSNIIRGWIFGTTLDSKTQSLLIVNNATNVVIKVCEFQFCNDPFLGVYYHKNNKSWMESEFRVYSSANNCTFEYVSQPFLMDLEGKQGNFKNLREFVFKNIDGYFKIYSKHTPINLVRDLPPGFSALEPLVDLPIGINITRFQTLLALHRSYLTPGDSSSGWTAGAAAYYVGYLQPRTFLLKYNENGTITDAVDCALDPLSETKCTLKSFTVEKGIYQTSNFRVQPTDSIVRFPNITNLCPFGEVFNATTFASVYAWNRKRISNCVADYSVLYNSTSFSTFKCYGVSPTKLNDLCFTNVYADSFVITGDEVRQIAPGQTGKIADYNYKLPDDFTGCVIAWNSKHIDAKEGGNFNYLYRLFRKANLKPFERDISTEIYQAGSKPCNGQTGLNCYYPLYRYGFYPTDGVGHQPYRVVVLSFELLNAPATVCGPKKSTNLVKNKCVNFNFNGLTGTGVLTESNKKFLPFQQFGRDIADTTDAVRDPQTLEILDITPCSFGGVSVITPGTNASNQVAVLYQDVNCTEVPVAIHADQLTPTWRVYSTGSNVFQTRAGCLIGAEHVNNSYECDIPIGAGICASYQTQTNSRSVASQSIIAYTMSLGAENSVAYSNNSIAIPTNFTISVTTEILPVSMTKTSVDCTMYICGDSTECSNLLLQYGSFCTQLNRALTGIAVEQDKNTQEVFAQVKQIYKTPPIKDFGGFNFSQILPDPSKPSKRSFIEDLLFNKVTLADAGFIKQYGDCLGDIAARDLICAQKFNGLTVLPPLLTDEMIAQYTSALLAGTITSGWTFGAGAALQIPFAMQMAYRFNGCGVTQNVLYENQKLIANQFNSAIGKIQDSLSSTASALGKLQDVVNQNAQALNTLVKQLSSNFGAISSVLNDILSRLDKVEAEVQIDRLITGRLQSLQTYVTQQLIRAAEIRASANLAATKMSECVLGQSKRVDFCGKGCHLMSFPQSAPHGVVFLHVTYVPAQEKNFTTAPAICHDGKAHFPREGVFVSNGTHWFVTQRNFYEPQIITTDNTFVSGSCDVVIGIVNNTVYDPLQPELDSFKEELDKYFKNHTSPDVDLGDISGINASVVNIQKEIDRLNEVAKNLNESLIDLQELGKYEQYIKGGGSGGGQIYEGKLTAEGLRFGIVASRFNHALVDRLVEGAIDAIVRHGGREEDITLVRVPGSWEIPVAAGELARKEDIDAVIAIGVLIRGATPHFDYIASEVSKGLADLSLELRKPITFGVITADTLEQAIERAGTKHGNKGWEAALSAIEMANLFKSLR

SEQ ID NO: 4229 - protein, 1371 aa, Artificial Sequence
  SARS-CoV-2/Wuhan/HBCDC-HB-01/2019__EPI_ISL_402132 spike protein (1-1211)(I909C_Y1047C) LumSynth construct
MFVFLVLLPLVSSQCVNLTTRTQLPPAYTNSITRGVYYPDKVFRSSVLHSTQDLFLPFFSNVTWFHAIHVSGTNGTKRFDNPVLPFNDGVYFASTEKSNIIRGWIFGTTLDSKTQSLLIVNNATNVVIKVCEFQFCNDPFLGVYYHKNNKSWMESEFRVYSSANNCTFEYVSQPFLMDLEGKQGNFKNLREFVFKNIDGYFKIYSKHTPINLVRDLPQGFSALEPLVDLPIGINITRFQTLLALHRSYLTPGDSSSGWTAGAAAYYVGYLQPRTFLLKYNENGTITDAVDCALDPLSETKCTLKSFTVEKGIYQTSNFRVQPTESIVRFPNITNLCPFGEVFNATRFASVYAWNRKRISNCVADYSVLYNSASFSTFKCYGVSPTKLNDLCFTNVYADSFVIRGDEVRQIAPGQTGKIADYNYKLPDDFTGCVIAWNSNNLDSKVGGNYNYLYRLFRKSNLKPFERDISTEIYQAGSTPCNGVEGFNCYFPLQSYGFQPTNGVGYQPYRVVVLSFELLHAPATVCGPKKSTNLVKNKCVNFNFNGLTGTGVLTESNKKFLPFQQFGRDIADTTDAVRDPQTLEILDITPCSFGGVSVITPGTNTSNQVAVLYQDVNCTEVPVAIHADQLTPTWRVYSTGSNVFQTRAGCLIGAEHVNNSYECDIPIGAGICASYQTQTNSPRRARSVASQSIIAYTMSLGAENSVAYSNNSIAIPTNFTISVTTEILPVSMTKTSVDCTMYICGDSTECSNLLLQYGSFCTQLNRALTGIAVEQDKNTQEVFAQVKQIYKTPPIKDFGGFNFSQILPDPSKPSKRSFIEDLLFNKVTLADAGFIKQYGDCLGDIAARDLICAQKFNGLTVLPPLLTDEMIAQYTSALLAGTITSGWTFGAGAALQIPFAMQMAYRFNGCGVTQNVLYENQKLIANQFNSAIGKIQDSLSSTASALGKLQDVVNQNAQALNTLVKQLSSNFGAISSVLNDILSRLDKVEAEVQIDRLITGRLQSLQTYVTQQLIRAAEIRASANLAATKMSECVLGQSKRVDFCGKGCHLMSFPQSAPHGVVFLHVTYVPAQEKNFTTAPAICHDGKAHFPREGVFVSNGTHWFVTQRNFYEPQIITTDNTFVSGNCDVVIGIVNNTVYDPLQPELDSFKEELDKYFKNHTSPDVDLGDISGINASVVNIQKEIDRLNEVAKNLNESLIDLQELGKYEQYIKGGGSGGGQIYEGKLTAEGLRFGIVASRFNHALVDRLVEGAIDAIVRHGGREEDITLVRVPGSWEIPVAAGELARKEDIDAVIAIGVLIRGATPHFDYIASEVSKGLADLSLELRKPITFGVITADTLEQAIERAGTKHGNKGWEAALSAIEMANLFKSLR

SEQ ID NO: 4230 - protein, 1371 aa, Artificial Sequence
  SARS-CoV-2/Guangdong/20SF028/2020__EPI_ISL_403936 spike protein (1-1211)(I909C_Y1047C) LumSynth construct
MFVFLVLLPLVSSQCVNLTTRTQLPPAYTNSFTRGVYYPDKVFRSSVLYSTQDLFLPFFSNVTWFHAIHVSGTNGTKRFDNPVLPFNDGVYFASTEKSNIIRGWIFGTTLDSKTQSLLIVNNATNVVIKVCEFQFCNDPFLGVYYHKNNKSWMESEFRVYSSANNCTFEYVSQPFLMDLEGKQGNFKNLREFVFKNIDGYFKIYSKHTPINLVRDLPQGFSALEPLVDLPIGINITRFQTLLALHRSYLTPGDSSSGWTAGAAAYYVGYLQPRTFLLKYNENGTITDAVDCALDPLSETKCTLKSFTVEKGIYQTSNFRVQPTESIVRFPNITNLCPFGEVFNATRFASVYAWNRKRISNCVADYSVLYNSASFSTFKCYGVSPTKLNDLCFTNVYADSFVIRGDEVRQIAPGQTGKIADYNYKLPDDFTGCVIAWNSNNLDSKVGGNYNYLYRLFRKSNLKPFERDISTEIYQAGSTPCNGVEGFNCYFPLQSYGFQPTNGVGYQPYRVVVLSFELLHAPATVCGPKKSTNLVKNKCVNFNFNGLTGTGVLTESNKKFLPFQQFGRDIADTTDAVRDPQTLEILDITPCSFGGVSVITPGTNTSNQVAVLYQDVNCTEVPVAIHADQLTPTWRVYSTGSNVFQTRAGCLIGAEHVNNSYECDIPIGAGICASYQTQTNSPRRARSVASQSIIAYTMSLGAENSVAYSNNSIAIPTNFTISVTTEILPVSMTKTSVDCTMYICGDSTECSNLLLQYGSFCTQLNRALTGIAVEQDKNTQEVFAQVKQIYKTPPIKDFGGFNFSQILPDPSKPSKRSFIEDLLFNKVTLADAGFIKQYGDCLGDIAARDLICAQKFNGLTVLPPLLTDEMIAQYTSALLAGTITSGWTFGAGAALQIPFAMQMAYRFNGCGVTQNVLYENQKLIANQFNSAIGKIQDSLSSTASALGKLQDVVNQNAQALNTLVKQLSSNFGAISSVLNDILSRLDKVEAEVQIDRLITGRLQSLQTYVTQQLIRAAEIRASANLAATKMSECVLGQSKRVDFCGKGCHLMSFPQSAPHGVVFLHVTYVPAQEKNFTTAPAICHDGKAHFPREGVFVSNGTHWFVTQRNFYEPQIITTDNTFVSGNCDVVIGIVNNTVYDPLQPELDSFKEELDKYFKNHTSPDVDLGDISGINASVVNIQKEIDRLNEVAKNLNESLIDLQELGKYEQYIKGGGSGGGQIYEGKLTAEGLRFGIVASRFNHALVDRLVEGAIDAIVRHGGREEDITLVRVPGSWEIPVAAGELARKEDIDAVIAIGVLIRGATPHFDYIASEVSKGLADLSLELRKPITFGVITADTLEQAIERAGTKHGNKGWEAALSAIEMANLFKSLR

SEQ ID NO: 4231 - protein, 1371 aa, Artificial Sequence
  SARS-CoV-2/Shenzhen/SZTH-001/2020__EPI_ISL_406592 spike protein (1-1211)(I909C_Y1047C) LumSynth construct
MFVFLVLLPLVSSQCVNLTTRTQLPPAYTNSFTRGVYYPDKVFRSSVLHSTQDLFLPFFSNVTWFHAIHVSGTNGTKRFDNPVLPFNDGVYFASTEKSNIIRGWIFGTTLDSKTQSLLIVNNATNVVIKVCEFQFCNDPFLGVYYHKNNKSWMESEFRVYSSANNCTFEYVSQPFLMDLEGKQGNFKNLREFVFKNIDGYFKIYSKHTPINLVRDLPQGFSALEPLVDLPIGINITRFQTLLALHRSYLTPGDSSSGWTAGAAAYYVGYLQPRTFLLKYNENGTITDAVDCALDPLSETKCTLKSFTVEKGIYQTSNFRVQPTESIVRFPNITNLCPFGEVFNATRFASVYAWNRKRISNCVADYSVLYNSASFSTFKCYGVSPTKLNDLCFTNVYADSFVIRGDEVRQIAPGQTGKIADYNYKLPDDFTGCVIAWNSNNLDSKVGGNYNYLYRLFRKSNLKPFERDISTEIYQAGSTPCNGVEGFNCYFPLQSYGFQPTNGVGYQPYRVVVLSFELLHAPATVCGPKKSTNLVKNKCVNFNFNGLTGTGVLTESNKKFLPFQQFGRDIADTTDAVRDPQTLEILDITPCSFGGVSVITPGTNTSNQVAVLYQDVNCTEVPVAIHADQLTPTWRVYSTGSNVFQTRAGCLIGAEHVNNSYECDIPIGAGICASYQTQTNSPRRARSVASQSIIAYTMSLGAENSVAYSNNSIAIPTNFTISVTTEILPVSMTKTSVDCTMYICGDSTECSNLLLQYGSFCTQLNRALTGIAVEQDKNTQEVFAQVKQIYKTPPIKDFGGFNFSQILPDPSKPSKRSFIEDLLFNKVTLADAGFIKQYGDCLGDIAARDLICAQKFNGLTVLPPLLTDEMIAQYTSALLAGTITSGWTFGAGAALQIPFAMQMAYRFNGCGVTQNVLYENQKLIANQFNSAIGKIQDSLSSTASALGKLQDVVNQNAQALNTLVKQLSSNFGAISSVLNDILSRLDKVEAEVQIDRLITGRLQSLQTYVTQQLIRAAEIRASANLAATKMSECVLGQSKRVDFCGKGCHLMSFPQSAPHGVVFLHVTYVPAQEKNFTTAPAICHDGKAHFPREGVFVSNGTHWFVTQRNFYEPQIITTDNTFVSGNCDVLIGIVNNTVYDPLQPELDSFKEELDKYFKNHTSPDVDLGDISGINASVVNIQKEIDRLNEVAKNLNESLIDLQELGKYEQYIKGGGSGGGQIYEGKLTAEGLRFGIVASRFNHALVDRLVEGAIDAIVRHGGREEDITLVRVPGSWEIPVAAGELARKEDIDAVIAIGVLIRGATPHFDYIASEVSKGLADLSLELRKPITFGVITADTLEQAIERAGTKHGNKGWEAALSAIEMANLFKSLR

SEQ ID NO: 4232 - protein, 1371 aa, Artificial Sequence
  SARS-CoV-2/Shenzhen/SZTH-004/2020__EPI_ISL_406595 spike protein (1-1211)(I909C_Y1047C) LumSynth construct
MFVFLVLLPLVSSQCVNLTTRTQLPPAYTNSFTRGVYYPDKVFRSSVLHSTQDLFLPFFSNVTWFHAIHVSGTNGTKRFDNPVLPFNDGVYFASTEKSNIIRGWIFGTTLDSKTQSLLIVNNATNVVIKVCEFQFCNDPFLGVYYHKNNKSWMESEFRVYSSANNCTFEYVSQPFLMDLEGKQGNFKNLREFVFKNIDGYFKIYSKHTPINLVRDLPQGFSALEPLVDLPIGINITRFQTLLALHRSYLTPGDSSSGWTAGAAAYYVGYLQPRTFLLKYNENGTITDAVDCALDPLSETKCTLKSFTVEKGIYQTSNFRVQPTESIVRFPNITNLCPFGEVFNATRFASVYAWDRKRISNCVAYYSVLYNSASFSTFKCYGVSPTKLNDLCFTNVYADSFVIRGDEVRQIAPGQTGKIADYNYKLPDDFTGCVIAWNSNNLDSKVGGNYNYLYRLFRKSNLKPFERDISTEIYQAGSTPCNGVEGFNCYFPLQSYGFQPTNGVGYQPYRVVVLSFELLHAPATVCGPKKSTNLVKNKCVNFNFNGLTGTGVLTESNKKFLPFQQFGRDIADTTDAVRDPQTLEILDITPCSFGGVSVITPGTNTSNQVAVLYQDVNCTEVPVAIHADQLTPTWRVYSTGSNVFQTRAGCLIGAEHVNNSYECDIPIGAGICASYQTQTNSPRRARSVASQSIIAYTMSLGAENSVAYSNNSIAIPTNFTISVTTEILPVSMTKTSVDCTMYICGDSTECSNLLLQYGSFCTQLNRALTGIAVEQDKNTQEVFAQVKQIYKTPPIKDFGGFNFSQILPDPSKPSKRSFIEDLLFNKVTLADAGFIKQYGDCLGDIAARDLICAQKFNGLTVLPPLLTDEMIAQYTSALLAGTITSGWTFGAGAALQIPFAMQMAYRFNGCGVTQNVLYENQKLIANQFNSAIGKIQDSLSSTASALGKLQDVVNQNAQALNTLVKQLSSNFGAISSVLNDILSRLDKVEAEVQIDRLITGRLQSLQTYVTQQLIRAAEIRASANLAATKMSECVLGQSKRVDFCGKGCHLMSFPQSAPHGVVFLHVTYVPAQEKNFTTAPAICHDGKAHFPREGVFVSNGTHWFVTQRNFYEPQIITTDNTFVSGNCDVVIGIVNNTVYDPLQPELDSFKEELDKYFKNHTSPDVDLGDISGINASVVNIQKEIDRLNEVAKNLNESLIDLQELGKYEQYIKGGGSGGGQIYEGKLTAEGLRFGIVASRFNHALVDRLVEGAIDAIVRHGGREEDITLVRVPGSWEIPVAAGELARKEDIDAVIAIGVLIRGATPHFDYIASEVSKGLADLSLELRKPITFGVITADTLEQAIERAGTKHGNKGWEAALSAIEMANLFKSLR

SEQ ID NO: 4233 - protein, 1371 aa, Artificial Sequence
  SARS-CoV-2/France/IDF0372/2020__EPI_ISL_406596 spike protein (1-1211)(I909C_Y1047C) LumSynth construct
MFVFLVLLPLVSSQCVNLTTRTQLPPAYTNSFTRGVYYPDKVFRSSVLHSTQDLFLPFFSNVTWFHAIHVSGTNGTKRFDNPVLPFNDGVYFASTEKSNIIRGWIFGTTLDSKTQSLLIVNNATNVVIKVCEFQFCNDPFLGVYYHKNNKSWMESEFRVYSSANNCTFEYVSQPFLMDLEGKQGNFKNLREFVFKNIDGYFKIYSKHTPINLVRDLPQGFSALEPLVDLPIGINITRFQTLLALHRSYLTPGDSSSGWTAGAAAYYVGYLQPRTFLLKYNENGTITDAVDCALDPLSETKCTLKSFTVEKGIYQTSNFRVQPTESIVRFPNITNLCPFGEVFNATRFASVYAWNRKRISNCVADYSFLYNSASFSTFKCYGVSPTKLNDLCFTNVYADSFVIRGDEVRQIAPGQTGKIADYNYKLPDDFTGCVIAWNSNNLDSKVGGNYNYLYRLFRKSNLKPFERDISTEIYQAGSTPCNGVEGFNCYFPLQSYGFQPTNGVGYQPYRVVVLSFELLHAPATVCGPKKSTNLVKNKCVNFNFNGLTGTGVLTESNKKFLPFQQFGRDIADTTDAVRDPQTLEILDITPCSFGGVSVITPGTNTSNQVAVLYQDVNCTEVPVAIHADQLTPTWRVYSTGSNVFQTRAGCLIGAEHVNNSYECDIPIGAGICASYQTQTNSPRRARSVASQSIIAYTMSLGAENSVAYSNNSIAIPTNFTISVTTEILPVSMTKTSVDCTMYICGDSTECSNLLLQYGSFCTQLNRALTGIAVEQDKNTQEVFAQVKQIYKTPPIKDFGGFNFSQILPDPSKPSKRSFIEDLLFNKVTLADAGFIKQYGDCLGDIAARDLICAQKFNGLTVLPPLLTDEMIAQYTSALLAGTITSGWTFGAGAALQIPFAMQMAYRFNGCGVTQNVLYENQKLIANQFNSAIGKIQDSLSSTASALGKLQDVVNQNAQALNTLVKQLSSNFGAISSVLNDILSRLDKVEAEVQIDRLITGRLQSLQTYVTQQLIRAAEIRASANLAATKMSECVLGQSKRVDFCGKGCHLMSFPQSAPHGVVFLHVTYVPAQEKNFTTAPAICHDGKAHFPREGVFVSNGTHWFVTQRNFYEPQIITTDNTFVSGNCDVVIGIVNNTVYDPLQPELDSFKEELDKYFKNHTSPDVDLGDISGINASVVNIQKEIDRLNEVAKNLNESLIDLQELGKYEQYIKGGGSGGGQIYEGKLTAEGLRFGIVASRFNHALVDRLVEGAIDAIVRHGGREEDITLVRVPGSWEIPVAAGELARKEDIDAVIAIGVLIRGATPHFDYIASEVSKGLADLSLELRKPITFGVITADTLEQAIERAGTKHGNKGWEAALSAIEMANLFKSLR

SEQ ID NO: 4234 - protein, 1371 aa, Artificial Sequence
  SARS-CoV-2/Australia/VIC01/2020__EPI_ISL_406844 spike protein (1-1211)(I909C_Y1047C) LumSynth construct
MFVFLVLLPLVSSQCVNLTTRTQLPPAYTNSFTRGVYYPDKVFRSSVLHSTQDLFLPFFSNVTWFHAIHVSGTNGTKRFDNPVLPFNDGVYFASTEKSNIIRGWIFGTTLDSKTQSLLIVNNATNVVIKVCEFQFCNDPFLGVYYHKNNKSWMESEFRVYSSANNCTFEYVSQPFLMDLEGKQGNFKNLREFVFKNIDGYFKIYSKHTPINLVRDLPQGFSALEPLVDLPIGINITRFQTLLALHRRYLTPGDSSSGWTAGAAAYYVGYLQPRTFLLKYNENGTITDAVDCALDPLSETKCTLKSFTVEKGIYQTSNFRVQPTESIVRFPNITNLCPFGEVFNATRFASVYAWNRKRISNCVADYSVLYNSASFSTFKCYGVSPTKLNDLCFTNVYADSFVIRGDEVRQIAPGQTGKIADYNYKLPDDFTGCVIAWNSNNLDSKVGGNYNYLYRLFRKSNLKPFERDISTEIYQAGSTPCNGVEGFNCYFPLQSYGFQPTNGVGYQPYRVVVLSFELLHAPATVCGPKKSTNLVKNKCVNFNFNGLTGTGVLTESNKKFLPFQQFGRDIADTTDAVRDPQTLEILDITPCSFGGVSVITPGTNTSNQVAVLYQDVNCTEVPVAIHADQLTPTWRVYSTGSNVFQTRAGCLIGAEHVNNSYECDIPIGAGICASYQTQTNSPRRARSVASQSIIAYTMSLGAENSVAYSNNSIAIPTNFTISVTTEILPVSMTKTSVDCTMYICGDSTECSNLLLQYGSFCTQLNRALTGIAVEQDKNTQEVFAQVKQIYKTPPIKDFGGFNFSQILPDPSKPSKRSFIEDLLFNKVTLADAGFIKQYGDCLGDIAARDLICAQKFNGLTVLPPLLTDEMIAQYTSALLAGTITSGWTFGAGAALQIPFAMQMAYRFNGCGVTQNVLYENQKLIANQFNSAIGKIQDSLSSTASALGKLQDVVNQNAQALNTLVKQLSSNFGAISSVLNDILSRLDKVEAEVQIDRLITGRLQSLQTYVTQQLIRAAEIRASANLAATKMSECVLGQSKRVDFCGKGCHLMSFPQSAPHGVVFLHVTYVPAQEKNFTTAPAICHDGKAHFPREGVFVSNGTHWFVTQRNFYEPQIITTDNTFVSGNCDVVIGIVNNTVYDPLQPELDSFKEELDKYFKNHTSPDVDLGDISGINASVVNIQKEIDRLNEVAKNLNESLIDLQELGKYEQYIKGGGSGGGQIYEGKLTAEGLRFGIVASRFNHALVDRLVEGAIDAIVRHGGREEDITLVRVPGSWEIPVAAGELARKEDIDAVIAIGVLIRGATPHFDYIASEVSKGLADLSLELRKPITFGVITADTLEQAIERAGTKHGNKGWEAALSAIEMANLFKSLR

SEQ ID NO: 4235 - protein, 1371 aa, Artificial Sequence
  SARS-CoV-2/Germany/BavPat1/2020__EPI_ISL_406862 spike protein (1-1211)(I909C_Y1047C) LumSynth construct
MFVFLVLLPLVSSQCVNLTTRTQLPPAYTNSFTRGVYYPDKVFRSSVLHSTQDLFLPFFSNVTWFHAIHVSGTNGTKRFDNPVLPFNDGVYFASTEKSNIIRGWIFGTTLDSKTQSLLIVNNATNVVIKVCEFQFCNDPFLGVYYHKNNKSWMESEFRVYSSANNCTFEYVSQPFLMDLEGKQGNFKNLREFVFKNIDGYFKIYSKHTPINLVRDLPQGFSALEPLVDLPIGINITRFQTLLALHRSYLTPGDSSSGWTAGAAAYYVGYLQPRTFLLKYNENGTITDAVDCALDPLSETKCTLKSFTVEKGIYQTSNFRVQPTESIVRFPNITNLCPFGEVFNATRFASVYAWNRKRISNCVADYSVLYNSASFSTFKCYGVSPTKLNDLCFTNVYADSFVIRGDEVRQIAPGQTGKIADYNYKLPDDFTGCVIAWNSNNLDSKVGGNYNYLYRLFRKSNLKPFERDISTEIYQAGSTPCNGVEGFNCYFPLQSYGFQPTNGVGYQPYRVVVLSFELLHAPATVCGPKKSTNLVKNKCVNFNFNGLTGTGVLTESNKKFLPFQQFGRDIADTTDAVRDPQTLEILDITPCSFGGVSVITPGTNTSNQVAVLYQGVNCTEVPVAIHADQLTPTWRVYSTGSNVFQTRAGCLIGAEHVNNSYECDIPIGAGICASYQTQTNSPRRARSVASQSIIAYTMSLGAENSVAYSNNSIAIPTNFTISVTTEILPVSMTKTSVDCTMYICGDSTECSNLLLQYGSFCTQLNRALTGIAVEQDKNTQEVFAQVKQIYKTPPIKDFGGFNFSQILPDPSKPSKRSFIEDLLFNKVTLADAGFIKQYGDCLGDIAARDLICAQKFNGLTVLPPLLTDEMIAQYTSALLAGTITSGWTFGAGAALQIPFAMQMAYRFNGCGVTQNVLYENQKLIANQFNSAIGKIQDSLSSTASALGKLQDVVNQNAQALNTLVKQLSSNFGAISSVLNDILSRLDKVEAEVQIDRLITGRLQSLQTYVTQQLIRAAEIRASANLAATKMSECVLGQSKRVDFCGKGCHLMSFPQSAPHGVVFLHVTYVPAQEKNFTTAPAICHDGKAHFPREGVFVSNGTHWFVTQRNFYEPQIITTDNTFVSGNCDVVIGIVNNTVYDPLQPELDSFKEELDKYFKNHTSPDVDLGDISGINASVVNIQKEIDRLNEVAKNLNESLIDLQELGKYEQYIKGGGSGGGQIYEGKLTAEGLRFGIVASRFNHALVDRLVEGAIDAIVRHGGREEDITLVRVPGSWEIPVAAGELARKEDIDAVIAIGVLIRGATPHFDYIASEVSKGLADLSLELRKPITFGVITADTLEQAIERAGTKHGNKGWEAALSAIEMANLFKSLR

SEQ ID NO: 4236 - protein, 1371 aa, Artificial Sequence
  SARS-CoV-2/Wuhan/HBCDC-HB-02/2020__EPI_ISL_412978 spike protein (1-1211)(I909C_Y1047C) LumSynth construct
MFVFLVLLPLVSSQCVNLTTRTQLPPAYTNSFTRGVYYPDKVFRSSVLHSTQDLFLPFFSNVTWFHAIHVSGTNGTKRFDNPVLPFNDGVYFASTEKSNIIRGWIFGTTLDSKTQSLLIVNNATNVVIKVCEFQFCNDPFLGVYYHKNNKSWMESEFRVYSSANNCTFEYVSQPFLMDLEGKQGNFKNLREFVFKNIDGYFKIYSKHTPINLVRDLPQGFSALEPLVDLPIGINITRFQTLLALHRSYLTPGDSSSGWTAGAAAYYVGYLQPRTFLLKYNENGTITDAVDCALDPLSETKCTLKSFTVEKGIYQTSNFRVQPTESIVRFPNITNLCPFGEVFNATRFASVYAWNRKRISNCVADYSVLYNSASFSTFKCYGVSPTKLNDLCFTNVYADSFVIRGDEVRQIAPGQTGKIADYNYKLPDDFTGCVIAWNSNNLDSKVGGNYNYLYRLFRKSNLKPFERDISTEIYQAGSTPCNGVEGFNCYFPLQSYGFQPTNGVGYQPYRVVVLSFELLHAPATVCGPKKSTNLVKNKCVNFNFNGLTGTGVLTESNKKFLPFQQFGRDIADTTDAVRDPQTLEILDITPCSFGGVSVITPGTNTSNQVAVLYQDVNCTEVPVAIHADQLTPTWRVYSTGSNVFQTRAGCLIGAEHVNNSYECDIPIGAGICASYQTQTNSPRRARSVASQSIIAYTMSLGAENSVAYSNNSIAIPTNFTISVTTEILPVSMTKTSVDCTMYICGDSTECSNFLLQYGSFCTQLNRALTGIAVEQDKNTQEVFAQVKQIYKTPPIKDFGGFNFSQILPDPSKPSKRSFIEDLLFNKVTLADAGFIKQYGDCLGDIAARDLICAQKFNGLTVLPPLLTDEMIAQYTSALLAGTITSGWTFGAGAALQIPFAMQMAYRFNGCGVTQNVLYENQKLIANQFNSAIGKIQDSLSSTASALGKLQDVVNQNAQALNTLVKQLSSNFGAISSVLNDILSRLDKVEAEVQIDRLITGRLQSLQTYVTQQLIRAAEIRASANLAATKMSECVLGQSKRVDFCGKGCHLMSFPQSAPHGVVFLHVTYVPAQEKNFTTAPAICHDGKAHFPREGVFVSNGTHWFVTQRNFYEPQIITTDNTFVSGNCDVVIGIVNNTVYDPLQPELDSFKEELDKYFKNHTSPDVDLGDISGINASVVNIQKEIDRLNEVAKNLNESLIDLQELGKYEQYIKGGGSGGGQIYEGKLTAEGLRFGIVASRFNHALVDRLVEGAIDAIVRHGGREEDITLVRVPGSWEIPVAAGELARKEDIDAVIAIGVLIRGATPHFDYIASEVSKGLADLSLELRKPITFGVITADTLEQAIERAGTKHGNKGWEAALSAIEMANLFKSLR

SEQ ID NO: 4237 - protein, 1371 aa, Artificial Sequence
  SARS-CoV-2/Australia/QLD02/2020__EPI_ISL_407896 spike protein (1-1211)(I909C_Y1047C) LumSynth construct
MFVFLVLLPLVSSQCVNLTTRTQLPPAYTNSFTRGVYYPDKVFRSSVLHSTQDLFLPFFSNVTWFHAIHVSGTNGTKRFDNPVLPFNDGVYFASTEKSNIIRGWIFGTTLDSKTQSLLIVNNATNVVIKVCEFQFCNDPFLGVYYHKNNKSWMESEFRVYSSANNCTFEYVSQPFLMDLEGKQGNFKNLREFVFKNIDGYFKIYSKHTPINLVRDLPQGFSALEPLVDLPIGINITRFQTLLALHRSYLTPGDSSSGWTAGAAAYYVGYLQPRTFLLKYNENGTITDAVDCALDPLSETKCTLKSFTVEKGIYQTSNFRVQPTESIVRFPNITNLCPFGEVFNATRFASVYAWNRKRISNCVADYSVLYNSASFSTFKCYGVSPTKLNDLCFTNVYADSFVIRGDEVRQIAPGQTGKIADYNYKLPDDFTGCVIAWNSNNLDSKVGGNYNYLYRLFRKSNLKPFERDISTEIYQAGSTPCNGVEGFNCYFPLQSYGFQPTNGVGYQPYRVVVLSFELLHAPATVCGPKKSTNLVKNKCVNFNFNGLTGTGVLTESNKKFLPFQQFGRDIADTTDAVRDPQTLEILDITPCSFGGVSVITPGTNTSNQVAVLYQDVNCTEVPVAIHADQLTPTWRVYSTGSNVFQTRAGCLIGAEHVNNSYECDIPIGAGICASYQTQTNSPRRARSVASQSIIAYTMSLGAENSVAYSNNSIAIPTNFTISVTTEILPVSMTKTSVDCTMYICGDSTECSNLLLQYGSFCTQLNRALTGIAVEQDKNTQEVFAQVKQIYKTPPIKDFGGFNFSQILPDPSKPSKRSFIEDLLFNKVTLADAGFIKQYGDCLGDIAARDLICAQKFNGLTVLPPLLTDEMIAQYTSALLAGTITSGWTFGAGAALQIPFAMQMAYRFNGCGVTQNVLYENQKLIANQFNSAIGKIQDSLSSTASALGKLQDVVNQNAQALNTLVKQLSSNFGAISSVLNDILSRLDKVEAEVQIDRLITGRLQSLQTYVTQQLIRAAEIRASANLAATKMSECVLGQSKRVDFCGKGCHLMSFPQSAPHGVVFLHVTYVPAQEKNFTTAPAICHDGKAHFPREGVFVSNGTHWFVTQRNFYEPQIITTDNTFVSGNCDVVIGIVNNTVYDPLQLELDSFKEELDKYFKNHTSPDVDLGDISGINASVVNIQKEIDRLNEVAKNLNESLIDLQELGKYEQYIKGGGSGGGQIYEGKLTAEGLRFGIVASRFNHALVDRLVEGAIDAIVRHGGREEDITLVRVPGSWEIPVAAGELARKEDIDAVIAIGVLIRGATPHFDYIASEVSKGLADLSLELRKPITFGVITADTLEQAIERAGTKHGNKGWEAALSAIEMANLFKSLR

SEQ ID NO: 4238 - protein, 1371 aa, Artificial Sequence
  SARS-CoV-2/India/1-31/2020__EPI_ISL_413523 spike protein (1-1211)(I909C_Y1047C) LumSynth construct
MFVFLVLLPLVSSQCVNLTTRTQLPPAYTNSFTRGVYYPDKVFRSSVLHSTQDLFLPFFSNVTWFHAIHVSGTNGTKRFDNPVLPFNDGVYFASTEKSNIIRGWIFGTTLDSKTQSLLIVNNATNVVIKVCEFQFCNDPFLGVYYHKNNKSWMESEFRVYSSANNCTFEYVSQPFLMDLEGKQGNFKNLREFVFKNIDGYFKIYSKHTPINLVRDLPQGFSALEPLVDLPIGINITRFQTLLALHRSYLTPGDSSSGWTAGAAAYYVGYLQPRTFLLKYNENGTITDAVDCALDPLSETKCTLKSFTVEKGIYQTSNFRVQPTESIVRFPNITNLCPFGEVFNATRFASVYAWNRKRISNCVADYSVLYNSASFSTFKCYGVSPTKLNDLCFTNVYADSFVIRGDEVRQIAPGQTGKIADYNYKLPDDFTGCVIAWNSNNLDSKVGGNYNYLYRLFRKSNLKPFERDISTEIYQAGSTPCNGVEGFNCYFPLQSYGFQPTNGVGYQPYRVVVLSFELLHAPATVCGPKKSTNLVKNKCVNFNFNGLTGTGVLTESNKKFLPFQQFGRDIADTTDAVRDPQTLEILDITPCSFGGVSVITPGTNTSNQVAVLYQDVNCTEVPVAIHADQLTPTWRVYSTGSNVFQTRAGCLIGAEHVNNSYECDIPIGAGICASYQTQTNSPRRARSVASQSIIAYTMSLGAENSVAYSNNSIAIPTNFTISVTTEILPVSMTKTSVDCTMYICGDSTECSNLLLQYGSFCTQLNRALTGIAVEQDKNTQEVFAQVKQIYKTPPIKDFGGFNFSQILPDPSKPSKRSFIEDLLFNKVTLADAGFIKQYGDCLGDIAARDLICAQKFNGLTVLPPLLTDEMIAQYTSALLAGTITSGWTFGAGAALQIPFAMQMAYRFNGCGVTQNVLYENQKLIANQFNSVIGKIQDSLSSTASALGKLQDVVNQNAQALNTLVKQLSSNFGAISSVLNDILSRLDKVEAEVQIDRLITGRLQSLQTYVTQQLIRAAEIRASANLAATKMSECVLGQSKRVDFCGKGCHLMSFPQSAPHGVVFLHVTYVPAQEKNFTTAPAICHDGKAHFPREGVFVSNGTHWFVTQRNFYEPQIITTDNTFVSGNCDVVIGIVNNTVYDPLQPELDSFKEELDKYFKNHTSPDVDLGDISGINASVVNIQKEIDRLNEVAKNLNESLIDLQELGKYEQYIKGGGSGGGQIYEGKLTAEGLRFGIVASRFNHALVDRLVEGAIDAIVRHGGREEDITLVRVPGSWEIPVAAGELARKEDIDAVIAIGVLIRGATPHFDYIASEVSKGLADLSLELRKPITFGVITADTLEQAIERAGTKHGNKGWEAALSAIEMANLFKSLR

SEQ ID NO: 4239 - protein, 1371 aa, Artificial Sequence
  SARS-CoV-2/Guangdong/GD2020087-P0008/2020__EPI_ISL_413863 spike protein (1-1211)(I909C_Y1047C) LumSynth construct
MFVFLVLLPLVSSQCVNLTTRTQLPPAYTNSFTRGVYYPDKVFRSSVLHSTQDLFLPFFSNVTWFHAIHVSGTNGTKRFDNPVLPFNDGVYFASTEKSNIIRGWIFGTTLDSKTQSLLIVNNATNVVIKVCEFQFCNDPFLGVYYHKNNKSWMESEFRVYSSANNCTFEYVSQPFLMDLEGKQGNFKNLREFVFKNIDGYFKIYSKHTPINLVRDLPQGFSALEPLVDLPIGINITRFQTLLALHRSYLTPGDSSSGWTAGAAAYYVGYLQPRTFLLKYNENGTITDAVDCALDPLSETKCTLKSFTVEKGIYQTSNFRVQPTESIVRFPNITNLCPFGEVFNATRFASVYAWNRKRISNCVADYSVLYNSASFSTFKCYGVSPTKLNDLCFTNVYADSFVIRGDEVREIAPGQTGKIADYNYKLPDDFTGCVIAWNSNNLDSKVGGNYNYLYRLFRKSNLKPFERDISTEIYQAGSTPCNGVEGFNCYFPLQSYGFQPTNGVGYQPYRVVVLSFELLHAPATVCGPKKSTNLVKNKCVNFNFNGLTGTGVLTESNKKFLPFQQFGRDIADTTDAVRDPQTLEILDITPCSFGGVSVITPGTNTSNQVAVLYQDVNCTEVPVAIHADQLTPTWRVYSTGSNVFQTRAGCLIGAEHVNNSYECDIPIGAGICASYQTQTNSPRRARSVASQSIIAYTMSLGAENSVAYSNNSIAIPTNFTISVTTEILPVSMTKTSVDCTMYICGDSTECSNLLLQYGSFCTQLNRALTGIAVEQDKNTQEVFAQVKQIYKTPPIKDFGGFNFSQILPDPSKPSKRSFIEDLLFNKVTLADAGFIKQYGDCLGDIAARDLICAQKFNGLTVLPPLLTDEMIAQYTSALLAGTITSGWTFGAGAALQIPFAMQMAYRFNGCGVTQNVLYENQKLIANQFNSAIGKIQDSLSSTASALGKLQDVVNQNAQALNTLVKQLSSNFGAISSVLNDILSRLDKVEAEVQIDRLITGRLQSLQTYVTQQLIRAAEIRASANLAATKMSECVLGQSKRVDFCGKGCHLMSFPQSAPHGVVFLHVTYVPAQEKNFTTAPAICHDGKAHFPREGVFVSNGTHWFVTQRNFYEPQIITTDNTFVSGNCDVVIGIVNNTVYDPLQPELDSFKEELDKYFKNHTSPDVDLGDISGINASVVNIQKEIDRLNEVAKNLNESLIDLQELGKYEQYIKGGGSGGGQIYEGKLTAEGLRFGIVASRFNHALVDRLVEGAIDAIVRHGGREEDITLVRVPGSWEIPVAAGELARKEDIDAVIAIGVLIRGATPHFDYIASEVSKGLADLSLELRKPITFGVITADTLEQAIERAGTKHGNKGWEAALSAIEMANLFKSLR

SEQ ID NO: 4240 - protein, 1371 aa, Artificial Sequence
  SARS-CoV-2/Sweden/01/2020__EPI_ISL_411951 spike protein (1-1211)(I909C_Y1047C) LumSynth construct
MFVFLVLLPLVSSQCVNLTTRTQLPPAYTNSFTRGVYYPDKVFRSSVLHSTQDLFLPFFSNVTWFHAIHVSGTNGTKRFDNPVLPFNDGVYFASTEKSNIIRGWIFGTTLDSKTQSLLIVNNATNVVIKVCEFQFCNDPFLGVYYHKNNKSWMESEFRVYSSANNCTFEYVSQPFLMDLEGKQGNFKNLREFVFKNIDGYFKIYSKHTPINLVRDLPQGFSALEPLVDLPIGINITRFQTLLALHRSYLTPGDSSSGWTAGAAAYYVGYLQPRTFLLKYNENGTITDAVDCALDPLSETKCTLKSFTVEKGIYQTSNFRVQPTESIVRFPNITNLCPFGEVFNATRFASVYAWNRKRISNCVADYSVLYNSASFSTFKCYGVSPTKLNDLCFTNVYADSFVIRGDEVRQIAPGQTGKIADYNYKLPDDFTGCVIAWNSNNLDSKVGGNYNYLYRLFRKSNLKPFERDISTEIYQAGSTPCNGVEGFNCYFPLQSYGFQPTNGVGYQPYRVVVLSFELLHAPATVCGPKKSTNLVKNKCVNFNFNGLTGTGVLTESNKKFLPFQQFGRDIADTTDAVRDPQTLEILDITPCSFGGVSVITPGTNTSNQVAVLYQDVNCTEVPVAIHADQLTPTWRVYSTGSNVFQTRAGCLIGAEHVNNSYECDIPIGAGICASYQTQTNSPRRARSVASQSIIAYTMSLGAENSVAYSNNSIAIPTNFTISVTTEILPVSMTKTSVDCTMYICGDSTECSNLLLQYGSFCTQLNRALTGIAVEQDKNTQEVFAQVKQIYKTPPIKDCGGFNFSQILPDPSKPSKRSFIEDLLFNKVTLADAGFIKQYGDCLGDIAARDLICAQKFNGLTVLPPLLTDEMIAQYTSALLAGTITSGWTFGAGAALQIPFAMQMAYRFNGCGVTQNVLYENQKLIANQFNSAIGKIQDSLSSTASALGKLQDVVNQNAQALNTLVKQLSSNFGAISSVLNDILSRLDKVEAEVQIDRLITGRLQSLQTYVTQQLIRAAEIRASANLAATKMSECVLGQSKRVDFCGKGCHLMSFPQSAPHGVVFLHVTYVPAQEKNFTTAPAICHDGKAHFPREGVFVSNGTHWFVTQRNFYEPQIITTDNTFVSGNCDVVIGIVNNTVYDPLQPELDSFKEELDKYFKNHTSPDVDLGDISGINASVVNIQKEIDRLNEVAKNLNESLIDLQELGKYEQYIKGGGSGGGQIYEGKLTAEGLRFGIVASRFNHALVDRLVEGAIDAIVRHGGREEDITLVRVPGSWEIPVAAGELARKEDIDAVIAIGVLIRGATPHFDYIASEVSKGLADLSLELRKPITFGVITADTLEQAIERAGTKHGNKGWEAALSAIEMANLFKSLR

SEQ ID NO: 4241 - protein, 1371 aa, Artificial Sequence
  SARS-CoV-2/Tianmen/HBCDC-HB-07/2020__EPI_ISL_412983 spike protein (1-1211)(I909C_Y1047C) LumSynth construct
MFVFLVLLPLVSSQCVNLTTRTQLPPAYTNSFTRGVYYPDKVFRSSVLHSTQDLFLPFFSNVTWFHAIHVSGTNGTKRFDNPVLPFNDGVYFASTEKSNIIRGWIFGTTLDSKTQSLLIVNNATNVVIKVCEFQFCNDPFLGVYYHKNNKSWMESEFRVYSSANNCTFEYVSQPFLMDLEGKQGNFKNLREFVFKNIDGYFKIYSKHTPINLVRDLPQGFSALEPLVDLPIGINITRFQTLLALHRSYLTPGDSSSGWTAGAAAYYVGYLQPRTFLLKYNENGTITDAVDCALDPLSETKCTLKSFTVEKGIYQTSNFRVQPTESIVRFPNITNLCPFGEVFNATRFASVYAWNRKRISNCVADYSVLYNSASFSTFKCYGVSPTKLNDLCFTNVYADSFVIRGDEVRQIAPGQTGKIADYNYKLPDDFTGCVIAWNSNNLDSKVGGNYNYLYRLFRKSNLKPFERDISTEIYQAGSTPCNGVEGFNCYFPLQSYGFQPTNGVGYQPYRVVVLSFELLHAPATVCGPKKSTNLVKNKCVNFNFNGLTGTGVLTESNKKFLPFQQFGRDIADTTDAVRDPQTLEILDITPCSFGGVSVITPGTNTSNQVAVLYQDLNCTEVPVAIHADQLTPTWRVYSTGSNVFQTRAGCLIGAEHVNNSYECDIPIGAGICASYQTQTNSPRRARSVASQSIIAYTMSLGAENSVAYSNNSIAIPTNFTISVTTEILPVSMTKTSVDCTMYICGDSTECSNLLLQYGSFCTQLNRALTGIAVEQDKNTQEVFAQVKQIYKTPPIKDFGGFNFSQILPDPSKPSKRSFIEDLLFNKVTLADAGFIKQYGDCLGDIAARDLICAQKFNGLTVLPPLLTDEMIAQYTSALLAGTITSGWTFGAGAALQIPFAMQMAYRFNGCGVTQNVLYENQKLIANQFNSAIGKIQDSLSSTASALGKLQDVVNQNAQALNTLVKQLSSNFGAISSVLNDILSRLDKVEAEVQIDRLITGRLQSLQTYVTQQLIRAAEIRASANLAATKMSECVLGQSKRVDFCGKGCHLMSFPQSAPHGVVFLHVTYVPAQEKNFTTAPAICHDGKAHFPREGVFVSNGTHWFVTQRNFYEPQIITTDNTFVSGNCDVVIGIVNNTVYDPLQPELDSFKEELDKYFKNHTSPDVDLGDISGINASVVNIQKEIDRLNEVAKNLNESLIDLQELGKYEQYIKGGGSGGGQIYEGKLTAEGLRFGIVASRFNHALVDRLVEGAIDAIVRHGGREEDITLVRVPGSWEIPVAAGELARKEDIDAVIAIGVLIRGATPHFDYIASEVSKGLADLSLELRKPITFGVITADTLEQAIERAGTKHGNKGWEAALSAIEMANLFKSLR

SEQ ID NO: 4242 - protein, 1371 aa, Artificial Sequence
  SARS-CoV-2/Hong Kong/case42_VM20002493/2020__EPI_ISL_414527 spike protein (1-1211)(I909C_Y1047C) LumSynth construct
MFVFLVLLPLVSSQCVNLTTRTQLPPAYTNSFTRGVYYPDKVFRSSVLHSTQDLFLPFFSNVTWFHAIHVSGTNGTKRFDNPVLPFNDGVYFASTEKSNIIRGWIFGTTLDSKTQSLLIVNNATNVVIKVCEFQFCNDPFLGVYYHKNNKSWMESEFRVYSSANNCTFEYVSQPFLMDLEGKQGNFKNLREFVFKNIDGYFKIYSKHTPINLVRDLPQGFSALEPLVDLPIGINITRFQTLLALHRSYLTPGDSSSGWTAGAAAYYVGYLQPRTFLLKYNENGTITDAVDCALDPLSETKCTLKSFTVEKGIYQTSNFRVQPTESIVRFPNITNLCPFGEVFNATRFASVYAWNRKRISNCVADYSVLYNSASFSTFKCYGVSPTKLNDLCFTNVYADSFVIRGDEVRQIAPGQTGKIADYNYKLPDDFTGCVIAWNSNNLDSKVGGNYNYLYRLFRKSNLKPFERDISTEIYQAGSTPCNGVEGFNCYFPLQSYGFQPTNGVGYQPYRVVVLSFELLHAPATVCGPKKSTNLVKNKCVNFNFNGLTGTGVLTESNKKFLPFQQFGRDIADTTDAVRDPQTLEILDITPCSFGGVSVITPGTNTSNQVAVLYQDVNCTEVPVAIHADQLTPTWRVYSTGSNVFQTRAGCLIGAEHVNNSYECDIPIGAGICASYQTQTNSPRRARSVASQSIIAYTMSLGAENSVAYSNNSIAIPTNFAISVTTEILPVSMTKTSVDCTMYICGDSTECSNLLLQYGSFCTQLNRALTGIAVEQDKNTQEVFAQVKQIYKTPPIKDFGGFNFSQILPDPSKPSKRSFIEDLLFNKVTLADAGFIKQYGDCLGDIAARDLICAQKFNGLTVLPPLLTDEMIAQYTSALLAGTITSGWTFGAGAALQIPFAMQMAYRFNGCGVTQNVLYENQKLIANQFNSAIGKIQDSLSSTASALGKLQDVVNQNAQALNTLVKQLSSNFGAISSVLNDILSRLDKVEAEVQIDRLITGRLQSLQTYVTQQLIRAAEIRASANLAATKMSECVLGQSKRVDFCGKGCHLMSFPQSAPHGVVFLHVTYVPAQEKNFTTAPAICHDGKAHFPREGVFVSNGTHWFVTQRNFYEPQIITTDNTFVSGNCDVVIGIVNNTVYDPLQPELDSFKEELDKYFKNHTSPDVDLGDISGINASVVNIQKEIDRLNEVAKNLNESLIDLQELGKYEQYIKGGGSGGGQIYEGKLTAEGLRFGIVASRFNHALVDRLVEGAIDAIVRHGGREEDITLVRVPGSWEIPVAAGELARKEDIDAVIAIGVLIRGATPHFDYIASEVSKGLADLSLELRKPITFGVITADTLEQAIERAGTKHGNKGWEAALSAIEMANLFKSLR

SEQ ID NO: 4243 - protein, 1371 aa, Artificial Sequence
  SARS-CoV-2/USA/CruiseA-23/2020__EPI_ISL_414482 spike protein (1-1211)(I909C_Y1047C) LumSynth construct
MFVFLVLLPLVSSQCVNLTTRTQLPPAYTNSFTRGVYYPDKVFRSSVLHSTQDLFLPFFSNVTWFHAIHVSGTNGTKRFDNPVLPFNDGVYFASTEKSNIIRGWIFGTTLDSKTQSLLIVNNATNVVIKVCEFQFCNDPFLGVYYHKNNKSWMESEFRVYSSANNCTFEYVSQPFLMDLEVKQGNFKNLREFVFKNIDGYFKIYSKHTPINLVRDLPQGFSALEPLVDLPIGINITRFQTLLALHRSYLTPGDSSSGWTAGAAAYYVGYLQPRTFLLKYNENGTITDAVDCALDPLSETKCTLKSFTVEKGIYQTSNFRVQPTESIVRFPNITNLCPFGEVFNATRFASVYAWNRKRISNCVADYSVLYNSASFSTFKCYGVSPTKLNDLCFTNVYADSFVIRGDEVRQIAPGQTGKIADYNYKLPDDFTGCVIAWNSNNLDSKVGGNYNYLYRLFRKSNLKPFERDISTEIYQAGSTPCNGVEGFNCYFPLQSYGFQPTNGVGYQPYRVVVLSFELLHAPATVCGPKKSTNLVKNKCVNFNFNGLTGTGVLTESNKKFLPFQQFGRDIADTTDAVRDPQTLEILDITPCSFGGVSVITPGTNTSNQVAVLYQDVNCTEVPVAIHADQLTPTWRVYSTGSNVFQTRAGCLIGAEHVNNSYECDIPIGAGICASYQTQTNSPRRARSVASQSIIAYTMSLGAENSVAYSNNSIAIPTNFTISVTTEILPVSMTKTSVDCTMYICGDSTECSNLLLQYGSFCTQLNRALTGIAVEQDKNTQEVFAQVKQIYKTPPIKDFGGFNFSQILPDPSKPSKRSFIEDLLFNKVTLADAGFIKQYGDCLGDIAARDLICAQKFNGLTVLPPLLTDEMIAQYTSALLAGTITSGWTFGAGAALQIPFAMQMAYRFNGCGVTQNVLYENQKLIANQFNSAIGKIQDSLSSTASALGKLQDVVNQNAQALNTLVKQLSSNFGAISSVLNDILSRLDKVEAEVQIDRLITGRLQSLQTYVTQQLIRAAEIRASANLAATKMSECVLGQSKRVDFCGKGCHLMSFPQSAPHGVVFLHVTYVPAQEKNFTTAPAICHDGKAHFPREGVFVSNGTHWFVTQRNFYEPQIITTDNTFVSGNCDVVIGIVNNTVYDPLQPELDSFKEELDKYFKNHTSPDVDLGDISGINASVVNIQKEIDRLNEVAKNLNESLIDLQELGKYEQYIKGGGSGGGQIYEGKLTAEGLRFGIVASRFNHALVDRLVEGAIDAIVRHGGREEDITLVRVPGSWEIPVAAGELARKEDIDAVIAIGVLIRGATPHFDYIASEVSKGLADLSLELRKPITFGVITADTLEQAIERAGTKHGNKGWEAALSAIEMANLFKSLR

SEQ ID NO: 4244 - protein, 1371 aa, Artificial Sequence
  SARS-CoV-2/Hong Kong/case85_VM20002868/2020__EPI_ISL_414519 spike protein (1-1211)(I909C_Y1047C) LumSynth construct
MFVFLVLVPLVSSQCVNLTTRTQLPPAYTNSFTRGVYYPDKVFRSSVLHSTQDLFLPFFSNVTWFHAIHVSGTNGTKRFDNPVLPFNDGVYFASTEKSNIIRGWIFGTTLDSKTQSLLIVNNATNVVIKVCEFQFCNDPFLGVYYHKNNKSWMESEFRVYSSANNCTFEYVSQPFLMDLEGKQGNFKNLREFVFKNIDGYFKIYSKHTPINLVRDLPQGFSALEPLVDLPIGINITRFQTLLALHRSYLTPGDSSSGWTAGAAAYYVGYLQPRTFLLKYNENGTITDAVDCALDPLSETKCTLKSFTVEKGIYQTSNFRVQPTESIVRFPNITNLCPFGEVFNATRFASVYAWNRKRISNCVADYSVLYNSASFSTFKCYGVSPTKLNDLCFTNVYADSFVIRGDEVRQIAPGQTGKIADYNYKLPDDFTGCVIAWNSNNLDSKVGGNYNYLYRLFRKSNLKPFERDISTEIYQAGSTPCNGVEGFNCYFPLQSYGFQPTNGVGYQPYRVVVLSFELLHAPATVCGPKKSTNLVKNKCVNFNFNGLTGTGVLTESNKKFLPFQQFGRDIADTTDAVRDPQTLEILDITPCSFGGVSVITPGTNTSNQVAVLYQDVNCTEVPVAIHADQLTPTWRVYSTGSNVFQTRAGCLIGAEHVNNSYECDIPIGAGICASYQTQTNSPRRARSVASQSIIAYTMSLGAENSVAYSNNSIAIPTNFTISVTTEILPVSMTKTSVDCTMYICGDSTECSNLLLQYGSFCTQLNRALTGIAVEQDKNTQEVFAQVKQIYKTPPIKDFGGFNFSQILPDPSKPSKRSFIEDLLFNKVTLADAGFIKQYGDCLGDIAARDLICAQKFNGLTVLPPLLTDEMIAQYTSALLAGTITSGWTFGAGAALQIPFAMQMAYRFNGCGVTQNVLYENQKLIANQFNSAIGKIQDSLSSTASALGKLQDVVNQNAQALNTLVKQLSSNFGAISSVLNDILSRLDKVEAEVQIDRLITGRLQSLQTYVTQQLIRAAEIRASANLAATKMSECVLGQSKRVDFCGKGCHLMSFPQSAPHGVVFLHVTYVPAQEKNFTTAPAICHDGKAHFPREGVFVSNGTHWFVTQRNFYEPQIITTDNTFVSGNCDVVIGIVNNTVYDPLQPELDSFKEELDKYFKNHTSPDVDLGDISGINASVVNIQKEIDRLNEVAKNLNESLIDLQELGKYEQYIKGGGSGGGQIYEGKLTAEGLRFGIVASRFNHALVDRLVEGAIDAIVRHGGREEDITLVRVPGSWEIPVAAGELARKEDIDAVIAIGVLIRGATPHFDYIASEVSKGLADLSLELRKPITFGVITADTLEQAIERAGTKHGNKGWEAALSAIEMANLFKSLR

SEQ ID NO: 4245 - protein, 1371 aa, Artificial Sequence; identical to SEQ ID NO: 4235
  SARS-CoV-2/England/200990660/2020__EPI_ISL_414523 spike protein (1-1211)(I909C_Y1047C) LumSynth construct

SEQ ID NO: 4246 - protein, 1371 aa, Artificial Sequence
  SARS-CoV-2/Australia/NSW09/2020__EPI_ISL_413595 spike protein (1-1211)(I909C_Y1047C) LumSynth construct
MFVFLVLLPLVSSQCVNLTTRTQLPPAYTNSFTRGVYYPDKVFRSSVLHSTQDLFLPFFSNVTWFHAIHVSGTNGTKRFDNPVLPFNDGVYFASTEKSNIIRGWIFGTTLDSKTQSLLIVNNATNVVIKVCEFQFCNDPFLGVYYHKNNKSWMESEFRVYSSANNCTFEYVSQPFLMDLEGKQGNFKNLREFVFKNIDGYFKIYSKHTPINLVRDLPQGFSALEPLVDLPIGINITRFQTLLALHRSYLTPGDSSSGWTAGAAAYYVGYLQPRTFLLKYNENGTITDAVDCALDPLSETKCTLKSFTVEKGIYQTSNFRVQPTESIVRFPNITNLCPFGEVFNATRFASVYAWNRKRISNCVADYSVLYNSASFSTFKCYGVSPTKLNDLCFTNVYADSFVIRGDEVRQIAPGQTGKIADYNYKLPDDFTGCVIAWNSNNLDSKVGGNYNYLYRLFRKSNLKPFERDISTEIYQAGSTPCNGVEGFNCYFPLQSYGFQPTNGVGYQPYRVVVLSFELLHAPATVCGPKKSTNLVKNKCVNFNFNGLTGTGVLTESNKKFLPFQQFGRDIADTTDAVRDPQTLEILDITPCSFGGVSVITPGTNTSNQVAVLYQDVNCTEVPVAIHADQLTPTWRVYSTGSNVFQTRAGCLIGAEHVNNSYECDIPIGAGICASYQTQTNSPRRARSVASQSIIAYTMSLGAENSVAYSNNSIAIPTNFTISVTTEILPVSMTKTSVDCTMYICGDSTECSNLLLQYGSFCTQLNRALTGIAVEQDKNTQEVFAQVKQIYKTPPIKDFGGFNFSQILPDPSKPSKRSFIEDLLFNKVTLADAGFIKQYGDCLGDIAARDLICAQKFNGLTVLPPLLTDEMIAQYTSALLAGTITSGWTFGAGAALQIPFAMQMAYRFNGCGVTQNVLYENQKLIANQFNSAIGKIQDSLSFTASALGKLQDVVNQNAQALNTLVKQLSSNFGAISSVLNDILSRLDKVEAEVQIDRLITGRLQSLQTYVTQQLIRAAEIRASANLAATKMSECVLGQSKRVDFCGKGCHLMSFPQSAPHGVVFLHVTYVPAQEKNFTTAPAICHDGKAHFPREGVFVSNGTHWFVTQRNFYEPQIITTDNTFVSGNCDVVIGIVNNTVYDPLQPELDSFKEELDKYFKNHTSPDVDLGDISGINASVVNIQKEIDRLNEVAKNLNESLIDLQELGKYEQYIKGGGSGGGQIYEGKLTAEGLRFGIVASRFNHALVDRLVEGAIDAIVRHGGREEDITLVRVPGSWEIPVAAGELARKEDIDAVIAIGVLIRGATPHFDYIASEVSKGLADLSLELRKPITFGVITADTLEQAIERAGTKHGNKGWEAALSAIEMANLFKSLR

SEQ ID NO: 4247 - protein, 1371 aa, Artificial Sequence; identical to SEQ ID NO: 4227
  SARS-CoV-2/Australia/NSW10/2020__EPI_ISL_413596 spike protein (1-1211)(I909C_Y1047C) LumSynth construct

SEQ ID NO: 4248 - protein, 1371 aa, Artificial Sequence
  SARS-CoV-2/Switzerland/1000477797/2020__EPI_ISL_413023 spike protein (1-1211)(I909C_Y1047C) LumSynth construct
MFVFLVLLPLVSSQCVNLTTRTQLPPAYTNSFTRGVYYPDKVFRSSVLHSTQDLFLPFFSNVTWFHAIHVSGTNGTKRFDNPVLPFNDGVYFASTEKSNIIRGWIFGTTLDSKTQSLLIVNNATNVVIKVCEFQFCNDPFLGVYYHKNNKSWMESEFRVYSSANNCTFEYVSQPFLMDLEGKQGNFKNLREFVFKNIDGYFNIYSKHTPINLVRDLPQGFSALEPLVDLPIGINITRFQTLLALHRSYLTPGDSSSGWTAGAAAYYVGYLQPRTFLLKYNENGTITDAVDCALDPLSETKCTLKSFTVEKGIYQTSNFRVQPTESIVRFPNITNLCPFGEVFNATRFASVYAWNRKRISNCVADYSVLYNSASFSTFKCYGVSPTKLNDLCFTNVYADSFVIRGDEVRQIAPGQTGKIADYNYKLPDDFTGCVIAWNSNNLDSKVGGNYNYLYRLFRKSNLKPFERDISTEIYQAGSTPCNGVEGFNCYFPLQSYGFQPTNGVGYQPYRVVVLSFELLHAPATVCGPKKSTNLVKNKCVNFNFNGLTGTGVLTESNKKFLPFQQFGRDIADTTDAVRDPQTLEILDITPCSFGGVSVITPGTNTSNQVAVLYQGVNCTEVPVAIHADQLTPTWRVYSTGSNVFQTRAGCLIGAEHVNNSYECDIPIGAGICASYQTQTNSPRRARSVASQSIIAYTMSLGAENSVAYSNNSIAIPTNFTISVTTEILPVSMTKTSVDCTMYICGDSTECSNLLLQYGSFCTQLNRALTGIAVEQDKNTQEVFAQVKQIYKTPPIKDFGGFNFSQILPDPSKPSKRSFIEDLLFNKVTLADAGFIKQYGDCLGDIAARDLICAQKFNGLTVLPPLLTDEMIAQYTSALLAGTITSGWTFGAGAALQIPFAMQMAYRFNGCGVTQNVLYENQKLIANQFNSAIGKIQDSLSSTASALGKLQDVVNQNAQALNTLVKQLSSNFGAISSVLNDILSRLDKVEAEVQIDRLITGRLQSLQTYVTQQLIRAAEIRASANLAATKMSECVLGQSKRVDFCGKGCHLMSFPQSAPHGVVFLHVTYVPAQEKNFTTAPAICHDGKAHFPREGVFVSNGTHWFVTQRNFYEPQIITTDNTFVSGNCDVVIGIVNNTVYDPLQPELDSFKEELDKYFKNHTSPDVDLGDISGINASVVNIQKEIDRLNEVAKNLNESLIDLQELGKYEQYIKGGGSGGGQIYEGKLTAEGLRFGIVASRFNHALVDRLVEGAIDAIVRHGGREEDITLVRVPGSWEIPVAAGELARKEDIDAVIAIGVLIRGATPHFDYIASEVSKGLADLSLELRKPITFGVITADTLEQAIERAGTKHGNKGWEAALSAIEMANLFKSLR

SEQ ID NO: 4249 - protein, 1371 aa, Artificial Sequence
  SARS-CoV-2/Belgium/BA-02291/2020__EPI_ISL_415159 spike protein (1-1211)(I909C_Y1047C) LumSynth construct
MFVFLVLLPLVSSQCVNLTTRTQLPPAYTNSFTRGVYYPDKVFRSSVLHSTQDLFLPFFSNVTWFHAIHVSGTNGTKRFDNPVLPFNDGVYFASTEKSNIIRGWIFGTTLDSKTQSLLIVNNATNVVIKVCEFQFCNDPFLGVYYHKNNKSWMESEFRVYSSANNCTFEYVSQPFLMDLEGKQGNFKNLREFVFKNIDGYFKIYSKHTPINLVRDLPQGFSALEPLVDLPIGINITRFQTLLALHRSYLTPGDSSSGWTAGAAAYYVGYLQPRTFLLKYNENGTITDAVDCALDPLSETKCTLKSFTVEKGIYQTSNFRVQPTESIVRFPNITNLCPFGEVFNATRFASVYAWNRKRISNCVADYSVLYNSASFSTFKCYGVSPTKLNDLCFTNVYADSFVIRGDEVRQIAPGQTGKIADYNYKLPDDFTGCVIAWNSNNLDSKVGGNYNYLYRLFRRSNLKPFERDISTEIYQAGSTPCNGVEGFNCYFPLQSYGFQPTNGVGYQPYRVVVLSFELLPAPATVCGPKKSTNLVKNKCVNFNFNGLTGTGVLTESNKKFLPFQQFGRDIADTTDAVRDPQTLEILDITPCSFGGVSVITPGTNTSNQVAVLYQGVNCTEVPVAIHADQLTPTWRVYSTGSNVFQTRAGCLIGAEHVNNSYECDIPIGAGICASYQTQTNSPRRARSVASQSIIAYTMSLGAENSVAYSNNSIAIPTNFTISVTTEILPVSMTKTSVDCTMYICGDSTECSNLLLQYGSFCTQLNRALTGIAVEQDKNTQEVFAQVKQIYKTPPIKDFGGFNFSQILPDPSKPSKRSFIEDLLFNKVTLADAGFIKQYGDCLGDIAARDLICAQKFNGLTVLPPLLTDEMIAQYTSALLAGTITSGWTFGAGAALQIPFAMQMAYRFNGCGVTQNVLYENQKLIANQFNSAIGKIQDSLSSAAPALGKLQDVVNQNAQALNTLVKQLSSNFGAISSVLNDILSRLDKVEAEVQIDRLITGRLQSLQTYVTQQLIRAAEIRASANLAATKMSECVLGQSKRVDFCGKGCHLMSFPQSAPHGVVFLHVTYVPAQEKNFTTAPAICHDGKAHFPREGVFVSNGTHWFVTQRNFYEPQIITTDNTFVSGNCDVVIGIVNNTVYDPLQPELDSFKEELDKYFKNHTSPDVDLGDISGINASVVNIQKEIDRLNEVAKNLNESLIDLQELGKYEQYIKGGGSGGGQIYEGKLTAEGLRFGIVASRFNHALVDRLVEGAIDAIVRHGGREEDITLVRVPGSWEIPVAAGELARKEDIDAVIAIGVLIRGATPHFDYIASEVSKGLADLSLELRKPITFGVITADTLEQAIERAGTKHGNKGWEAALSAIEMANLFKSLR

SEQ ID NO: 4250 - protein, 1371 aa, Artificial Sequence
  SARS-CoV-2/USA/WA8-UW5/2020__EPI_ISL_413486 spike protein (1-1211)(I909C_Y1047C) LumSynth construct
MFVFLVLLPLVSSQCVNLTTRTQLPPAYTNSFTRGVYYPDKVFRSSVLHSTQDLFLPFFSNVTWFHAIHVSGTNGTKRFDNPVLPFNDGVYFASTEKSNIIRGWIFGTTLDSKTQSLLIVNNATNVVIKVCEFQFCNDPFLGVYYHKNNKSWMESEFRVYSSANNCTFEYVSQPFLMDLEGKQGNFKNLREFVFKNIDGYFKIYSKHTPINLVRDLPQGFSALEPLVDLPIGINITRFQTLLALHRSYLTPGDSSSGWTAGAAAYYVGYLQPRTFLLKYNENGTITDAVDCALDPLSETKCTLKSFTVEKGIYQTSNFRVQPTESIVRFPNITNLCPFGEVFNATRFASVYAWNRKRISNCVADYSVLYNSASFSTFKCYGVSPTKLNDLCFTNVYADSFVIRGDEVRQIAPGQTGKIADYNYKLPDDFTGCVIAWNSNNLDSKVGGNYNYLYRLFRKSNLKPFERDISTEIYQAGSTPCNGVEGFNCYFPLQSYGFQPTNGVGYQPYRVVVLSFELLHAPATVCGPKKSTNLVKNKCVNFNFNGLTGTGVLTESNKKFLPFQQFGRDIADTTDAVRDPQTLEILDITPCSFGGVSVITPGTNTSNQVAVLYQDVNCTEVPVAIHADQLTPTWRVYSTGSNVFQTRAGCLIGAEYVNNSYECDIPIGAGICASYQTQTNSPRRARSVASQSIIAYTMSLGAENSVAYSNNSIAIPTNFTISVTTEILPVSMTKTSVDCTMYICGDSTECSNLLLQYGSFCTQLNRALTGIAVEQDKNTQEVFAQVKQIYKTPPIKDFGGFNFSQILPDPSKPSKRSFIEDLLFNKVTLADAGFIKQYGDCLGDIAARDLICAQKFNGLTVLPPLLTDEMIAQYTSALLAGTITSGWTFGAGAALQIPFAMQMAYRFNGCGVTQNVLYENQKLIANQFNSAIGKIQDSLSSTASALGKLQDVVNQNAQALNTLVKQLSSNFGAISSVLNDILSRLDKVEAEVQIDRLITGRLQSLQTYVTQQLIRAAEIRASANLAATKMSECVLGQSKRVDFCGKGCHLMSFPQSAPHGVVFLHVTYVPAQEKNFTTAPAICHDGKAHFPREGVFVSNGTHWFVTQRNFYEPQIITTDNTFVSGNCDVVIGIVNNTVYDPLQPELDSFKEELDKYFKNHTSPDVDLGDISGINASVVNIQKEIDRLNEVAKNLNESLIDLQELGKYEQYIKGGGSGGGQIYEGKLTAEGLRFGIVASRFNHALVDRLVEGAIDAIVRHGGREEDITLVRVPGSWEIPVAAGELARKEDIDAVIAIGVLIRGATPHFDYIASEVSKGLADLSLELRKPITFGVITADTLEQAIERAGTKHGNKGWEAALSAIEMANLFKSLR

SEQ ID NO: 4251 - protein, 1371 aa, Artificial Sequence
  SARS-CoV-2/England/20102000506/2020__EPI_ISL_415147 spike protein (1-1211)(I909C_Y1047C) LumSynth construct
MFVFLVLLPLVSSQCVNLTTRTQLPPAYTNSFTRGVYYPDKVFRSSVLHSTQDLFLPFFSNVTWFHAIHVSGTNGTKRFDNPVLPFNDGVYFASTEKSNIIRGWIFGTTLDSKTQSLLIVNNATNVVIKVCEFQFCNDPFLGVYYHKNNKSWMESEFRVYSSANNCTFEYVSQPFLMDLEGKQGNFKNLREFVFKNIDGYFKIYSKHTPINLVRDLPQGFSALEPLVDLPIGINITRFQTLLALHRSYLTPGDSSSGWTAGAAAYYVGYLQPRTFLLKYNENGTITDAVDCALDPLSETKCTLKSFTVEKGIYQTSNFRVQPTESIVRFPNITNLCPFGEVFNATRFASVYAWNRKRISNCVADYSVLYNSASFSTFKCYGVSPTKLNDLCFTNVYADSFVIRGDEVRQIAPGQTGKIADYNYKLPDDFTGCVIAWNSNNLDSKVGGNYNYLYRLFRKSNLKPFERDISTEIYQAGSTPCNGVEGFNCYFPLQSYGFQPTNGVGYQPYRVVVLSFELLHAPATVCGPKKSTNLVKNKCVNFNFNGLTGTGVLTESNKKFLPFQQFGRDIADTTDAVRDPQTLEILDITPCSFGGVSVITPGTNTSNQVAVLYQGVNCTEVPVAIHADQLTPTWRVYSTGSNVFQTRAGCLIGAEHVNNSYECDIPIGAGICASYQTQTNSPRRARSVASQSIIAYTMSLGAENSVAYSNNSIAIPTNFTISVTTEILPVSMTKTSVDCTMYICGDSTECSNLLLQYGSFCTQLNRALTGIAVEQDKNTQEVFAQVKQIYKTPPIKDFGGFNFSQILPDPSKPSKRSFIEDLLFNKVTLADAGFIKQYGYCLGDIAARDLICAQKFNGLTVLPPLLTDEMIAQYTSALLAGTITSGWTFGAGAALQIPFAMQMAYRFNGCGVTQNVLYENQKLIANQFNSAIGKIQDSLSSTASALGKLQDVVNQNAQALNTLVKQLSSNFGAISSVLNDILSRLDKVEAEVQIDRLITGRLQSLQTYVTQQLIRAAEIRASANLAATKMSECVLGQSKRVDFCGKGCHLMSFPQSAPHGVVFLHVTYVPAQEKNFTTAPAICHDGKAHFPREGVFVSNGTHWFVTQRNFYEPQIITTDNTFVSGNCDVVIGIVNNTVYDPLQPELDSFKEELDKYFKNHTSPDVDLGDISGINASVVNIQKEIDRLNEVAKNLNESLIDLQELGKYEQYIKGGGSGGGQIYEGKLTAEGLRFGIVASRFNHALVDRLVEGAIDAIVRHGGREEDITLVRVPGSWEIPVAAGELARKEDIDAVIAIGVLIRGATPHFDYIASEVSKGLADLSLELRKPITFGVITADTLEQAIERAGTKHGNKGWEAALSAIEMANLFKSLR

SEQ ID NO: 4252 - protein, 1371 aa, Artificial Sequence
  SARS-CoV-2/Belgium/VAG-03013/2020__EPI_ISL_415155 spike protein (1-1211)(I909C_Y1047C) LumSynth construct
MFVFLVLLPLVSSQCVNLTTRTQLPPAYTNSFTRGVYYPDKVFRSSVLHSTQDLFLPFFSNVTWFHAIHVSGTNGTKRFDNPVLPFNDGVYFASTEKSNIIRGWIFGTTLDSKTQSLLIVNNATNVVIKVCEFQFCNDPFLGVYYHKNNKSWMESEFRVYSSANNCTFEYVSQPFLMDLEGKQGNFKNLREFVFKNIDGYFKIYSKHTPINLVRDLPQGFSALEPLVDLPIGINITRFQTLLALHRSYLTPGDSSSGWTAGAAAYYVGYLQPRTFLLKYNENGTITDAVDCALDPLSETKCTLKSFTVEKGIYQTSNFRVQPTESIVRFPNITNLCPFGEVFNATRFASVYAWNRKRISNCVADYSVLYNSASFSTFKCYGVSPTKLNDLCFTNVYADSFVIRGDEVRQIAPGQTGKIADYNYKLPDDFTGCVIAWNSNNLDSKVGGNYNYLYRLFRKSNLKPFERDISTEIYQAGSTPCNGVEGFNCYFPLQSYGFQPTNGVGYQPYRVVVLSFELLHAPATVCGPKKSTNLVKNKCVNFNFNGLTGTGVLTESNKKFLPFQQFGRDIADTTDAVRDPQTLEILDITPCSFGGVSVITPGTNTSNQVAVLYQGVNCTEVPVAIHADQLTPTWRVYSTGSNVFQTRAGCLIGAEHVNNSYECDIPIGAGICASYQTQTNSPRRARSVASQSIIAYTMSLGAENSVAYSNNSIAIPTNFTISVTTEILPVSMTKTSVDCTMYICGDSTECSNLLLQYGSFCTQLNRALTGIAVEQDKNTQEVFAQVKQIYKTPPIKDFGGFNFSQILPDPSKPSKRSFIEDLLFNKVTLADAGFIKQYGDCLGDIAARDLICAQKFNGLTVLPPLLTDEMIAQYTSALLAGTITSGWTFGAGAALQIPFAMQMAYRFNGCGVTQNVLYENQKLIANQFNSAIGKIQDSLSSTATALGKLQDVVNQNAQALNTLVKQLSSNFGAISSVLNDILSRLDKVEAEVQIDRLITGRLQSLQTYVTQQLIRAAEIRASANLAATKMSECVLGQSKRVDFCGKGCHLMSFPQSAPHGVVFLHVTYVPAQEKNFTTAPAICHDGKAHFPREGVFVSNGTHWFVTQRNFYEPQIITTDNTFVSGNCDVVIGIVNNTVYDPLQPELDSFKEELDKYFKNHTSPDVDLGDISGINASVVNIQKEIDRLNEVAKNLNESLIDLQELGKYEQYIKGGGSGGGQIYEGKLTAEGLRFGIVASRFNHALVDRLVEGAIDAIVRHGGREEDITLVRVPGSWEIPVAAGELARKEDIDAVIAIGVLIRGATPHFDYIASEVSKGLADLSLELRKPITFGVITADTLEQAIERAGTKHGNKGWEAALSAIEMANLFKSLR

SEQ ID NO: 4253 - protein, 1371 aa, Artificial Sequence
  SARS-CoV-2/Belgium/BC-03016/2020__EPI_ISL_415157 spike protein (1-1211)(I909C_Y1047C) LumSynth construct
MFVFLVLLPLVSSQCVNLTTRTQLPPAYTNSFTRGVYYPDKVFRSSVLHSTQDLFLPFFSNVTWFHAIHVSGTNGTKRFDNPVLPFNDGVYFASTEKSNIIRGWIFGTTLDSKTQSLLIVNNATNVVIKVCEFQFCNDPFLGVYYHKNNKSWMESEFRVYSSANNCTFEYVSQPFLMDLEGKQGNFKNLREFVFKNIDGYFKIYSKHTPINLVRDLPQGFSALEPLVDLPIGINITRFQTLLALHRSYLTPGDSSSGWTAGAAAYYVGYLQPRTFLLKYNENGTITDAVDCALDPLSETKCTLKSFTVEKGIYQTSNFRVQPTESIVRFPNITNLCPFGEVFNATRFASVYAWNRKRISNCVADYSVLYNSASFSTFKCYGVSPTKLNDLCFTNVYADSFVIRGDEVRQIAPGQTGKIADYNYKLPDDFTGCVIAWNSNNLDSKVGGNYNYLYRLFRKSNLKPFERDISTEIYQAGSTPCNGVEGFNCYFPLQSYGFQPTNGVGYQPYRVVVLSFELLHAPATVCGPKKSTNLVKNKCVNFNFNGLTGTGVLTESNKKFLPFQQFGRDIADTTDAVRDPQTLEILDITPCSFGGVSVITPGTNTSNQVAVLYQGVNCTEVPVAIHADQLTPTWRVYSTGSNVFQTRAGCLIGAEHVNNSYECDIPIGAGICASYQTQTNSPRRARSVASQSIIAYTMSLGAENSVAYSNNSIAIPTNFTISVTTEILPVSMTKTSVDCTMYICGDSTECSNLLLQYGSFCTQLNRALTGIAVEQDKNTQEVFAQVKQIYKTPPIKDFGGFNFSQILPDPSKPSKRSFIEDLLFNKVTLADAGFIKQYGDCLGDIAARDLICAQKFNGLTVLPPLLTDEMIAQYTSALLAGTITSGWTFGAGAALQIPFAMQMAYRFNGCGVTQNVLYENQKLIANQFNSAIGKIQDSLSSTAPALGKLQDVVNQNAQALNTLVKQLSSNFGAISSVLNDILSRLDKVEAEVQIDRLITGRLQSLQTYVTQQLIRAAEIRASANLAATKMSECVLGQSKRVDFCGKGCHLMSFPQSAPHGVVFLHVTYVPAQEKNFTTAPAICHDGKAHFPREGVFVSNGTHWFVTQRNFYEPQIITTDNTFVSGNCDVVIGIVNNTVYDPLQPELDSFKEELDKYFKNHTSPDVDLGDISGINASVVNIQKEIDRLNEVAKNLNESLIDLQELGKYEQYIKGGGSGGGQIYEGKLTAEGLRFGIVASRFNHALVDRLVEGAIDAIVRHGGREEDITLVRVPGSWEIPVAAGELARKEDIDAVIAIGVLIRGATPHFDYIASEVSKGLADLSLELRKPITFGVITADTLEQAIERAGTKHGNKGWEAALSAIEMANLFKSLR

SEQ ID NO: 4254 - protein, 1371 aa, Artificial Sequence
  SARS-CoV-2/Germany/BavPat3/2020__EPI_ISL_414521 spike protein (1-1211)(I909C_Y1047C) LumSynth construct
MFVFLVLLPLVSSQCVNLTTRTQLPPAYTNSFTRGVYYPDKVFRSSVLHSTQDLFLPFFSNVTWFHAIHVSGTNGTKRFDNPVLPFNDGVYFASTEKSNIIRGWIFGTTLDSKTQSLLIVNNATNVVIKVCEFQFCNDPFLGVYYHKNNKSWMESEFRVYSSANNCTFEYVSQPFLMDLEGKQGNFKNLREFVFKNIDGYFKIYSKHTPINLVRDLPQGFSALEPLVDLPIGINITRFQTLLALHRSYLTPGDSSSGWTAGAAAYYVGYLQPRTFLLKYNENGTITDAVDCALDPLSETKCTLKSFTVEKGIYQTSNFRVQPTESIVRFPNITNLCPFGEVFNATRFASVYAWNRKRISNCVADYSVLYNSASFSTFKCYGVSPTKLNDLCFTNVYADSFVIRGDEVRQIAPGQTGKIADYNYKLPDDFTGCVIAWNSNNLDSKVGGNYNYLYRLFRKSNLKPFERDISTEIYQAGSTPCNGVEGFNCYFPLQSYGFQPTNGVGYQPYRVVVLSFELLHAPATVCGPKKSTNLVKNKCVNFNFNGLTGTGVLTESNKKFLPFQQFGRDIADTTDAVRDPQTLEILDITPCSFGGVSVITPGTNTSNQVAVLYQDVNCTEVPVAIHADQLTPTWRVYSTGSNVFQTRAGCLIGAEHVNNSYECDIPIGAGICASYQTQTNSPRRARSVASQSIIAYTMSLGAENSVAYSNNSIAIPTNFTISVTTEILPVSMTKTSVDCTMYICGDSTECSNLLLQYGSFCTQLNRALTGIAVEQDKNTQQVFAQVKQIYKTPPIKDFGGFNFSQILPDPSKPSKRSFIEDLLFNKVTLADAGFIKQYGDCLGDIAARDLICAQKFNGLTVLPPLLTDEMIAQYTSALLAGTITSGWTFGAGAALQIPFAMQMAYRFNGCGVTQNVLYENQKLIANQFNSAIGKIQDSLSSTASALGKLQDVVNQNAQALNTLVKQLSSNFGAISSVLNDILSRLDKVEAEVQIDRLITGRLQSLQTYVTQQLIRAAEIRASANLAATKMSECVLGQSKRVDFCGKGCHLMSFPQSAPHGVVFLHVTYVPAQEKNFTTAPAICHDGKAHFPREGVFVSNGTHWFVTQRNFYEPQIITTDNTFVSGNCDVVIGIVNNTVYDPLQPELDSFKEELDKYFKNHTSPDVDLGDISGINASVVNIQKEIDRLNEVAKNLNESLIDLQELGKYEQYIKGGGSGGGQIYEGKLTAEGLRFGIVASRFNHALVDRLVEGAIDAIVRHGGREEDITLVRVPGSWEIPVAAGELARKEDIDAVIAIGVLIRGATPHFDYIASEVSKGLADLSLELRKPITFGVITADTLEQAIERAGTKHGNKGWEAALSAIEMANLFKSLR

SEQ ID NO: 4255 - protein, 1371 aa, Artificial Sequence
  SARS-CoV-2/France/HF1805/2020__EPI_ISL_414628 spike protein (1-1211)(I909C_Y1047C) LumSynth construct
MFVFLVLLPLVSSQCVNLTTRTQLPPAYTNSFTRGVYYPDKVFRSSVLHSTQDLFLPFFSNVTWFHAIHVSGTNGTKRFDNPVLPFNDGVYFASTEKSNIIRGWIFGTTLDSKTQSLLIVNNATNVVIKVCEFQFCNDPFLGVYYHKNNKSWMESEFRVYSSANNCTFEYVSQPFLMDLEGKQGNFKNLREFVFKNIDGYFKIYSKHTPINLVRDLPQGFSALEPLVDLPIGINITRFQTLLALHRSYLTPGDSSSGWTAGAAAYYVGYLQPRTFLLKYNENGTITDAVDCALDPLSETKCTLKSFTVEKGIYQTSNFRVQPTESIVRFPNITNLCPFGEVFNATRFASVYAWNRKRISNCVADYSVLYNSASFSTFKCYGVSPTKLNDLCFTNVYADSFVIRGDEVRQIAPGQTGKIADYNYKLPDDFTGCVIAWNSNNLDSKVGGNYNYLYRLFRKSNLKPFERDISTEIYQAGSTPCNGVEGFNCYFPLQSYGFQPTNGVGYQPYRVVVLSFELLHAPATVCGPKKSTNLVKNKCVNFNFNGLTGTGVLTESNKKFLPFQQFGRDIADTTDAVRDPQTLEILDITPCSFGGVSVITPGTNTSNQVAVLYQGVNCTEVPVAIHADQLTPTWRVYSTGSNVFQTRAGCLIGAEHVNNSYECDIPIGAGICASYQTQTNSPRRARSVASQSIIAYTMSLGAENSVAYSNNSIAIPTNFTISVTTEILPVSMTKTSVDCTMYICGDSTECSNLLLQYGSFCTQLNRALTGIAVEQDKNTQEVFAQVKQIYKTPPIKDFGGFNFSQILPDPSKPSKRSFIEDLLFNKVTLADAGFIKQYGDCLGDIAARDLICAQKFNGLTVLPPLLTDEMIAQYTSALLAGTITSGWTFGAGAALQIPFAMQMAYRFNGCGVTQNVLYENQKLIANQFNSAIGKIQDSLSSTASALGKLQDVVNQNAQALNTLVKQLSSNFGAISSVLNDILSRLDKVEAEVQIDRLITGRLQSLQTYVTQQLIRAAEIRASANLAATKMSECVLGQSKRVDFCGKGCHLMSFPQSAPHGVVFLHVTYVPAQEKNFTTAPAICHDGKAHFPREGVFVSNGTHWFVTQRNFYEPQIITTDNTFVSGNCDVVIGVVNNTVYDPLQPELDSFKEELDKYFKNHTSPDVDLGDISGINASVVNIQKEIDRLNEVAKNLNESLIDLQELGKYEQYIKGGGSGGGQIYEGKLTAEGLRFGIVASRFNHALVDRLVEGAIDAIVRHGGREEDITLVRVPGSWEIPVAAGELARKEDIDAVIAIGVLIRGATPHFDYIASEVSKGLADLSLELRKPITFGVITADTLEQAIERAGTKHGNKGWEAALSAIEMANLFKSLR

SEQ ID NO: 4256 - protein, 1371 aa, Artificial Sequence
  SARS-CoV-2/Netherlands/ZuidHolland_9/2020__EPI_ISL_414445 spike protein (1-1211)(I909C_Y1047C) LumSynth construct
MFVFLVLLPLVSSQCVNLTTRTQLPPAYTNSFTRGVYYPDKVFRSSVLHSTQDLFLPFFSNVTWFHAIHVSGTNGTKRFDNPVLPFNDGVYFASTEKSNIIRGWIFGTTLDSKTQSLLIVNNATNVVIKVCEFQFCNDPFLGVYYHKNNKSWMESEFRVYSSANNCTFEYVSQPFLMDLEGKQGNFKNLREFVFKNIDGYFKIYSKHTPINLVRDLPQGFSALEPLVDLPIGINITRFQTLLALHRSYLTPGDSSSGWTAGAAAYYVGYLQPRTFLLKYNENGTITDAVDCALDPLSETKCTLKSFTVEKGIYQTSNFRVQPTESIVRFPNITNLCPFGEVFNATRFASVYAWNRKRISNCVADYSVLYNSASFSTFKCYGVSPTKLNDLCFTNVYADSFVIRGDEVRQIAPGQTGKIADYNYKLPDDFTGCVIAWNSNNLDSKVGGNYNYLYRLFRKSNLKPFERDISTEIYQAGSTPCNGVEGFNCYFPLQSYGFQPTNGVGYQPYRVVVLSFELLHAPATVCGPKKSTNLVKNKCVNFNFNGLTGTGVLTESNKKFLPFQQFGRDIADTTDAVRDPQTLEILDITPCSFGGVSVITPGTNTSNQVAVLYQGVNCTEVPVAIHADQLTPTWRVYSTGSNVFQTRAGCLIGAEHVNNSYECDIPIGAGICASYQTQTNSPRRARSVASQSIIAYTMSLGAENSVAYSNNSIAIPTNFTISVTTEILPVSMTKTSVDCTMYICGDSTECSNLLLQYGSFCTQLNRALTGIAVEQDKNTQEVFAQVKQIYKTPPIKDFGGFNFSQILPDPSKPSKRSFIEDLLFNKVTLADAGFIKQYGDCLGDIAARDLICVQKFNGLTVLPPLLTDEMIAQYTSALLAGTITSGWTFGAGAALQIPFAMQMAYRFNGCGVTQNVLYENQKLIANQFNSAIGKIQDSLSSTASALGKLQDVVNQNAQALNTLVKQLSSNFGAISSVLNDILSRLDKVEAEVQIDRLITGRLQSLQTYVTQQLIRAAEIRASANLAATKMSECVLGQSKRVDFCGKGCHLMSFPQSAPHGVVFLHVTYVPAQEKNFTTAPAICHDGKAHFPREGVFVSNGTHWFVTQRNFYEPQIITTDNTFVSGNCDVVIGIVNNTVYDPLQPELDSFKEELDKYFKNHTSPDVDLGDISGINASVVNIQKEIDRLNEVAKNLNESLIDLQELGKYEQYIKGGGSGGGQIYEGKLTAEGLRFGIVASRFNHALVDRLVEGAIDAIVRHGGREEDITLVRVPGSWEIPVAAGELARKEDIDAVIAIGVLIRGATPHFDYIASEVSKGLADLSLELRKPITFGVITADTLEQAIERAGTKHGNKGWEAALSAIEMANLFKSLR

SEQ ID NO: 4257 - protein, 1371 aa, Artificial Sequence
  SARS-CoV-2/Finland/FIN03032020A/2020__EPI_ISL_413602 spike protein (1-1211)(I909C_Y1047C) LumSynth construct
MFVFLVLLPLVSSQCVNLTTRTQLPPAYTNSFTRGVYYPDKVFRSSVLHSTQDLFLPFFSNVTWFHAIHVSGTNGTKRFDNPVLPFNDGVYFASTEKSNIIRGWIFGTTLDSKTQSLLIVNNATNVVIKVCEFQFCNDPFLGVYYHKNNKSWMESEFRVYSSANNCTFEYVSQPFLMDLEGKQGNFKNLREFVFKNIDGYFKIYSKHTPINLVRDLPQGFSALEPLVDLPIGINITRFQTLLALHRSYLTPGDSSSGWTAGAAAYYVGYLQPRTFLLKYNENGTITDAVDCALDPLSETKCTLKSFTVEKGIYQTSNFRVQPTESIVRFPNITNLCPFGEVFNATRFASVYAWNRKRISNCVADYSVLYNSASFSTFKCYGVSPTKLNDLCFTNVYADSFVIRGDEVRQIAPGQTGKIADYNYKLPDDFTGCVISWNSNNLDSKVGGNYNYLYRLFRKSNLKPFERDISTEIYQAGSTPCNGVEGFNCYFPLQSYGFQPTNGVGYQPYRVVVLSFELLHAPATVCGPKKSTNLVKNKCVNFNFNGLTGTGVLTESNKKFLPFQQFGRDIADTTDAVRDPQTLEILDITPCSFGGVSVITPGTNTSNQVAVLYQGVNCTEVPVAIHADQLTPTWRVYSTGSNVFQTRAGCLIGAEHVNNSYECDIPIGAGICASYQTQTNSPRRARSVASQSIIAYTMSLGAENSVAYSNNSIAIPTNFTISVTTEILPVSMTKTSVDCTMYICGDSTECSNLLLQYGSFCTQLNRALTGIAVEQDKNTQEVFAQVKQIYKTPPIKDFGGFNFSQILPDPSKPSKRSFIEDLLFNKVTLADAGFIKQYGDCLGDIAARDLICAQKFNGLTVLPPLLTDEMIAQYTSALLAGTITSGWTFGAGAALQIPFAMQMAYRFNGCGVTQNVLYENQKLIANQFNSAIGKIQDSLSSTASALGKLQDVVNQNAQALNTLVKQLSSNFGAISSVLNDILSRLDKVEAEVQIDRLITGRLQSLQTYVTQQLIRAAEIRASANLAATKMSECVLGQSKRVDFCGKGCHLMSFPQSAPHGVVFLHVTYVPAQEKNFTTAPAICHDGKAHFPREGVFVSNGTHWFVTQRNFYEPQIITTDNTFVSGNCDVVIGIVNNTVYDPLQPELDSFKEELDKYFKNHTSPDVDLGDISGINASVVNIQKEIDRLNEVAKNLNESLIDLQELGKYEQYIKGGGSGGGQIYEGKLTAEGLRFGIVASRFNHALVDRLVEGAIDAIVRHGGREEDITLVRVPGSWEIPVAAGELARKEDIDAVIAIGVLIRGATPHFDYIASEVSKGLADLSLELRKPITFGVITADTLEQAIERAGTKHGNKGWEAALSAIEMANLFKSLR

SEQ ID NO: 4258 - protein, 1371 aa, Artificial Sequence
  SARS-CoV-2/France/GE1977/2020__EPI_ISL_414632 spike protein (1-1211)(I909C_Y1047C) LumSynth construct
MFVFLVLLPLVSSQCVNLTTRTQLPPAYTNSFTRGVYYPDKVFRSSVLHSTQDLFLPFFSNVTWFHAIHVSGTNGTKRFDNPVLPFNDGVYFASTEKSNIIRGWIFGTTLDSKTQSLLIVNNATNVVIKVCEFQFCNDPFLGVYYHKNNKSWMESEFRVYSSANNCTFEYVSQPFLMDLEGKQGNFKNLREFVFKNIDGYFKIYSKHTPINLVRDLPQGFSALEPLVDLPIGINITRFQTLLALHRSYLTPGDSSSGWTAGAAAYYVGYLQPRTFLLKYNENGTITDAVDCALDPLSETKCTLKSFTVEKGIYQTSNFRVQPTESIVRFPNITNLCPFGEVFNATRFASVYAWNRKRISNCVADYSVLYNSASFSTFKCYGVSPTKLNDLCFTNVYADSFVIRGDEVRQIAPGQTGKIADYNYKLPDDFTGCVIAWNSNNLDSKVGGNYNYLYRLFRKSNLKPFERDISTEIYQAGSTPCNGVEGFNCYFPLQSYGFQPTNGVGYQPYRVVVLSFELLHAPATVCGPKKSTNLVKNKCVNFNFNGLTGTGVLTESNKKFLPFQQFGRDIADTTDAVRDPQTLEILDITPCSFGGVSVITPGTNTSNQVAVLYQGVNCTEVPVAIHADQLTPTWRVYSTGSNVFQTRAGCLIGAEHVNNSYECDIPIGAGICASYQTQTNSPRRARSVASQSIIAYTMSLGAENSVAYSNNSIAIPTNFTISVTTEILPVSMTKTSVDCTMYICGDSTECSNLLLQYGSFCTQLNRALTGIAVEQDKNTQEVFAQVKQIYKTPPIKDFGGFNFSQILPDPSKPSKRSFIEDLLFNKVTLADAGFIKQYGDCLGDIAARDLICAQKFNGLTVLPPLLTDEMIAQYTSALLAGTITSGWTFGAGAALQIPFAMQMAYRFNGCGVTQNVLYENQKLIANQFNSAIGKIQDSLFSTASALGKLQDVVNQNAQALNTLVKQLSSNFGAISSVLNDILSRLDKVEAEVQIDRLITGRLQSLQTYVTQQLIRAAEIRASANLAATKMSECVLGQSKRVDFCGKGCHLMSFPQSAPHGVVFLHVTYVPAQEKNFTTAPAICHDGKAHFPREGVFVSNGTHWFVTQRNFYEPQIITTDNTFVSGNCDVVIGIVNNTVYDPLQPELDSFKEELDKYFKNHTSPDVDLGDISGINASVVNIQKEIDRLNEVAKNLNESLIDLQELGKYEQYIKGGGSGGGQIYEGKLTAEGLRFGIVASRFNHALVDRLVEGAIDAIVRHGGREEDITLVRVPGSWEIPVAAGELARKEDIDAVIAIGVLIRGATPHFDYIASEVSKGLADLSLELRKPITFGVITADTLEQAIERAGTKHGNKGWEAALSAIEMANLFKSLR

SEQ ID NO: 4259 - protein, 1371 aa, Artificial Sequence
  SARS-CoV-2/Finland/FIN-313/2020__EPI_ISL_414641 spike protein (1-1211)(I909C_Y1047C) LumSynth construct
MFVFLVLLPLVSSQCVNLTTRTQLPPAYTNSFTRGVYYPDKVFRSSVLHSTQDLFLPFFSNVTWFHAIHVSGTNGTKRFDNPVLPFNDGVYFASTEKSNIIRGWIFGTTLDSKTQSLLIVNNATNVVIKVCEFQFCNDPFLGVYYHKNNKSWMESEFRVYSSANNCTFEYVSQPFLMDLEGKQGNFKNLREFVFKNIDGYFKIYSKHTPINLVRDLPQGFSALEPLVDLPIGINITRFKTLLALHRSYLTPGDSSSGWTAGAAAYYVGYLQPRTFLLKYNENGTITDAVDCALDPLSETKCTLKSFTVEKGIYQTSNFRVQPTESIVRFPNITNLCPFGEVFNATRFASVYAWNRKRISNCVADYSVLYNSASFSTFKCYGVSPTKLNDLCFTNVYADSFVIRGDEVRQIAPGQTGKIADYNYKLPDDFTGCVIAWNSNNLDSKVGGNYNYLYRLFRKSNLKPFERDISTEIYQAGSTPCNGVEGFNCYFPLQSYGFQPTNGVGYQPYRVVVLSFELLHAPATVCGPKKSTNLVKNKCVNFNFNGLTGTGVLTESNKKFLPFQQFGRDIADTTDAVRDPQTLEILDITPCSFGGVSVITPGTNTSNQVAVLYQGVNCTEVPVAIHADQLTPTWRVYSTGSNVFQTRAGCLIGAEHVNNSYECDIPIGAGICASYQTQTNSPRRARSVASQSIIAYTMSLGAENSVAYSNNSIAIPTNFTISVTTEILPVSMTKTSVDCTMYICGDSTECSNLLLQYGSFCTQLNRALTGIAVEQDKNTQEVFAQVKQIYKTPPIKDFGGFNFSQILPDPSKPSKRSFIEDLLFNKVTLADAGFIKQYGDCLGDIAARDLICAQKFNGLTVLPPLLTDEMIAQYTSALLAGTITSGWTFGAGAALQIPFAMQMAYRFNGCGVTQNVLYENQKLIANQFNSAIGKIQDSLSSTASALGKLQDVVNQNAQALNTLVKQLSSNFGAISSVLNDILSRLDKVEAEVQIDRLITGRLQSLQTYVTQQLIRAAEIRASANLAATKMSECVLGQSKRVDFCGKGCHLMSFPQSAPHGVVFLHVTYVPAQEKNFTTAPAICHDGKAHFPREGVFVSNGTHWFVTQRNFYEPQIITTDNTFVSGNCDVVIGIVNNTVYDPLQPELDSFKEELDKYFKNHTSPDVDLGDISGINASVVNIQKEIDRLNEVAKNLNESLIDLQELGKYEQYIKGGGSGGGQIYEGKLTAEGLRFGIVASRFNHALVDRLVEGAIDAIVRHGGREEDITLVRVPGSWEIPVAAGELARKEDIDAVIAIGVLIRGATPHFDYIASEVSKGLADLSLELRKPITFGVITADTLEQAIERAGTKHGNKGWEAALSAIEMANLFKSLR

SEQ ID NO: 4260 - protein, 1371 aa, Artificial Sequence
  SARS-CoV-2/Netherlands/ZuidHolland_2/2020__EPI_ISL_414556 spike protein (1-1211)(I909C_Y1047C) LumSynth construct
MFVFLVLLPLVSSQCVNLTTRTQLPPAYTNSFTRGVYYPDKVFRSSVLHSTQDLFLPFFSNVTWFHAIHVSGTNGTKRFDNPVLPFNDGVYFASTEKSNIIRGWIFGTTLDSKTQSLLIVNNATNVVIKVCEFQFCNDPFLGVYYHKNNKSWMESEFRVYSSANNCTFEYVSQPFLMDLEGKQGNFKNLREFVFKNIDGYFKIYSKHTPINLVRDLPQGFSALEPLVDLPIGINITRFQTLLALHRSYLTPGDSSSGWTAGAAAYYVGYLQPRTFLLKYNENGTITDAVDCALDPLSETKCTLKSFTVEKGIYQTSNFRVQPTESIVRFPNITNLCPFGEVFNATRFASVYAWNRKRISNCVADYSVLYNSASFSTFKCYGVSPTKLNDLCFTNVYADSFVIRGDEVRQIAPGQTGKIADYNYKLPDDFTGCVIAWNSNNLDSKVGGNYNYLYRLFRKSNLKPFERDISTEIYQAGSTPCNGVEGFNCYFPLQSYGFQPTNGVGYQPYRVVVLSFELLHAPATVCGPKKSTNLVKNKCVNFNFNGLTGTGVLTESNKKFLPFQQFGRDIADTTDAVRDPQTLEILDITPCSFGGVSVITPGTNTSNQVAVLYQGVNCTEVPVAIHADQLTPTWRVYSTGSNVFQTRAGCLIGAEHVNNSYECDIPIGAGICASYQTQTNSPRRARSVASQSIIAYTMSLGAENSVAYSNNSIAIPTNFTISVTTEILPVSMTKTSVDCTMYICGDSTECSNLLLQYGSFCTQLNRALTGIALEQDKNTQEVFAQVKQIYKTPPIKDFGGFNFSQILPDPSKPSKRSFIEDLLFNKVTLADAGFIKQYGDCLGDIAARDLICAQKFNGLTVLPPLLTDEMIAQYTSALLAGTITSGWTFGAGAALQIPFAMQMAYRFNGCGVTQNVLYENQKLIANQFNSAIGKIQDSLSSTASALGKLQDVVNQNAQALNTLVKQLSSNFGAISSVLNDILSRLDKVEAEVQIDRLITGRLQSLQTYVTQQLIRAAEIRASANLAATKMSECVLGQSKRVDFCGKGCHLMSFPQSAPHGVVFLHVTYVPAQEKNFTTAPAICHDGKAHFPREGVFVSNGTHWFVTQRNFYEPQIITTDNTFVSGNCDVVIGIVNNTVYDPLQPELDSFKEELDKYFKNHTSPDVDLGDISGINASVVNIQKEIDRLNEVAKNLNESLIDLQELGKYEQYIKGGGSGGGQIYEGKLTAEGLRFGIVASRFNHALVDRLVEGAIDAIVRHGGREEDITLVRVPGSWEIPVAAGELARKEDIDAVIAIGVLIRGATPHFDYIASEVSKGLADLSLELRKPITFGVITADTLEQAIERAGTKHGNKGWEAALSAIEMANLFKSLR

SEQ ID NO: 4261 - protein, 1371 aa, Artificial Sequence
  SARS-CoV-2/USA/WA-UW31/2020__EPI_ISL_414618 spike protein (1-1211)(I909C_Y1047C) LumSynth construct
MFVFLVLLPLVSSQCVNLTTRTQLPPAYTNSFTRGVYYPDKVFRSSVLHSTQDLFLPFFSNVTWFHAIHVSGTNGTKRFDNPVLPFNDGVYFASTEKSNIIRGWIFGTTLDSKTQSLLIVNNATNVVIKVCEFQFCNDPFLGVYYHKNNKSWMESEFRVYSSANNCTFEYVSQPFLMDLEGKQGNFKNLREFVFKNIDGYFKIYSKHTPINLVRDLPQGFSALEPLVDLPIGINITRFQTLLALHRSYLTPGDSSSGWTAGAAAYYVGYLQPRTFLLKYNENGTITDAVDCALDPLSETKCTLKSFTVEKGIYQTSNFRVQPTESIVRFPNITNLCPFGEVFNATRFASVYAWNRKRISNCVADYSVLYNSASFSTFKCYGVSPTKLNDLCFTNVYADSFVIRGDEVRQIAPGQTGKIADYNYKLPDDFTGCVIAWNSNNLDSKVGGNYNYLYRLFRKSNLKPFERDISTEIYQAGSTPCNGAEGFNCYFPLQSYGFQPTNGVGYQPYRVVVLSFELLHAPATVCGPKKSTNLVKNKCVNFNFNGLTGTGVLTESNKKFLPFQQFGRDIADTTDAVRDPQTLEILDITPCSFGGVSVITPGTNTSNQVAVLYQDVNCTEVPVAIHADQLTPTWRVYSTGSNVFQTRAGCLIGAEHVNNSYECDIPIGAGICASYQTQTNSPRRARSVASQSIIAYTMSLGAENSVAYSNNSIAIPTNFTISVTTEILPVSMTKTSVDCTMYICGDSTECSNLLLQYGSFCTQLNRALTGIAVEQDKNTQEVFAQVKQIYKTPPIKDFGGFNFSQILPDPSKPSKRSFIEDLLFNKVTLADAGFIKQYGDCLGDIAARDLICAQKFNGLTVLPPLLTDEMIAQYTSALLAGTITSGWTFGAGAALQIPFAMQMAYRFNGCGVTQNVLYENQKLIANQFNSAIGKIQDSLSSTASALGKLQDVVNQNAQALNTLVKQLSSNFGAISSVLNDILSRLDKVEAEVQIDRLITGRLQSLQTYVTQQLIRAAEIRASANLAATKMSECVLGQSKRVDFCGKGCHLMSFPQSAPHGVVFLHVTYVPAQEKNFTTAPAICHDGKAHFPREGVFVSNGTHWFVTQRNFYEPQIITTDNTFVSGNCDVVIGIVNNTVYDPLQPELDSFKEELDKYFKNHTSPDVDLGDISGINASVVNIQKEIDRLNEVAKNLNESLIDLQELGKYEQYIKGGGSGGGQIYEGKLTAEGLRFGIVASRFNHALVDRLVEGAIDAIVRHGGREEDITLVRVPGSWEIPVAAGELARKEDIDAVIAIGVLIRGATPHFDYIASEVSKGLADLSLELRKPITFGVITADTLEQAIERAGTKHGNKGWEAALSAIEMANLFKSLR

SEQ ID NO: 4262 - protein, 1371 aa, Artificial Sequence
  SARS-CoV-2/South Korea/SNU01/2020__EPI_ISL_411929 spike protein (1-1211)(I909C_Y1047C) LumSynth construct
MFVFLVLLPLVSSQCVNLTTRTQLPPAYTNSFTRGVYYPDKVFRSSVLHSTQDLFLPFFSNVTWFHAIHVSGTNGTKRFDNPVLPFNDGVYFASTEKSNIIRGWIFGTTLDSKTQSLLIVNNATNVVIKVCEFQFCNDPFLGVYYHKNNKSWMESEFRVYSSANNCTFEYVSQPFLMDLEGKQGNFKNLREFVFKNIDGYFKIYSKHTPINLVRDLPQGFWALEPLVDLPIGINITRFQTLLALHRSYLTPGDSSSGWTAGAAAYYVGYLQPRTFLLKYNENGTITDAVDCALDPLSETKCTLKSFTVEKGIYQTSNFRVQPTESIVRFPNITNLCPFGEVFNATRFASVYAWNRKRISNCVADYSVLYNSASFSTFKCYGVSPTKLNDLCFTNVYADSFVIRGDEVRQIAPGQTGKIADYNYKLPDDFTGCVIAWNSNNLDSKVGGNYNYLYRLFRKSNLKPFERDISTEIYQAGSTPCNGVEGFNCYFPLQSYGFQPTNGVGYQPYRVVVLSFELLHAPATVCGPKKSTNLVKNKCVNFNFNGLTGTGVLTESNKKFLPFQQFGRDIADTTDAVRDPQTLEILDITPCSFGGVSVITPGTNTSNQVAVLYQDVNCTEVPVAIHADQLTPTWRVYSTGSNVFQTRAGCLIGAEHVNNSYECDIPIGAGICASYQTQTNSPRRARSVASQSIIAYTMSLGAENSVAYSNNSIAIPTNFTISVTTEILPVSMTKTSVDCTMYICGDSTECSNLLLQYGSFCTQLNRALTGIAVEQDKNTQEVFAQVKQIYKTPPIKDFGGFNFSQILPDPSKPSKRSFIEDLLFNKVTLADAGFIKQYGDCLGDIAARDLICAQKFNGLTVLPPLLTDEMIAQYTSALLAGTITSGWTFGAGAALQIPFAMQMAYRFNGCGVTQNVLYENQKLIANQFNSAIGKIQDSLSSTASALGKLQDVVNQNAQALNTLVKQLSSNFGAISSVLNDILSRLDKVEAEVQIDRLITGRLQSLQTYVTQQLIRAAEIRASANLAATKMSECVLGQSKRVDFCGKGCHLMSFPQSAPHGVVFLHVTYVPAQEKNFTTAPAICHDGKAHFPREGVFVSNGTHWFVTQRNFYEPQIITTDNTFVSGNCDVVIGIVNNTVYDPLQPELDSFKEELDKYFKNHTSPDVDLGDISGINASVVNIQKEIDRLNEVAKNLNESLIDLQELGKYEQYIKGGGSGGGQIYEGKLTAEGLRFGIVASRFNHALVDRLVEGAIDAIVRHGGREEDITLVRVPGSWEIPVAAGELARKEDIDAVIAIGVLIRGATPHFDYIASEVSKGLADLSLELRKPITFGVITADTLEQAIERAGTKHGNKGWEAALSAIEMANLFKSLR

SEQ ID NO: 4263 - protein, 1371 aa, Artificial Sequence
  SARS-CoV-2/China/WF0004/2020__EPI_ISL_413694 spike protein (1-1211)(I909C_Y1047C) LumSynth construct
MFVFLVLLPLVSSQCVNLTTRTQLPPAYTNSFTRGVYYPDKVFRSSVLHSTQDLFLPFFSNVTWFHAIHVSGTNGTKRFDNPVLPFNDGVYFASTEKSNIIRGWIFGTTLDSKTQSLLIVNNATNVVIKVCEFQFCNDPFLGVYYHKNNKSWTESEFRVYSSANNCTFEYVSQPFLMDLEGKQGNFKNLREFVFKNIDGYFKIYSKHTPINLVRDLPQGFSALEPLVDLPIGINITRFQTLLALHRSYLTPGDSSSGWTAGAAAYYVGYLQPRTFLLKYNENGTITDAVDCALDPLSETKCTLKSFTVEKGIYQTSNFRVQPTESIVRFPNITNLCPFGEVFNATRFASVYAWNRKRISNCVADYSVLYNSASFSTFKCYGVSPTKLNDLCFTNVYADSFVIRGDEVRQIAPGQTGKIADYNYKLPDDFTGCVIAWNSNNLDSKVGGNYNYLYRLFRKSNLKPFERDISTEIYQAGSTPCNGVEGFNCYFPLQSYGFQPTNGVGYQPYRVVVLSFELLHAPATVCGPKKSTNLVKNKCVNFNFNGLTGTGVLTESNKKFLPFQQFGRDIADTTDAVRDPQTLEILDITPCSFGGVSVITPGTNTSNQVAVLYQDVNCTEVPVAIHADQLTPTWRVYSTGSNVFQTRAGCLIGAEHVNNSYECDIPIGAGICASYQTQTNSPRRARSVASQSIIAYTMSLGAENSVAYSNNSIAIPTNFTISVTTEILPVSMTKTSVDCTMYICGDSTECSNLLLQYGSFCTQLNRALTGIAVEQDKNTQEVFAQVKQIYKTPPIKDFGGFNFSQILPDPSKPSKRSFIEDLLFNKVTLADAGFIKQYGDCLGDIAARDLICAQKFNGLTVLPPLLTDEMIAQYTSALLAGTITSGWTFGAGAALQIPFAMQMAYRFNGCGVTQNVLYENQKLIANQFNSAIGKIQDSLSSTASALGKLQDVVNQNAQALNTLVKQLSSNFGAISSVLNDILSRLDKVEAEVQIDRLITGRLQSLQTYVTQQLIRAAEIRASANLAATKMSECVLGQSKRFDFCGKGCHLMSFPQSAPHGVVFLHVTYVPAQEKNFTTAPAICHDGKAHFPREGVFVSNGTHWFVTQRNFYEPQIITTDNTFVSGNCDVVIGIVNNTVYDPLQPELDSFKEELDKYFKNHTSPDVDLGDISGINASVVNIQKEIDRLNEVAKNLNESLIDLQELGKYEQYIKGGGSGGGQIYEGKLTAEGLRFGIVASRFNHALVDRLVEGAIDAIVRHGGREEDITLVRVPGSWEIPVAAGELARKEDIDAVIAIGVLIRGATPHFDYIASEVSKGLADLSLELRKPITFGVITADTLEQAIERAGTKHGNKGWEAALSAIEMANLFKSLR

SEQ ID NO: 4264 - protein, 1371 aa, Artificial Sequence
  SARS-CoV-2/China/WF0028/2020__EPI_ISL_413791 spike protein (1-1211)(I909C_Y1047C) LumSynth construct
MFVFLVLLPLVSSQCVNLTTRTQLPPAYTNSFTRGVYYPDKVFRSSVLHSTQDLFLPFFSNVTWFHAIHVSGTNGTKRFDNPVLPFNDGVYFASTEKSNIIRGWIFGTTLDSKTQSLLIVNNATNVVIKVCEFQFCNDPFLGVYYHKNNKSWMESEFRVYSSANNCTFEYVSQPFLMDLEGKQGNFKNLREFVFKNIDGYFKIYSKHTPINLVRDLPQGFSALEPLVDLPIGINITRFQTLLALHRSYLTPGDSSSGWTAGAAAYYVGYLQPRTFLLKYNENGTITDAVDCALDPLSETKCTLKSFTVEKGIYQTSNFRVQPTESIVRFPNITNLCPFGEVFNATRFASVYAWNRKRISNCVADYSVLYNSASFSTFKCYGVSPTKLNDLCFTNVYADSFVIRGDEVRQIAPGQTGKIADYNYKLPDDFTGCVIAWNSNNLDSKVGGNYNYLYRLFRKSNLKPFERDISTEIYQAGSTPCNGVEGFNCYFPLQSYGFQPTNGVGYQPYRVVVLSFELLHAPATVCGPKKSTNLVKNKCVNFNFNGLTGTGVLTESNKKFLPFQQFGRDIADTTDAVRDPQTLEILDITPCSFGGVSVITPGTNTSNQVAVLYQDVNCTEVPVAIHADQLTPTWRVYSTGSNVFQTRAGCLIGAEHVNNSYECDIPIGAGICASYQTQTNSPRRARSVASQSIIAYTMSLGAENSVAYSNNSIAIPTNFTISVTTEILPVSMTKTSVDCTMYICGDSTECSNLLLQYGSFCTQLNRALTGIAVEQDKNTQEVFAQVKQIYKTPPIKDFGGFNFSQILPDPSKPSKRSFIEDLLFNKVTLADAGFIKQYGDCLGDIAARDLICAQKFNGLTVLPPLLTDEMIAQYTSALLAGTITSGWTFGAGAALQIPFAMQMAYRFNGCGVTQNVLYENQKLIANQFNSAIGKIQDSLSSTASALGKLQDVVNQNAQALNTLVKQLSSNFGAISSVLNDILSRLDKVEAEVQIDRLITGRLQSLQTYVTQQLIRAAEIRASANLAATKMSECVLGQSKRVDFCGKGCHLMSFPQSAPHGVVFLHVTYVPAQEKNFTTAPAICHDGKAHFPREGVFVSNGTHWFVTQRNFYEPQIITTDNTFVSGNCDVVIGIVNNTVYDPLQPELESFKEELDKYFKNHTSPDVDLGDISGINASVVNIQKEIDRLNEVAKNLNESLIDLQELGKYEQYIKGGGSGGGQIYEGKLTAEGLRFGIVASRFNHALVDRLVEGAIDAIVRHGGREEDITLVRVPGSWEIPVAAGELARKEDIDAVIAIGVLIRGATPHFDYIASEVSKGLADLSLELRKPITFGVITADTLEQAIERAGTKHGNKGWEAALSAIEMANLFKSLR

SEQ ID NO: 4265 - protein, 1371 aa, Artificial Sequence
  SARS-CoV-2/2019-nCoV/USA-CruiseA-18/2020__MT159716.1 spike protein (1-1211)(I909C_Y1047C) LumSynth construct
MFVFLVLLPLVSSQCVNLTTRTQLPPAYTNSFTRGVYYPDKVFRSSVLHSTQDLFLPFFSNVTWFHAIHVSGTNGTKRFDNPVLPFNDGVYFASTEKSNIIRGWIFGTTLDSKTQSLLIVNNATNVVIKVCEFQFCNDPFLGVYYHKNNKSWMESELRVYSSANNCTFEYVSQPFLMDLEGKQGNFKNLREFVFKNIDGYFKIYSKHTPINLVRDLPQGFSALEPLVDLPIGINITRFQTLLALHRSYLTPGDSSSGWTAGAAAYYVGYLQPRTFLLKYNENGTITDAVDCALDPLSETKCTLKSFTVEKGIYQTSNFRVQPTESIVRFPNITNLCPFGEVFNATRFASVYAWNRKRISNCVADYSVLYNSASFSTFKCYGVSPTKLNDLCFTNVYADSFVIRGDEVRQIAPGQTGKIADYNYKLPDDFTGCVIAWNSNNLDSKVGGNYNYLYRLFRKSNLKPFERDISTEIYQAGSTPCNGVEGFNCYFPLQSYGFQPTNGVGYQPYRVVVLSFELLHAPATVCGPKKSTNLVKNKCVNFNFNGLTGTGVLTESNKKFLPFQQFGRDIADTTDAVRDPQTLEILDITPCSFGGVSVITPGTNTSNQVAVLYQDVNCTEVPVAIHADQLTPTWRVYSTGSNVFQTRAGCLIGAEHVNNSYECDIPIGAGICASYQTQTNSPRRARSVASQSIIAYTMSLGAENSVAYSNNSIAIPTNFTISVTTEILPVSMTKTSVDCTMYICGDSTECSNLLLQYGSFCTQLNRALTGIAVEQDKNTQEVFAQVKQIYKTPPIKDFGGFNFSQILPDPSKPSKRSFIEDLLFNKVTLADAGFIKQYGDCLGDIAARDLICAQKFNGLTVLPPLLTDEMIAQYTSALLAGTITSGWTFGAGAALQIPFAMQMAYRFNGCGVTQNVLYENQKLIANQFNSAIGKIQDSLSSTASALGKLQDVVNQNAQALNTLVKQLSSNFGAISSVLNDILSRLDKVEAEVQIDRLITGRLQSLQTYVTQQLIRAAEIRASANLAATKMSECVLGQSKRVDFCGKGCHLMSFPQSAPHGVVFLHVTYVPAQEKNFTTAPAICHDGKAHFPREGVFVSNGTHWFVTQRNFYEPQIITTDNTFVSGNCDVVIGIVNNTVYDPLQPELDSFKEELDKYFKNHTSPDVDLGDISGINASVVNIQKEIDRLNEVAKNLNESLIDLQELGKYEQYIKGGGSGGGQIYEGKLTAEGLRFGIVASRFNHALVDRLVEGAIDAIVRHGGREEDITLVRVPGSWEIPVAAGELARKEDIDAVIAIGVLIRGATPHFDYIASEVSKGLADLSLELRKPITFGVITADTLEQAIERAGTKHGNKGWEAALSAIEMANLFKSLR

SEQ ID NO: 4266 - protein, 1371 aa, Artificial Sequence
  SARS-CoV-2/SARS-CoV-2/Yunnan-01/human/2020/CHN__MT049951.1 spike protein (1-1211)(I909C_Y1047C) LumSynth construct
MFVFLVLLPLVSSQCVNLTTRTQLPPANTNSFTRGVYYPDKVFRSSVLHSTQDLFLPFFSNVTWFHAIHVSGTNGTKRFDNPVLPFNDGVYFASTEKSNIIRGWIFGTTLDSKTQSLLIVNNATNVVIKVCEFQFCNDPFLGVYYHKNNKSWMESEFRVYSSANNCTFEYVSQPFLMDLEGKQGNFKNLREFVFKNIDGYFKIYSKHTPINLVRDLPQGFSALEPLVDLPIGINITRFQTLLALHRSYLTPGDSSSGWTAGAAAYYVGYLQPRTFLLKYNENGTITDAVDCALDPLSETKCTLKSFTVEKGIYQTSNFRVQPTESIVRFPNITNLCPFGEVFNATRFASVYAWNRKRISNCVADYSVLYNSASFSTFKCYGVSPTKLNDLCFTNVYADSFVIRGDEVRQIAPGQTGKIADYNYKLPDDFTGCVIAWNSNNLDSKVGGNYNYLYRLFRKSNLKPFERDISTEIYQAGSTPCNGVEGFNCYFPLQSYGFQPTNGVGYQPYRVVVLSFELLHAPATVCGPKKSTNLVKNKCVNFNFNGLTGTGVLTESNKKFLPFQQFGRDIADTTDAVRDPQTLEILDITPCSFGGVSVITPGTNTSNQVAVLYQDVNCTEVPVAIHADQLTPTWRVYSTGSNVFQTRAGCLIGAEHVNNSYECDIPIGAGICASYQTQTNSPRRARSVASQSIIAYTMSLGAENSVAYSNNSIAIPTNFTISVTTEILPVSMTKTSVDCTMYICGDSTECSNLLLQYGSFCTQLNRALTGIAVEQDKNTQEVFAQVKQIYKTPPIKDFGGFNFSQILPDPSKPSKRSFIEDLLFNKVTLADAGFIKQYGDCLGDIAARDLICAQKFNGLTVLPPLLTDEMIAQYTSALLAGTITSGWTFGAGAALQIPFAMQMAYRFNGCGVTQNVLYENQKLIANQFNSAIGKIQDSLSSTASALGKLQDVVNQNAQALNTLVKQLSSNFGAISSVLNDILSRLDKVEAEVQIDRLITGRLQSLQTYVTQQLIRAAEIRASANLAATKMSECVLGQSKRVDFCGKGCHLMSFPQSAPHGVVFLHVTYVPAQEKNFTTAPAICHDGKAHFPREGVFVSNGTHWFVTQRNFYEPQIITTDNTFVSGNCDVVIGIVNNTVYDPLQPELDSFKEELDKYFKNHTSPDVDLGDISGINASVVNIQKEIDRLNEVAKNLNESLIDLQELGKYEQYIKGGGSGGGQIYEGKLTAEGLRFGIVASRFNHALVDRLVEGAIDAIVRHGGREEDITLVRVPGSWEIPVAAGELARKEDIDAVIAIGVLIRGATPHFDYIASEVSKGLADLSLELRKPITFGVITADTLEQAIERAGTKHGNKGWEAALSAIEMANLFKSLR

SEQ ID NO: 4267 - protein, 1371 aa, Artificial Sequence
  SARS-CoV-2/USA/WA-UW292/2020__EPI_ISL_418077 spike protein (1-1211)(I909C_Y1047C) LumSynth construct
MFVFLVLLPLVSSQCVNLTTRTQLPPAYTNSFTRGVYYPDKVFRSSVLHSTQDLFLPFFSNVTWFHAIHVSGTNGTKRFDNPVLPFNDGVYFASTEKSNIIRGWIFGTTLDSKTQSLLIVNNATNVVIKVCEFQFCNDPFLGVYYHKNNKSWMESEFRVYSSANNCTFEYVSQPFLMDLEGKQGNFKNLREFVFKNIDGYFKIYSKHTPINLVRDLPQGFSALEPLVDLPIGINITRFQTLLALHRSYLTPGDSSSGWTAGAAAYYVGYLQPRTFLLKYNENGTITDAVDCALDPLSETKCTLKSFTVEKGIYQTSNFRVQPTESIVRFPNITNLCPFGEVFNATRFASVYAWNRKRISNCVADYSVLYNSASFSTFKCYGVSPTKLNDLCFTNVYADSFVIRGDEVRQIAPGQTGKIADYNYKLPDDFTGCVIAWNSNNLDSKVGGNYNYLYRLFRKSNLKPFERDISTEIYQASSTPCNGVEGFNCYFPLQSYGFQPTNGVGYQPYRVVVLSFELLHAPATVCGPKKSTNLVKNKCVNFNFNGLTGTGVLTESNKKFLPFQQFGRDIADTTDAVRDPQTLEILDITPCSFGGVSVITPGTNTSNQVAVLYQDVNCTEVPVAIHADQLTPTWRVYSTGSNVFQTRAGCLIGAEHVNNSYECDIPIGAGICASYQTQTNSPRRARSVASQSIIAYTMSLGAENSVAYSNNSIAIPTNFTISVTTEILPVSMTKTSVDCTMYICGDSTECSNLLLQYGSFCTQLNRALTGIAVEQDKNTQEVFAQVKQIYKTPPIKDFGGFNFSQILPDPSKPSKRSFIEDLLFNKVTLADAGFIKQYGDCLGDIAARDLICAQKFNGLTVLPPLLTDEMIAQYTSALLAGTITSGWTFGAGAALQIPFAMQMAYRFNGCGVTQNVLYENQKLIANQFNSAIGKIQDSLSSTASALGKLQDVVNQNAQALNTLVKQLSSNFGAISSVLNDILSRLDKVEAEVQIDRLITGRLQSLQTYVTQQLIRAAEIRASANLAATKMSECVLGQSKRVDFCGKGCHLMSFPQSAPHGVVFLHVTYVPAQEKNFTTAPAICHDGKAHFPREGVFVSNGTHWFVTQRNFYEPQIITTDNTFVSGNCDVVIGIVNNTVYDPLQPELDSFKEELDKYFKNHTSPDVDLGDISGINASVVNIQKEIDRLNEVAKNLNESLIDLQELGKYEQYIKGGGSGGGQIYEGKLTAEGLRFGIVASRFNHALVDRLVEGAIDAIVRHGGREEDITLVRVPGSWEIPVAAGELARKEDIDAVIAIGVLIRGATPHFDYIASEVSKGLADLSLELRKPITFGVITADTLEQAIERAGTKHGNKGWEAALSAIEMANLFKSLR

SEQ ID NO: 4268 - protein, 1371 aa, Artificial Sequence
  SARS-CoV-2/Iceland/192/2020__EPI_ISL_417819 spike protein (1-1211)(I909C_Y1047C) LumSynth construct
MFVFFVLLPLVSSQCVNLTTRTQLPPAYTNSFTRGVYYPDKVFRSSVLHSTQDLFLPFFSNVTWFHAIHVSGTNGTKRFDNPVLPFNDGVYFASTEKSNIIRGWIFGTTLDSKTQSLLIVNNATNVVIKVCEFQFCNDPFLGVYYHKNNKSWMESEFRVYSSANNCTFEYVSQPFLMDLEGKQGNFKNLREFVFKNIDGYFKIYSKHTPINLVRDLPQGFSALEPLVDLPIGINITRFQTLLALHRSYLTPGDSSSGWTAGAAAYYVGYLQPRTFLLKYNENGTITDAVDCALDPLSETKCTLKSFTVEKGIYQTSNFRVQPTESIVRFPNITNLCPFGEVFNATRFASVYAWNRKRISNCVADYSVLYNSASFSTFKCYGVSPTKLNDLCFTNVYADSFVIRGDEVRQIAPGQTGKIADYNYKLPDDFTGCVIAWNSNNLDSKVGGNYNYLYRLFRKSNLKPFERDISTEIYQAGSTPCNGVEGFNCYFPLQSYGFQPTNGVGYQPYRVVVLSFELLHAPATVCGPKKSTNLVKNKCVNFNFNGLTGTGVLTESNKKFLPFQQFGRDIADTTDAVRDPQTLEILDITPCSFGGVSVITPGTNTSNQVAVLYQGVNCTEVPVAIHADQLTPTWRVYSTGSNVFQTRAGCLIGAEHVNNSYECDIPIGAGICASYQTQTNSPRRARSVASQSIIAYTMSLGAENSVAYSNNSIAIPTNFTISVTTEILPVSMTKTSVDCTMYICGDSTECSNLLLQYGSFCTQLNRALTGIAVEQDKNTQEVFAQVKQIYKTPPIKDFGGFNFSQILPDPSKPSKRSFIEDLLFNKVTLADAGFIKQYGDCLGDIAARDLICAQKFNGLTVLPPLLTDEMIAQYTSALLAGTITSGWTFGAGAALQIPFAMQMAYRFNGCGVTQNVLYENQKLIANQFNSAIGKIQDSLSSTASALGKLQDVVNQNAQALNTLVKQLSSNFGAISSVLNDILSRLDKVEAEVQIDRLITGRLQSLQTYVTQQLIRAAEIRASANLAATKMSECVLGQSKRVDFCGKGCHLMSFPQSAPHGVVFLHVTYVPAQEKNFTTAPAICHDGKAHFPREGVFVSNGTHWFVTQRNFYEPQIITTDNTFVSGNCDVVIGIVNNTVYDPLQPELDSFKEELDKYFKNHTSPDVDLGDISGINASVVNIQKEIDRLNEVAKNLNESLIDLQELGKYEQYIKGGGSGGGQIYEGKLTAEGLRFGIVASRFNHALVDRLVEGAIDAIVRHGGREEDITLVRVPGSWEIPVAAGELARKEDIDAVIAIGVLIRGATPHFDYIASEVSKGLADLSLELRKPITFGVITADTLEQAIERAGTKHGNKGWEAALSAIEMANLFKSLR

SEQ ID NO: 4269 - protein, 1371 aa, Artificial Sequence
  SARS-CoV-2/Belgium/ULG-6939/2020__EPI_ISL_417020 spike protein (1-1211)(I909C_Y1047C) LumSynth construct
MFVFLVLLPLVSSQCVNLTTRTQLPPAYTNSFTRGVYYPDKVFRSSVLHSTQDLFLPFFSNVTWFHAIHVSGTNGTKRFDNPVLPFNDGVYFASTEKSNIIRGWIFGTTLDSKTQSLLIVNNATNVVIKVCEFQFCNDPFLGVYYHKNNKSWMESEFRVYSSANNCTFEYVSQPFLMDLEGKQGNFKNLREFVFKNIDGYFKIYSKHTPINLVRDLPQGFSALEPLVDLPIGINITRFQTLLALHRSYLTPGDSSSGWTAGAAAYYVGYLQPRTFLLKYNENGTITDAVDCALDPLSETKCTLKSFTVEKGIYQTSNFRVQPTESIVRFPNITNLCPFGEVFNATRFASVYAWNRKRISNCVADYSVLYNSASFSTFKCYGVSPTKLNDLCFTNVYADSFVIRGDEVRQIAPGQTGKIADYNYKLPDDFTGCVIAWNSNNLDSKVGGNYNYLYRLFRKSNLKPFERDISTEIYQAGSTPCNGVEGFNCYFPLQSYGFQPTNGVGYQPYRVVVLSFELLHAPATVCGPKKSTNLVKNKCVNFNFNGLTGTGVLTESNKKFLPFQQFGRDIADTTDAVRDPQTLEILDITPCSFGGVSVITPGTNTSNQVAVLYQGVNCTEVPVAIHADQLTPTWRVYSTGSNVFQTRAGCLIGAEHVNNSYECDIPIGAGICASYQTQTNSPRRARSVASQSIIAYTMSLGAENSVVYSNNSIAIPTNFTISVTTEILPVSMTKTSVDCTMYICGDSTECSNLLLQYGSFCTQLNRALTGIAVEQDKNTQEVFAQVKQIYKTPPIKDFGGFNFSQILPDPSKPSKRSFIEDLLFNKVTLADAGFIKQYGDCLGDIAARDLICAQKFNGLTVLPPLLTDEMIAQYTSALLAGTITSGWTFGAGAALQIPFAMQMAYRFNGCGVTQNVLYENQKLIANQFNSAIGKIQDSLSSTASALGKLQDVVNQNAQALNTLVKQLSSNFGAISSVLNDILSRLDKVEAEVQIDRLITGRLQSLQTYVTQQLIRAAEIRASANLAATKMSECVLGQSKRVDFCGKGCHLMSFPQSAPHGVVFLHVTYVPAQEKNFTTAPAICHDGKAHFPREGVFVSNGTHWFVTQRNFYEPQIITTDNTFVSGNCDVVIGIVNNTVYDPLQPELDSFKEELDKYFKNHTSPDVDLGDISGINASVVNIQKEIDRLNEVAKNLNESLIDLQELGKYEQYIKGGGSGGGQIYEGKLTAEGLRFGIVASRFNHALVDRLVEGAIDAIVRHGGREEDITLVRVPGSWEIPVAAGELARKEDIDAVIAIGVLIRGATPHFDYIASEVSKGLADLSLELRKPITFGVITADTLEQAIERAGTKHGNKGWEAALSAIEMANLFKSLR

SEQ ID NO: 4270 - protein, 1371 aa, Artificial Sequence
  SARS-CoV-2/France/HF2496/2020__EPI_ISL_418231 spike protein (1-1211)(I909C_Y1047C) LumSynth construct
MFVFLVLLPLVSSQCVNLTTRTQLPPAYTNSFTRGVYYPDKVFRSSVLHSTQDLFLPFFSNVTWFHAIHVSGTNGTKRFDNPVLPFNDGVYFASTEKSNIIRGWIFGTTLDSKTQSLLIVNNATNVVIKVCEFQFCNDPFLGVYYHKNNKSWMESEFRVYSSANNCTFEYVSQPFLMDLEGKQGNFKNLREFVFKNIDGYFKIYSKHTPINLVRDLPQGFSALEPLVDLPIGINITRFQTLLALHRSYLTPGDSSSGWTAGAAAYYVGYLQPRTFLLKYNENGTITDAVDCALDPLSETKCTLKSFTVEKGIYQTSNFRVQPTESIVRFPNITNLCPFGEVFNATRFASVYAWNRKRISNCVADYSVLYNSASFSTFKCYGVSPTKLNDLCFTNVYADSFVIRGDEVRQIAPGQTGKIADYNYKLPDDFTGCVIAWNSNNLDSKVGGNYNYLYRLFRKSNLKPFERDISTEIYQAGSTPCNGVEGFNCYFPLQSYGFQPTNGVGYQPYRVVVLSFELLHAPATVCGPKKSTNLVKNKCVNFNFNGLTGTGVLTESNKKFLPFQQFGRDIADTTDAVRDPQTLEILDITPCSFGGVSVITPGTNTSNQVAVLYQGVNCTEVPVAIHADQLTPTWRVYSTGSNVFQTRAGCLIGAEHVNNSYECDIPIGAGICASYQTQTNSPRRARSVASQSIIAYTMSLGAENSVAYSNNSIAIPTNFTISVTTEILPVSMTKTSVDCTMYICGDSTECSNLLLQYGSFCTQLNRALTGIAVEQDKNTQEVFAQVKQIYKTPPIKDFGGFNFSQILPDPSKPSKRSFIEDLLFNKVTLADAGFIKQYGDCLGDIVARDLICAQKFNGLTVLPPLLTDEMIAQYTSALLAGTITSGWTFGAGAALQIPFAMQMAYRFNGCGVTQNVLYENQKLIANQFNSAIGKIQDSLSSTASALGKLQDVVNQNAQALNTLVKQLSSNFGAISSVLNDILSRLDKVEAEVQIDRLITGRLQSLQTYVTQQLIRAAEIRASANLAATKMSECVLGQSKRVDFCGKGCHLMSFPQSAPHGVVFLHVTYVPAQEKNFTTAPAICHDGKAHFPREGVFVSNGTHWFVTQRNFYEPQIITTDNTFVSGNCDVVIGIVNNTVYDPLQPELDSFKEELDKYFKNHTSPDVDLGDISGINASVVNIQKEIDRLNEVAKNLNESLIDLQELGKYEQYIKGGGSGGGQIYEGKLTAEGLRFGIVASRFNHALVDRLVEGAIDAIVRHGGREEDITLVRVPGSWEIPVAAGELARKEDIDAVIAIGVLIRGATPHFDYIASEVSKGLADLSLELRKPITFGVITADTLEQAIERAGTKHGNKGWEAALSAIEMANLFKSLR

SEQ ID NO: 4271 - protein, 1371 aa, Artificial Sequence
  SARS-CoV-2/USA/WA-UW291/2020__EPI_ISL_418076 spike protein (1-1211)(I909C_Y1047C) LumSynth construct
MFVFLVLLPLVSSQCVNLTTRTQLPPAYTNSFTRGVYYPDKVFRSSVLHSTQDLFLPFFSNVTWFHAIHVSGTNGTKRFDNPVLPFNDGVYFASTEKSNIIRGWIFGTTLDSKTQSLLIVNNATNVVIKVCEFQFCNDPFLGVYYHKNNKSWMESEFRVYSSANNCTFEYVSQPFLMDLEGKQGNFKNLREFVFKNIDGYFKIYSKHTPINLVRDLPQGFSALEPLVDLPIGINITRFQTLLALHRSYLTPGDSSSGWTAGAAAYYVGYLQPRTFLLKYNENGTITDAVDCALDPLSETKCTLKSFTVEKGIYQTSNFRVQPTESIVRFPNITNLCPFGEVFNATRFASVYAWNRKRISNCVADYSVLYNSASFSTFKCYGVSPTKLNDLCFTNVYADSFVIRGDEVRQIAPGQTGKIADYNYKLPDDFTGCVIAWNSNNLDSKVGGNYNYLYRLFRKSNLKPFERDISTEIYQAGSTPCNGVEGFNCYFPLQSYGFQPTNGVGYQPYRVVVLSFELLHAPATVCGPKKSTNLVKNKCVNFNFNGLTGTGVLTESNKKFLPFQQFGRDIADTTDAVRDPQTLEILDITPCSFGGVSVITPGTNTSNQVAVLYQGVNCTEVPVAIHADQLTPTWRVYSTGSNVFQTRAGCLIGAEHVNNSYECDIPIGAGICASYQTQTNSPRRARSVASQSIIAYTMSLGAENSVAYSNNSIAIPTNFTISVTTEILPVSMTKTSVDCTMYICGDSTECSNLLLQYGSFCTQLNRALTGIAVEQDKNTQEVFAQVKQIYKTPPIKDFGGFNFSQILPDPSKPSKRSFIEDLLFNKVTLADAGFIKQYGDCLGDIAARDLICAQKFNGLTVLPPLLTDEMIAQYTSALLAGTITSGWTFGAGAALQIPFAMQMAYRFNGCGVTQNVLYENQKLIANQFNSAIGKIQYSLSSTASALGKLQDVVNQNAQALNTLVKQLSSNFGAISSVLNDILSRLDKVEAEVQIDRLITGRLQSLQTYVTQQLIRAAEIRASANLAATKMSECVLGQSKRVDFCGKGCHLMSFPQSAPHGVVFLHVTYVPAQEKNFTTAPAICHDGKAHFPREGVFVSNGTHWFVTQRNFYEPQIITTDNTFVSGNCDVVIGIVNNTVYDPLQPELDSFKEELDKYFKNHTSPDVDLGDISGINASVVNIQKEIDRLNEVAKNLNESLIDLQELGKYEQYIKGGGSGGGQIYEGKLTAEGLRFGIVASRFNHALVDRLVEGAIDAIVRHGGREEDITLVRVPGSWEIPVAAGELARKEDIDAVIAIGVLIRGATPHFDYIASEVSKGLADLSLELRKPITFGVITADTLEQAIERAGTKHGNKGWEAALSAIEMANLFKSLR

SEQ ID NO: 4272 - protein, 1371 aa, Artificial Sequence; identical to SEQ ID NO: 4235
  SARS-CoV-2/Portugal/PT0034/2020__EPI_ISL_418019 spike protein (1-1211)(I909C_Y1047C) LumSynth construct

SEQ ID NO: 4273 - protein, 1371 aa, Artificial Sequence
  SARS-CoV-2/Iceland/202/2020__EPI_ISL_417750 spike protein (1-1211)(I909C_Y1047C) LumSynth construct
MFVFLVLLPLVSSQCVNLTTRTQLPPAYTNSFTRGVYYPDKVFRSSVLHSTQDLFLPFFSNVTWFHAIHVSGTNGTKRFDNPVLPFNDGVYFASTEKSNIIRGWIFGTTLDSKTQSLLIVNNATNVVIKVCEFQFCNDPFLGVYYHKNNKSWMESEFRVYSSANNCTFEYVSQPFLMDLEGKQGNFKNLREFVFKNIDGYFKIYSKHTPINLVRDLPQGFSALEPLVDLPIGINITRFQTLLALHRSYLTPGDSSSGWTAGAAAYYVGYLQPRTFLLKYNENGTITDAVDCALDPLSETKCTLKSFTVEKGIYQTSNFRVQPTESIVRFPNITNLCPFGEVFNATRFASVYAWNRKRISNCVADYSVLYNSASFSTFKCYGVSPTKLNDLCFTNVYADSFVIRGDEVRQIAPGQTGKIADYNYKLPDDFTGCVIAWNSNNLDSKVGGNYNYLYRLFRKSNLKPFERDISTEIYQAGSTPCNGVEGFNCYFPLQSYGFQPTNGVGYQPYRVVVLSFELLHAPATVCGPKKSTNLVKNKCVNFNFNGLTGTGVLTESNKKFLPFQQFGRDIADTTDAVRDPQTLEILDITPCSFGGVSVITPGTNTSNQVAVLYQDVNCTEVPVAIHADQLTPTWRVYSTGSNVFQTRAGCLIGAEHVNNSYECDIPIGAGICASYQTQTNSPRRARSVASQSIIAYTMSLGAENSVAYSNNSIAIPTNFTISVTTEILPVSMTKTSVDCTMYICGDSTECSNLLLQYGSFCTQLNRALTGIAVEQDKNTQEVFAQVKQIYKTPPIKDFGGFNFSQILPDPSKPSKRSFIEDLLFNKVTLADAGFIKQYGDCLGDIAARDLICAQKFNGLTVLPPLLTDEMIAQYTSALLAGTITSGWTFGAGAALQIPFAMQMAYRFNGCGVTQNVLYENQKLIANQFNSAIGKIQDSLSSTASALGKLQDVVNQNAQALNTLVKQLSSNFGAISSVLNDILSRLDKVEAEVQIDRLITGRLQSLQTYVTQQLIRAAEIRASANLAATKMSECVLGQSKRVDFCGKGCHLMSFPQSAPHGVVFLHVTYVPAQEKNFTTAPAICHDGKAHFPREGVFVSNGTHWFVTQRNFYEPQIITTDNTFVSGNCDVVIGIVNNTVYDPLQPELDSFKEELDKYFKNHTSPDVDLGDIPGINASVVNIQKEIDRLNEVAKNLNESLIDLQELGKYEQYIKGGGSGGGQIYEGKLTAEGLRFGIVASRFNHALVDRLVEGAIDAIVRHGGREEDITLVRVPGSWEIPVAAGELARKEDIDAVIAIGVLIRGATPHFDYIASEVSKGLADLSLELRKPITFGVITADTLEQAIERAGTKHGNKGWEAALSAIEMANLFKSLR

SEQ ID NO: 4274 - protein, 1371 aa, Artificial Sequence
  SARS-CoV-2/USA/WA-UW261/2020__EPI_ISL_418046 spike protein (1-1211)(I909C_Y1047C) LumSynth construct
MFVFLVLLPLVSSQCVNLTTRTQLPPAYTNSFTRGVYYPDKVFRSSVLHSTQDLFLPFFSNVTWFHAIHVSGTNGTKRFDNPVLPFNDGVYFASTEKSNIIRGWIFGTTLDSKTQSLLIVNNATNVVIKVCEFQFCNDPFLGVYYHKNNKSWMESEFRVYSSANNCTFEYVSQPFLMDLEGKQGNFKNLREFVFKNIDGYFKIYSKHTPINLVRDLPQGFSALEPLVDLPIGINITRFQTLLALHRSYLTPGDSSSGWTAGAAAYYVGYLQPRTFLLKYNENGTITDAVDCALDPLSETKCTLKSFTVEKGIYQTSNFRVQPTESIVRFPNITNLCPFGEVFNATRFTSVYAWNRKRISNCVADYSVLYNSASFSTFKCYGVSPTKLNDLCFTNVYADSFVIRGDEVRQIAPGQTGKIADYNYKLPDDFTGCVIAWNSNNLDSKVGGNYNYLYRLFRKSNLKPFERDISTEIYQAGSTPCNGVEGFNCYFPLQSYGFQPTNGVGYQPYRVVVLSFELLHAPATVCGPKKSTNLVKNKCVNFNFNGLTGTGVLTESNKKFLPFQQFGRDIADTTDAVRDPQTLEILDITPCSFGGVSVITPGTNTSNQVAVLYQDVNCTEVPVAIHADQLTPTWRVYSTGSNVFQTRAGCLIGAEHVNNSYECDIPIGAGICASYQTQTNSPRRARSVASQSIIAYTMSLGAENSVAYSNNSIAIPTNFTISVTTEILPVSMTKTSVDCTMYICGDSTECSNLLLQYGSFCTQLNRALTGIAVEQDKNTQEVFAQVKQIYKTPPIKDFGGFNFSQILPDPSKPSKRSFIEDLLFNKVTLADAGFIKQYGDCLGDIAARDLICAQKFNGLTVLPPLLTDEMIAQYTSALLAGTITSGWTFGAGAALQIPFAMQMAYRFNGCGVTQNVLYENQKLIANQFNSAIGKIQDSLSSTASALGKLQDVVNQNAQALNTLVKQLSSNFGAISSVLNDILSRLDKVEAEVQIDRLITGRLQSLQTYVTQQLIRAAEIRASANLAATKMSECVLGQSKRVDFCGKGCHLMSFPQSAPHGVVFLHVTYVPAQEKNFTTAPAICHDGKAHFPREGVFVSNGTHWFVTQRNFYEPQIITTDNTFVSGNCDVVIGIVNNTVYDPLQPELDSFKEELDKYFKNHTSPDVDLGDISGINASVVNIQKEIDRLNEVAKNLNESLIDLQELGKYEQYIKGGGSGGGQIYEGKLTAEGLRFGIVASRFNHALVDRLVEGAIDAIVRHGGREEDITLVRVPGSWEIPVAAGELARKEDIDAVIAIGVLIRGATPHFDYIASEVSKGLADLSLELRKPITFGVITADTLEQAIERAGTKHGNKGWEAALSAIEMANLFKSLR

SEQ ID NO: 4275 - protein, 1371 aa, Artificial Sequence
  SARS-CoV-2/Portugal/PT0035/2020__EPI_ISL_418020 spike protein (1-1211)(I909C_Y1047C) LumSynth construct
MFVFLVLLPLVSSQCVNLTTRTQLPPAYTNSFTRGVYYPDKVFRSSVLHSTQDLFLPFFSNVTWFHAIHVSGTNGTKRFDNPVLPFNDGVYFASTEKSNIIRGWIFGTTLDSKTQSLLIVNNATNVVIKVCEFQFCNDPFLGVYYHKNNKSWMESEFRVYSSANNCTFEYVSQPFLMDLEGKQGNFKNLREFVFKNIDGYFKIYSKHTPINLVRDLPQGFSALEPLVDLPIGINITRFQTLLALHRSYLTPGDSSSGWTAGAAAYYVGYLQPRTFLLKYNENGTITDAVDCALDPLSETKCTLKSFTVEKGIYQTSNFRVQPTESIVRFPNITNLCPFGEVFNATRFASVYAWNRKRISNCVADYSVLYNSASFSTFKCYGVSPTKLNDLCFTNVYADSFVIRGDEVRQIAPGQTGKIADYNYKLPDDFTGCVIAWNSNNLDSKVGGNYNYLYRLFRKSNLKPFERDISTEIYQAGSTPCNGVEGFNCYFPLQSYGFQPTNGVGYQPYRVVVLSFELLHAPATVCGPKKSTNLVKNKCVNFNFNGLTGTGVLTESNKKFLPFQQFGRDIADTTDAVRDPQTLEILDITPCSFGGVSVITPGTNTSNQVAVLYQDVNCTEVPVAIHADQLTPTWRVYSTGSNVFQTRAGCLIGAEHVNNSYECDIPIGAGICASYQTQTNSPRRARSVASQSIIAYTMSLGAENSVAYSNNSIAIPTNFTISVTTEILPVSMTKTSVDCTMYICGDSTECSNLLLQYGSFCTQLNRALTGIAVEQDKNTQEVFAQVKQIYKTPPIKDFGGFNFSQILPDPSKPSKRSFIEDLLFNKVTLADAGFIKQYGDCLGDISARDLICAQKFNGLTVLPPLLTDEMIAQYTSALLAGTITSGWTFGAGAALQIPFAMQMAYRFNGCGVTQNVLYENQKLIANQFNSAIGKIQDSLSSTASALGKLQDVVNQNAQALNTLVKQLSSNFGAISSVLNDILSRLDKVEAEVQIDRLITGRLQSLQTYVTQQLIRAAEIRASANLAATKMSECVLGQSKRVDFCGKGCHLMSFPQSAPHGVVFLHVTYVPAQEKNFTTAPAICHDGKAHFPREGVFVSNGTHWFVTQRNFYEPQIITTDNTFVSGNCDVVIGIVNNTVYDPLQPELDSFKEELDKYFKNHTSPDVDLGDISGINASVVNIQKEIDRLNEVAKNLNESLIDLQELGKYEQYIKGGGSGGGQIYEGKLTAEGLRFGIVASRFNHALVDRLVEGAIDAIVRHGGREEDITLVRVPGSWEIPVAAGELARKEDIDAVIAIGVLIRGATPHFDYIASEVSKGLADLSLELRKPITFGVITADTLEQAIERAGTKHGNKGWEAALSAIEMANLFKSLR

SEQ ID NO: 4276 - protein, 1371 aa, Artificial Sequence
  SARS-CoV-2/USA/NY-NYUMC7/2020__EPI_ISL_418192 spike protein (1-1211)(I909C_Y1047C) LumSynth construct
MFVFLVLLPLVSSQCVNLTTRTQLPPAYTNSFTRGVYYPDKVFRSSVLHSTQDLFLPFFSNVTWFHAIHVSGTNGTKRFDNPVLPFNDGVYFASTEKSNIIRGWIFGTTLDSKTQSLLIVNNATNVVIKVCEFQFCNDPFLGVYHHKNNKSWMESEFRVYSSANNCTFEYVSQPFLMDLEGKQGNFKNLREFVFKNIDGYFKIYSKHTPINLVRDLPQGFSALEPLVDLPIGINITRFQTLLALHRSYLTPGDSSSGWTAGAAAYYVGYLQPRTFLLKYNENGTITDAVDCALDPLSETKCTLKSFTVEKGIYQTSNFRVQPTESIVRFPNITNLCPFGEVFNATRFASVYAWNRKRISNCVADYSVLYNSASFSTFKCYGVSPTKLNDLCFTNVYADSFVIRGDEVRQIAPGQTGKIADYNYKLPDDFTGCVIAWNSNNLDSKVGGNYNYLYRLFRKSNLKPFERDISTEIYQAGSTPCNGVEGFNCYFPLQSYGFQPTNGVGYQPYRVVVLSFELLHAPATVCGPKKSTNLVKNKCVNFNFNGLTGTGVLTESNKKFLPFQQFGRDIADTTDAVRDPQTLEILDITPCSFGGVSVITPGTNTSNQVAVLYQGVNCTEVPVAIHADQLTPTWRVYSTGSNVFQTRAGCLIGAEHVNNSYECDIPIGAGICASYQTQTNSPRRARSVASQSIIAYTMSLGAENSVAYSNNSIAIPTNFTISVTTEILPVSMTKTSVDCTMYICGDSTECSNLLLQYGSFCTQLNRALTGIAVEQDKNTQEVFAQVKQIYKTPPIKDFGGFNFSQILPDPSKPSKRSFIEDLLFNKVTLADAGFIKQYGDCLGDIAARDLICAQKFNGLTVLPPLLTDEMIAQYTSALLAGTITSGWTFGAGAALQIPFAMQMAYRFNGCGVTQNVLYENQKLIANQFNSAIGKIQDSLSSTASALGKLQDVVNQNAQALNTLVKQLSSNFGAISSVLNDILSRLDKVEAEVQIDRLITGRLQSLQTYVTQQLIRAAEIRASANLAATKMSECVLGQSKRVDFCGKGCHLMSFPQSAPHGVVFLHVTYVPAQEKNFTTAPAICHDGKAHFPREGVFVSNGTHWFVTQRNFYEPQIITTDNTFVSGNCDVVIGIVNNTVYDPLQPELDSFKEELDKYFKNHTSPDVDLGDISGINASVVNIQKEIDRLNEVAKNLNESLIDLQELGKYEQYIKGGGSGGGQIYEGKLTAEGLRFGIVASRFNHALVDRLVEGAIDAIVRHGGREEDITLVRVPGSWEIPVAAGELARKEDIDAVIAIGVLIRGATPHFDYIASEVSKGLADLSLELRKPITFGVITADTLEQAIERAGTKHGNKGWEAALSAIEMANLFKSLR

SEQ ID NO: 4277 - protein, 1371 aa, Artificial Sequence
  SARS-CoV-2/Iceland/189/2020__EPI_ISL_417709 spike protein (1-1211)(I909C_Y1047C) LumSynth construct
MFVFLVLLPLVSSQCVNLTTRTQLPPAYTNSFTRGVYYPDKVFRSSVLHSTQDLFLPFFSNVTWFHAIHVSGTNGTKRFDNPVLPFNDGVYFASTEKSNIIRGWIFGTTLDSKTQSLLIVNNATNVVIKVCEFQFCNDPFLGVYYHKNNKSWMESEFRVYSSANNCTFEYVSQPFLMDLEGKQGNFKNLREFVFKNIDGYFKIYSKHTPINLVRDLPQGFSALEPLVDLPIGINITRFQTLLALHRSYLTPGDSSSGWTAGAAAYYVGYLQPRTFLLKYNENGTITDAVDCALDPLSETKCTLKSFTVEKGIYQTSNFRVQPTESIVRFPNITNLCPFGEVFNATRFASVYAWNRKRISNCVADYSVLYNSASFSTFKCYGVSPTKLNDLCFTNVYADSFVIRGDEVRQIAPGQTGKIADYNYKLPDDFTGCVIAWNSNNLDSKVGGNYNYLYRLFRKSNLKPFERDISTEIYQAGSTPCNGVEGFNCYFPLQSYGFQPTNGVGYQPYRVVVLSFELLHAPATVCGPKKSTNLVKNKCVNFNFNGLTGTGVLTESNKKFLPFQQFGRDIADTTDAVRDPQTLEILDITPCSFGGVSVITPGTNTSNQVAVLYQGVNCTEVPVAIHADQLTPTWRVYSTGSNVFQTRAGCLIGAEHVNNSYECDIPIGAGICASYQTQTNSPRRARSVASQSIIAYTMSLGAENSVAYSNNSIAIPTNFTISVTTEILPVSMTKTSVDCTMYICGDSTECSNLLLQYGSFCTQLNRALTGIAVEQDKNTQEVFAQVKQIYKTPPIKDFGGFNFSQILPDPSKPSKRSFIEDLLFNKVTLADAGFTKQYGDCLGDIAARDLICAQKFNGLTVLPPLLTDEMIAQYTSALLAGTITSGWTFGAGAALQIPFAMQMAYRFNGCGVTQNVLYENQKLIANQFNSAIGKIQDSLSSTASALGKLQDVVNQNAQALNTLVKQLSSNFGAISSVLNDILSRLDKVEAEVQIDRLITGRLQSLQTYVTQQLIRAAEIRASANLAATKMSECVLGQSKRVDFCGKGCHLMSFPQSAPHGVVFLHVTYVPAQEKNFTTAPAICHDGKAHFPREGVFVSNGTHWFVTQRNFYEPQIITTDNTFVSGNCDVVIGIVNNTVYDPLQPELDSFKEELDKYFKNHTSPDVDLGDISGINASVVNIQKEIDRLNEVAKNLNESLIDLQELGKYEQYIKGGGSGGGQIYEGKLTAEGLRFGIVASRFNHALVDRLVEGAIDAIVRHGGREEDITLVRVPGSWEIPVAAGELARKEDIDAVIAIGVLIRGATPHFDYIASEVSKGLADLSLELRKPITFGVITADTLEQAIERAGTKHGNKGWEAALSAIEMANLFKSLR

SEQ ID NO: 4278 - protein, 1371 aa, Artificial Sequence
  SARS-CoV-2/Australia/NSW56/2020__EPI_ISL_417408 spike protein (1-1211)(I909C_Y1047C) LumSynth construct
MFVFLVLLPLVSSQCVNLTTRTQLPPAYTNSFTRGVYYPDKVFRSSVLHSTQDLFLPFFSNVTWFHAIHVSGTNGTKRFDNPVLPFNDGVYFASTEKSNIIRGWIFGTTLDSKTQSLLIVNNATNVVIKVCEFQFCNDPFLGVYYHKNNKSWMESEFRVYSSANNCTFEYVSQPFLMDLEGKQGNFKNLREFVFKNIDGYFKIYSKHTPINLVRDLPQGFSALEPLVDLPIGINITRFQTLLALHRSYLTPGDSSSGWTAGAAAYYVGYLQPRTFLLKYNENGTITDAVDCALDPLSETKCTLKSFTVEKGIYQTSNFRVQPTESIVRFPNITNLCPFGEVFNATRFASVYAWNRKRISNCVADYSVLYNSASFSTFKCYGVSPTKLNDLCFTNVYADSFVIRGDEVRQIAPGQTGKIADYNYKLPDDFTGCVIAWNSNNLDSKVGGNYNYLYRLFRKSNLKPFERDISTEIYQAGSTPCNGVEGFNCYFPLQSYGFQPTNGVGYQPYRVVVLSFELLHAPATVCGPKKSTNLVKNKCVNFNFNGLTGTGVLTESNKKFLPFQQFGRDIADTTDAVRDPQTLEILDITPCSFGGVSVITPGTNTSNQVAVLYQDVNCTEVPVAIHADQLTPTWRVYSTGSNVFQTRAGCLIGAEHVNNSYECDIPIGAGICASYQTQTNSPRRARSVASQSIIAYTMSLGAENSVAYSNNSIAIPTNFTISVTTEILPVSMTKTSVDCTMYICGDSTECSNLLLQYGSFCTQLNRALTGIAVEQDKNTQEVFAQVKQIYKTPPIKDFGGFNFSQILPDSSKPSKRSFIEDLLFNKVTLADAGFIKQYGDCLGDIAARDLICAQKFNGLTVLPPLLTDEMIAQYTSALLAGTITSGWTFGAGAALQIPFAMQMAYRFNGCGVTQNVLYENQKLIANQFNSAIGKIQDSLSSTASALGKLQDVVNQNAQALNTLVKQLSSNFGAISSVLNDILSRLDKVEAEVQIDRLITGRLQSLQTYVTQQLIRAAEIRASANLAATKMSECVLGQSKRVDFCGKGCHLMSFPQSAPHGVVFLHVTYVPAQEKNFTTAPAICHDGKAHFPREGVFVSNGTHWFVTQRNFYEPQIITTDNTFVSGNCDVVIGIVNNTVYDPLQPELDSFKEELDKYFKNHTSPDVDLGDISGINASVVNIQKEIDRLNEVAKNLNESLIDLQELGKYEQYIKGGGSGGGQIYEGKLTAEGLRFGIVASRFNHALVDRLVEGAIDAIVRHGGREEDITLVRVPGSWEIPVAAGELARKEDIDAVIAIGVLIRGATPHFDYIASEVSKGLADLSLELRKPITFGVITADTLEQAIERAGTKHGNKGWEAALSAIEMANLFKSLR

SEQ ID NO: 4279 - protein, 1371 aa, Artificial Sequence
  SARS-CoV-2/Iceland/280/2020__EPI_ISL_417608 spike protein (1-1211)(I909C_Y1047C) LumSynth construct
MFVFLVLLPLVSSQCVNLTTRTQLPPAYTNSFTRGVYYPDKVFRSSVLHSTQDLFLPFFSNVTWFHAIHVSGTNGTKRFDNPVLPFNDGVYFASTEKSNIIRGWIFGTTLDSKTQSLLIVNNATNVVIKVCEFQFCNDPFLGVYYHKNNKSWMESEFRVYSSANNCTFEYVSQPFLMDLEGKQGNFKNLREFVFKNIDGYFKIYSKHTPINLVRDLPQGFSALEPLVDLPIGINITRFQTLLALHRSYLTPGDSSSGWTAGAAAYYVGYLQPRTFLLKYNENGTITDAVDCALDPLSETKCTLKSFTVEKGIYQTSNFRVQPTESIVRFPNITNLCPFGEVFNATRFASVYAWNRKRISNCVADYSVLYNSASFSTFKCYGVSPTKLNDLCFTNVYADSFVIRGDEVRQIAPGQTGKIADYNYKLPDDFTGCVIAWNSNNLDSKVGGNYNYLYRLFRKSNLKPFERDISTEIYQAGSTPCNGVEGFNCYFPLQSYGFQPTNGVGYQPYRVVVLSFELLHAPATVCGPKKSTNLVKNKCVNFNFNGLTGTGVLTESNKKFLPFQQFGRDIADTTDAVRDPQTLEILDITPCSFGGVSVITPGTNTSNQVAVLYQGVNCTEVPVAIHADQLTPTWRVYSTGSNVFQTRAGCLIGAEHVNNSYECDIPIGAGICASYHTQTNSPRRARSVASQSIIAYTMSLGAENSVAYSNNSIAIPTNFTISVTTEILPVSMTKTSVDCTMYICGDSTECSNLLLQYGSFCTQLNRALTGIAVEQDKNTQEVFAQVKQIYKTPPIKDFGGFNFSQILPDPSKPSKRSFIEDLLFNKVTLADAGFIKQYGDCLGDIAARDLICAQKFNGLTVLPPLLTDEMIAQYTSALLAGTITSGWTFGAGAALQIPFAMQMAYRFNGCGVTQNVLYENQKLIANQFNSAIGKIQDSLSSTASALGKLQDVVNQNAQALNTLVKQLSSNFGAISSVLNDILSRLDKVEAEVQIDRLITGRLQSLQTYVTQQLIRAAEIRASANLAATKMSECVLGQSKRVDFCGKGCHLMSFPQSAPHGVVFLHVTYVPAQEKNFTTAPAICHDGKAHFPREGVFVSNGTHWFVTQRNFYEPQIITTDNTFVSGNCDVVIGIVNNTVYDPLQPELDSFKEELDKYFKNHTSPDVDLGDISGINASVVNIQKEIDRLNEVAKNLNESLIDLQELGKYEQYIKGGGSGGGQIYEGKLTAEGLRFGIVASRFNHALVDRLVEGAIDAIVRHGGREEDITLVRVPGSWEIPVAAGELARKEDIDAVIAIGVLIRGATPHFDYIASEVSKGLADLSLELRKPITFGVITADTLEQAIERAGTKHGNKGWEAALSAIEMANLFKSLR

SEQ ID NO: 4280 - protein, 1371 aa, Artificial Sequence; identical to SEQ ID NO: 4235
  SARS-CoV-2/Iceland/247/2020__EPI_ISL_417575 spike protein (1-1211)(I909C_Y1047C) LumSynth construct

SEQ ID NO: 4281 - protein, 1371 aa, Artificial Sequence
  SARS-CoV-2/Iceland/238/2020__EPI_ISL_417566 spike protein (1-1211)(I909C_Y1047C) LumSynth construct
MFVFLVLLPLVSSQCVNLTTRTQLPPAYTNSFTRGVYYPDKVFRSSVLHSTQDLFLPFFSNVTWFHAIHVSGTNGTKRFDNPVLPFNDGVYFASTEKSNIIRGWIFGTTLDSKTQSLLIVNNATNVVIKVCEFQFCNDPFLGVYYHKNNKSWMESEFRVYSSANNCTFEYVSQPFLMDLEGKQGNFKNLREFVFKNIDGYFKIYSKHTPINLVRDLPQGFSALEPLVDLPIGINITRFQTLLALHRSYLTPGDSSSGWTAGAAAYYVGYLQPRTFLLKYNENGTITDAVDCALDPLSETKCTLKSFTVEKGIYQTSNFRVQPTESIVRFPNITNLCPFGEVFNATRFASVYAWNRKRISNCVADYSVLYNSASFSTFKCYGVSPTKLNDLCFTNVYADSFVIRGDEVRQIAPGQTGKIADYNYKLPDDFTGCVIAWNSNNLDSKVGGNYNYLYRLFRKSNLKPFERDISTEIYQAGSTPCNGVEGFNCYFPLQSYGFQPTNGVGYQPYRVVVLSFELLHAPATVCGPKKSTNLVKNKCVNFNFNGLTGTGVLTESNKKFLPFQQFGRDIADTTDAVRDPQTLEILDITPCSFGGVSVITPGTNTSNQVAVLYQGVNCTEVPVAIHADQLTPTWRVYSTGSNVFQTRAGCLIGAEHVNNSYECDIPIGAGICASYQTQTNSPRRARSVASQSIIAYTMSLGAENSVAYSNNSIAIPTNFTISVTTEILPVSMTKTSVDCTMYICGDSTECSNLLLQYGSFCTQLNRALTGIAVEQDKNTQEVFAQVKQIYKTPPIKDFGGFNFSQILPDPSKPSKRSFIEDLLFNKVTLADVGFIKQYGDCLGDIAARDLICAQKFNGLTVLPPLLTDEMIAQYTSALLAGTITSGWTFGAGAALQIPFAMQMAYRFNGCGVTQNVLYENQKLIANQFNSAIGKIQDSLSSTASALGKLQDVVNQNAQALNTLVKQLSSNFGAISSVLNDILSRLDKVEAEVQIDRLITGRLQSLQTYVTQQLIRAAEIRASANLAATKMSECVLGQSKRVDFCGKGCHLMSFPQSAPHGVVFLHVTYVPAQEKNFTTAPAICHDGKAHFPREGVFVSNGTHWFVTQRNFYEPQIITTDNTFVSGNCDVVIGIVNNTVYDPLQPELDSFKEELDKYFKNHTSPDVDLGDISGINASVVNIQKEIDRLNEVAKNLNESLIDLQELGKYEQYIKGGGSGGGQIYEGKLTAEGLRFGIVASRFNHALVDRLVEGAIDAIVRHGGREEDITLVRVPGSWEIPVAAGELARKEDIDAVIAIGVLIRGATPHFDYIASEVSKGLADLSLELRKPITFGVITADTLEQAIERAGTKHGNKGWEAALSAIEMANLFKSLR

SEQ ID NO: 4282 - protein, 1371 aa, Artificial Sequence
  SARS-CoV-2/Greece/16/2020__EPI_ISL_418265 spike protein (1-1211)(I909C_Y1047C) LumSynth construct
MFVFLVLLPLVSSQCVNLTTRTQLPPAYTNSFTRGVYYPDKVFRSSVLHSTQDLFLPFFSNVTWFHAIHVSGTNGTKRFDNPVLPFNDGVYFASTEKSNIIRGWIFGTTLDSKTQSLLIVNNATNVVIKVCEFQFCNDPFLGVYYHKNNKSWMESEFRVYSSANNCTFEYVSQPFLMDLEGKQGNFKNLREFVFKNVDGYFKIYSKHTPINLVRDLPQGFSALEPLVDLPIGINITRFQTLLALHRSYLTPGDSSSGWTAGAAAYYVGYLQPRTFLLKYNENGTITDAVDCALDPLSETKCTLKSFTVEKGIYQTSNFRVQPTESIVRFPNITNLCPFGEVFNATRFASVYAWNRKRISNCVADYSVLYNSASFSTFKCYGVSPTKLNDLCFTNVYADSFVIRGDEVRQIAPGQTGKIADYNYKLPDDFTGCVIAWNSNNLDSKVGGNYNYLYRLFRKSNLKPFERDISTEIYQAGSTPCNGVEGFNCYFPLQSYGFQPTNGVGYQPYRVVVLSFELLHAPATVCGPKKSTNLVKNKCVNFNFNGLTGTGVLTESNKKFLPFQQFGRDIADTTDAVRDPQTLEILDITPCSFGGVSVITPGTNTSNQVAVLYQDVNCTEVPVAIHADQLTPTWRVYSTGSNVFQTRAGCLIGAEHVNNSYECDIPIGAGICASYQTQTNSPRRARSVASQSIIAYTMSLGAENSVAYSNNSIAIPTNFTISVTTEILPVSMTKTSVDCTMYICGDSTECSNLLLQYGSFCTQLNRALTGIAVEQDKNTQEVFAQVKQIYKTPPIKDFGGFNFSQILPDPSKPSKRSFIEDLLFNKVTLADAGFIKQYGDCLGDIAARDLICAQKFNGLTVLPPLLTDEMIAQYTSALLAGTITSGWTFGAGAALQIPFAMQMAYRFNGCGVTQNVLYENQKLIANQFNSAIGKIQDSLSSTASALGKLQDVVNQNAQALNTLVKQLSSNFGAISSVLNDILSRLDKVEAEVQIDRLITGRLQSLQTYVTQQLIRAAEIRASANLAATKMSECVLGQSKRVDFCGKGCHLMSFPQSAPHGVVFLHVTYVPAQEKNFTTAPAICHDGKAHFPREGVFVSNGTHWFVTQRNFYEPQIITTDNTFVSGNCDVVIGIVNNTVYDPLQPELDSFKEELDKYFKNHTSPDVDLGDISGINASVVNIQKEIDRLNEVAKNLNESLIDLQELGKYEQYIKGGGSGGGQIYEGKLTAEGLRFGIVASRFNHALVDRLVEGAIDAIVRHGGREEDITLVRVPGSWEIPVAAGELARKEDIDAVIAIGVLIRGATPHFDYIASEVSKGLADLSLELRKPITFGVITADTLEQAIERAGTKHGNKGWEAALSAIEMANLFKSLR

SEQ ID NO: 4283 - protein, 1371 aa, Artificial Sequence
  SARS-CoV-2/Iceland/319/2020__EPI_ISL_417648 spike protein (1-1211)(I909C_Y1047C) LumSynth construct
MFVFLVLLPLVSSQCVNLTTRTQLPPAYTNSFTRGVYYPDKVFRSSVLHSTQDLFLPFFSNVTWFHAIHVSGTNGTKRFDNPVLPFNDGVYFASTEKSNIIRGWIFGTTLDSKTQSLLIVNNATNVVIKVCEFQFCNDPFLGVYYHKNNKSWMESEFRVYSSANNCTFEYVSQPFLIDLEGKQGNFKNLREFVFKNIDGYFKIYSKHTPINLVRDLPQGFSALEPLVDLPIGINITRFQTLLALHRSYLTPGDSSSGWTAGAAAYYVGYLQPRTFLLKYNENGTITDAVDCALDPLSETKCTLKSFTVEKGIYQTSNFRVQPTESIVRFPNITNLCPFGEVFNATRFASVYAWNRKRISNCVADYSVLYNSASFSTFKCYGVSPTKLNDLCFTNVYADSFVIRGDEVRQIAPGQTGKIADYNYKLPDDFTGCVIAWNSNNLDSKVGGNYNYLYRLFRKSNLKPFERDISTEIYQAGSTPCNGVEGFNCYFPLQSYGFQPTNGVGYQPYRVVVLSFELLHAPATVCGPKKSTNLVKNKCVNFNFNGLTGTGVLTESNKKFLPFQQFGRDIADTTDAVRDPQTLEILDITPCSFGGVSVITPGTNTSNQVAVLYQGVNCTEVPVAIHADQLTPTWRVYSTGSNVFQTRAGCLIGAEHVNNSYECDIPIGAGICASYQTQTNSPRRARSVASQSIIAYTMSLGAENSVAYSNNSIAIPTNFTISVTTEILPVSMTKTSVDCTMYICGDSTECSNLLLQYGSFCTQLNRALTGIAVEQDKNTQEVFAQVKQIYKTPPIKDFGGFNFSQILPDPSKPSKRSFIEDLLFNKVTLADAGFIKQYGDCLGDIAARDLICAQKFNGLTVLPPLLTDEMIAQYTSALLAGTITSGWTFGAGAALQIPFAMQMAYRFNGCGVTQNVLYENQKLIANQFNSAIGKIQDSLSSTASALGKLQDVVNQNAQALNTLVKQLSSNFGAISSVLNDILSRLDKVEAEVQIDRLITGRLQSLQTYVTQQLIRAAEIRASANLAATKMSECVLGQSKRVDFCGKGCHLMSFPQSAPHGVVFLHVTYVPAQEKNFTTAPAICHDGKAHFPREGVFVSNGTHWFVTQRNFYEPQIITTDNTFVSGNCDVVIGIVNNTVYDPLQPELDSFKEELDKYFKNHTSPDVDLGDISGINASVVNIQKEIDRLNEVAKNLNESLIDLQELGKYEQYIKGGGSGGGQIYEGKLTAEGLRFGIVASRFNHALVDRLVEGAIDAIVRHGGREEDITLVRVPGSWEIPVAAGELARKEDIDAVIAIGVLIRGATPHFDYIASEVSKGLADLSLELRKPITFGVITADTLEQAIERAGTKHGNKGWEAALSAIEMANLFKSLR

SEQ ID NO: 4284 - protein, 1371 aa, Artificial Sequence
  SARS-CoV-2/Congo/94/2020__EPI_ISL_417947 spike protein (1-1211)(I909C_Y1047C) LumSynth construct
MFVFLVLLPLVSSQCVNLTTRTQLPPAYTNSFTRGVYYPDKVFRSSVLHSTQDLFLPFFSNVTWFHAIHVSGTNGTKRFDNPVLPFNDGVYFASTEKSNIIRGWIFGTTLDSKTQSLLIVNNATNVVIKVCEFQFCNDPFLGVYYHKNNKSWMESEFRVYSSANNCTFEYVSQPFLMDLEGKQGNFKNLREFVFKNIDGYFKIYSKHTPINLVRDLPQGFSALEPLVDLPIGINITRFQTLLALHRSYLTPGDSSSGWTAGAAAYYVGYLQPRTFLLKYNENGTITDAVDCALDPLSETKCTLKSFTVEKGIYQTSNFRVQPTESIVRFPNITNLCPFGEVFNATRFASVYAWNRKRISNCVADYSVLYNSASFSTFKCYGVSPTKLNDLCFTNVYADSFVIRGDEVRQIAPGQTGKIADYNYKLPDDFTGCVIAWNSNNLDSKVGGNYNYLYRLFRKSNLKPFERDISTEIYQAGSTPCNGVEGFNCYFPLQSYGFQPTNGVGYQPYRVVVLSFELLHAPATVCGPKKSTNLVKNKCVNFNFNGLTGTGVLTESNKKFLPFQQFGRDIADTTDAVRDPQTLEILDITPCSFGGVSVITPGTNTSNQVAVLYQGVNCTEVPVAIHADQLTPTWRVYSTGSNVFQTRAGCLIGAEHVNNSYECDIPIGAGICASYQTQTNSPRRARSVASQSIIAYTMSLGAENSVAYSNNSIAIPTNFTISVTTEILPVSMTKTSVDCTMYICGDSTECSNLLLQYGSFCTQLNRALTGIAVEQDKNTQEVFAQVKQIYKTPPIKDFGGFNFSQILPDPSKPSKRSFIEDILFNKVTLADAGFIKQYGDCLGDIAARDLICAQKFNGLTVLPPLLTDEMIAQYTSALLAGTITSGWTFGAGAALQIPFAMQMAYRFNGCGVTQNVLYENQKLIANQFNSAIGKIQDSLSSTASALGKLQDVVNQNAQALNTLVKQLSSNFGAISSVLNDILSRLDKVEAEVQIDRLITGRLQSLQTYVTQQLIRAAEIRASANLAATKMSECVLGQSKRVDFCGKGCHLMSFPQSAPHGVVFLHVTYVPAQEKNFTTAPAICHDGKAHFPREGVFVSNGTHWFVTQRNFYEPQIITTDNTFVSGNCDVVIGIVNNTVYDPLQPELDSFKEELDKYFKNHTSPDVDLGDISGINASVVNIQKEIDRLNEVAKNLNESLIDLQELGKYEQYIKGGGSGGGQIYEGKLTAEGLRFGIVASRFNHALVDRLVEGAIDAIVRHGGREEDITLVRVPGSWEIPVAAGELARKEDIDAVIAIGVLIRGATPHFDYIASEVSKGLADLSLELRKPITFGVITADTLEQAIERAGTKHGNKGWEAALSAIEMANLFKSLR

SEQ ID NO: 4285 - protein, 1371 aa, Artificial Sequence
  SARS-CoV-2/Congo/158/2020__EPI_ISL_417950 spike protein (1-1211)(I909C_Y1047C) LumSynth construct
MFVFLVLLPLVSSQCVNLTTRTQLPPAYTNSFTRGVYYPDKVFRSSVLHSTQDLFLPFFSNVTWFHAIHVSGTNGTKRFDNPVLPFNDGVYFASTEKSNIIRGWIFGTTLDSKTQSLLIVNNATNVVIKVCEFQFCNDPFLGVYYHKNNKSWMESEFRVYSSANNCTFEYVSQPFLMDLEGKQGNFKNLREFVFKNIDGYFKIYSKHTPINLVRDLPQGFSALEPLVDLPIGINITRFQTLLALHRSYLTPGDSSSGWTAGAAAYYVGYLQPRTFLLKYNENGTITDAVDCALDPLSETKCTLKSFTVEKGIYQTSNFRVQPTESIVRFPNITNLCPFGEVFNATRFASVYAWNRKRISNCVADYSVLYNSASFSTFKCYGVSPTKLNDLCFTNVYADSFVIRGDEVRQIAPGQTGKIADYNYKLPDDFTGCVIAWNSNNLDSKVGGNYNYLYRLFRKSNLKPFERDISTEIYQAGSTPCNGVEGFNCYFPLQSYGFQPTNGVGYQPYRVVVLSFELLHAPATVCGPKKSTNLVKNKCVNFNFNGLTGTGVLTESNKKFLPFQQFGRDIADTTDAVRDPQTLEILDITPCSFGGVSVITPGTNTSNQVAVLYQDVNCTEVPVAIHADQLTPTWRVYSTGSNVFQTRAGCLIGAEHVNNSYECDIPIGAGICASYQTQTNSPRRARSVASQSIIAYTMSLGAENSVAYSNNSIAIPTNFTISVTTEILPVSMTKTSVDCTMYICGDSTECSNLLLQYGSFCTQLNRALTGIAVEQDKNTQEVFAQVKQIYKTPPIKDFGGFNFSQILPDPSKPSKRSFIEDLLFNKVTLADAGFIKQYGDCLGDIAARDLICAQKFNGLTVLPPLLTDEMIAQYTSALLAGTITSGWTFGAGAALQIPFAMQMAYRFNGCGVTQNVLYENQKLIANQFNSAIGKIQDSLSSTASALGKLQDVVNQNAQALNTLVKQLSSNFGAISSVLNDILSRLDKVEAEVQIDRLITGRLQSLQTYVTQQLIRAAEIRASANLAATKMSECVLGQSKRVDFCGKGCHLMSFPQSAPHGVVFLHVTYVPAQEKNFTTAPAICHDGKAHFPREGVFVSNGTHWFVTQRNFYEPQIITTDNTFLSGNCDVVIGIVNNTVYDPLQPELDSFKEELDKYFKNHTSPDVDLGDISGINASVVNIQKEIDRLNEVAKNLNESLIDLQELGKYEQYIKGGGSGGGQIYEGKLTAEGLRFGIVASRFNHALVDRLVEGAIDAIVRHGGREEDITLVRVPGSWEIPVAAGELARKEDIDAVIAIGVLIRGATPHFDYIASEVSKGLADLSLELRKPITFGVITADTLEQAIERAGTKHGNKGWEAALSAIEMANLFKSLR

SEQ ID NO: 4286 - protein, 1371 aa, Artificial Sequence
  SARS-CoV-2/USA/UT-00034/2020__EPI_ISL_417977 spike protein (1-1211)(I909C_Y1047C) LumSynth construct
MFVFLVLLPLVSSQCVNLTTRTQLPPAYTNSFTRGVYYPDKVFRSSVLHSTQDLFLPFFSNVTWFHAIHVSGTNGTKRFDNPVLPFNDGVYFASTEKSNIIRGWIFGTTLDSKTQSLLIVNNATNVVIKVCEFQFCNDPFLGVYYYKNNKSWMESEFRVYSSANNCTFEYVSQPFLMDLEGKQGNFKNLREFVFKNIDGYFKIYSKHTPINLVRDLPQGFSALEPLVDLPIGINITRFQTLLALHRSYLTPGDSSSGWTAGAAAYYVGYLQPRTFLLKYNENGTITDAVDCALDPLSETKCTLKSFTVEKGIYQTSNFRVQPTESIVRFPNITNLCPFGEVFNATRFASVYAWNRKRISNCVADYSVLYNSASFSTFKCYGVSPTKLNDLCFTNVYADSFVIRGDEVRQIAPGQTGKIADYNYKLPDDFTGCVIAWNSNNLDSKVGGNYNYLYRLFRKSNLKPFERDISTEIYQAGSTPCNGVEGFNCYFPLQSYGFQPTNGVGYQPYRVVVLSFELLHAPATVCGPKKSTNLVKNKCVNFNFNGLTGTGVLTESNKKFLPFQQFGRDIADTTDAVRDPQTLEILDITPCSFGGVSVITPGTNTSNQVAVLYQGVNCTEVPVAIHADQLTPTWRVYSTGSNVFQTRAGCLIGAEHVNNSYECDIPIGAGICASYQTQTNSPRRARSVASQSIIAYTMSLGAENSVAYSNNSIAIPTNFTISVTTEILPVSMTKTSVDCTMYICGDSTECSNLLLQYGSFCTQLNRALTGIAVEQDKNTQEVFAQVKQIYKTPPIKDFGGFNFSQILPDPSKPSKRSFIEDLLFNKVTLADAGFIKQYGDCLGDIAARDLICAQKFNGLTVLPPLLTDEMIAQYTSALLAGTITSGWTFGAGAALQIPFAMQMAYRFNGCGVTQNVLYENQKLIANQFNSAIGKIQDSLSSTASALGKLQDVVNQNAQALNTLVKQLSSNFGAISSVLNDILSRLDKVEAEVQIDRLITGRLQSLQTYVTQQLIRAAEIRASANLAATKMSECVLGQSKRVDFCGKGCHLMSFPQSAPHGVVFLHVTYVPAQEKNFTTAPAICHDGKAHFPREGVFVSNGTHWFVTQRNFYEPQIITTDNTFVSGNCDVVIGIVNNTVYDPLQPELDSFKEELDKYFKNHTSPDVDLGDISGINASVVNIQKEIDRLNEVAKNLNESLIDLQELGKYEQYIKGGGSGGGQIYEGKLTAEGLRFGIVASRFNHALVDRLVEGAIDAIVRHGGREEDITLVRVPGSWEIPVAAGELARKEDIDAVIAIGVLIRGATPHFDYIASEVSKGLADLSLELRKPITFGVITADTLEQAIERAGTKHGNKGWEAALSAIEMANLFKSLR

SEQ ID NO: 4287 - protein, 1371 aa, Artificial Sequence
  SARS-CoV-2/USA/UT-00033/2020__EPI_ISL_417976 spike protein (1-1211)(I909C_Y1047C) LumSynth construct
MFVFLVLLPLVSSQCVNLTTRTQLPPAYTNSFTRGVYYPDKVFRSSVLHSTQDLFLPFFSNVTWFHAIHVSGTNGTKRFDNPVLPFNDGVYFASTEKSNIIRGWIFGTTLDSKTQSLLIVNNATNVVIKVCEFQFCNDPFLGVYYHKNNKSWMESEFRVYSSANNCTFEYVSQPFLMDLEGKQGNFKNLREFVFKNIDGYFKIYSKHTPINLVRDLPQGFSALEPLVDLPIGINITRFQTLLALHRSYLTPGDSSSGLTAGAAAYYVGYLQPRTFLLKYNENGTITDAVDCALDPLSETKCTLKSFTVEKGIYQTSNFRVQPTESIVRFPNITNLCPFGEVFNATRFASVYAWNRKRISNCVADYSVLYNSASFSTFKCYGVSPTKLNDLCFTNVYADSFVIRGDEVRQIAPGQTGKIADYNYKLPDDFTGCVIAWNSNNLDSKVGGNYNYLYRLFRKSNLKPFERDISTEIYQAGSTPCNGVEGFNCYFPLQSYGFQPTNGVGYQPYRVVVLSFELLHAPATVCGPKKSTNLVKNKCVNFNFNGLTGTGVLTESNKKFLPFQQFGRDIADTTDAVRDPQTLEILDITPCSFGGVSVITPGTNTSNQVAVLYQGVNCTEVPVAIHADQLTPTWRVYSTGSNVFQTRAGCLIGAEHVNNSYECDIPIGAGICASYQTQTNSPRRARSVASQSIIAYTMSLGAENSVAYSNNSIAIPTNFTISVTTEILPVSMTKTSVDCTMYICGDSTECSNLLLQYGSFCTQLNRALTGIAVEQDKNTQEVFAQVKQIYKTPPIKDFGGFNFSQILPDPSKPSKRSFIEDLLFNKVTLADAGFIKQYGDCLGDIAARDLICAQKFNGLTVLPPLLTDEMIAQYTSALLAGTITSGWTFGAGAALQIPFAMQMAYRFNGCGVTQNVLYENQKLIANQFNSAIGKIQDSLSSTASALGKLQDVVNQNAQALNTLVKQLSSNFGAISSVLNDILSRLDKVEAEVQIDRLITGRLQSLQTYVTQQLIRAAEIRASANLAATKMSECVLGQSKRVDFCGKGCHLMSFPQSAPHGVVFLHVTYVPAQEKNFTTAPAICHDGKAHFPREGVFVSNGTHWFVTQRNFYEPQIITTDNTFVSGNCDVVIGIVNNTVYDPLQPELDSFKEELDKYFKNHTSPDVDLGDISGINASVVNIQKEIDRLNEVAKNLNESLIDLQELGKYEQYIKGGGSGGGQIYEGKLTAEGLRFGIVASRFNHALVDRLVEGAIDAIVRHGGREEDITLVRVPGSWEIPVAAGELARKEDIDAVIAIGVLIRGATPHFDYIASEVSKGLADLSLELRKPITFGVITADTLEQAIERAGTKHGNKGWEAALSAIEMANLFKSLR

SEQ ID NO: 4288 - protein, 1371 aa, Artificial Sequence
  SARS-CoV-2/USA/WI-13/2020__EPI_ISL_417516 spike protein (1-1211)(I909C_Y1047C) LumSynth construct
MFVFLVLLPLVSSQCVNLTTRTQLPPAYTNSFTRGVYYPDKVFRSSVLHSTQDLFLPFFSNVTWFHAIHVSGTNGTKRFDNPVLPFNDGVYFASTEKSNIIRGWIFGTTLDSKTQSLLIVNNATNVVIKVCEFQFCNDPFLGVYYHKNNKSWMESEFRVYSSANNCTFEYVSQPFLMDLEGKQGNFKNLREFVFKNIDGYFKIYSKHTPINLVRDLPQGFSALEPLVDLPIGINITRFQTLLALHRSYLTPGDSSSGWTAGAAAYYVGYLQPRTFLLKYNENGTITDAVDCALDPLSETKCTLKSFTVEKGIYQTSNFRVLPTESIVRFPNITNLCPFGEVFNATRFASVYAWNRKRISNCVADYSVLYNSASFSTFKCYGVSPTKLNDLCFTNVYADSFVIRGDEVRQIAPGQTGKIADYNYKLPDDFTGCVIAWNSNNLDSKVGGNYNYLYRLFRKSNLKPFERDISTEIYQAGSTPCNGVEGFNCYFPLQSYGFQPTNGVGYQPYRVVVLSFELLHAPATVCGPKKSTNLVKNKCVNFNFNGLTGTGVLTESNKKFLPFQQFGRDIADTTDAVRDPQTLEILDITPCSFGGVSVITPGTNTSNQVAVLYQGVNCTEVPVAIHADQLTPTWRVYSTGSNVFQTRAGCLIGAEHVNNSYECDIPIGAGICASYQTQTNSPRRARSVASQSIIAYTMSLGAENSVAYSNNSIAIPTNFTISVTTEILPVSMTKTSVDCTMYICGDSTECSNLLLQYGSFCTQLNRALTGIAVEQDKNTQEVFAQVKQIYKTPPIKDFGGFNFSQILPDPSKPSKRSFIEDLLFNKVTLADAGFIKQYGDCLGDIAARDLICAQKFNGLTVLPPLLTDEMIAQYTSALLAGTITSGWTFGAGAALQIPFAMQMAYRFNGCGVTQNVLYENQKLIANQFNSAIGKIQDSLSSTASALGKLQDVVNQNAQALNTLVKQLSSNFGAISSVLNDILSRLDKVEAEVQIDRLITGRLQSLQTYVTQQLIRAAEIRASANLAATKMSECVLGQSKRVDFCGKGCHLMSFPQSAPHGVVFLHVTYVPAQEKNFTTAPAICHDGKAHFPREGVFVSNGTHWFVTQRNFYEPQIITTDNTFVSGNCDVVIGIVNNTVYDPLQPELDSFKEELDKYFKNHTSPDVDLGDISGINASVVNIQKEIDRLNEVAKNLNESLIDLQELGKYEQYIKGGGSGGGQIYEGKLTAEGLRFGIVASRFNHALVDRLVEGAIDAIVRHGGREEDITLVRVPGSWEIPVAAGELARKEDIDAVIAIGVLIRGATPHFDYIASEVSKGLADLSLELRKPITFGVITADTLEQAIERAGTKHGNKGWEAALSAIEMANLFKSLR

SEQ ID NO: 4289 - protein, 1370 aa, Artificial Sequence
  SARS-CoV-2/India/1-27/2020__EPI_ISL_413522 spike protein (1-1210)(I908C_Y1046C) LumSynth construct
MFVFLVLLPLVSSQCVNLTTRTQLPPAYTNSFTRGVYYPDKVFRSSVLHSTQDLFLPFFSNVTWFHAIHVSGTNGTKRFDNPVLPFNDGVYFASTEKSNIIRGWIFGTTLDSKTQSLLIVNNATNVVIKVCEFQFCNDPFLGVYHKNNKSWMESEFRVYSSANNCTFEYVSQPFLMDLEGKQGNFKNLREFVFKNIDGYFKIYSKHTPINLVRDLPQGFSALEPLVDLPIGINITRFQTLLALHRSYLTPGDSSSGWTAGAAAYYVGYLQPRTFLLKYNENGTITDAVDCALDPLSETKCTLKSFTVEKGIYQTSNFRVQPTESIVRFPNITNLCPFGEVFNATRFASVYAWNRKRISNCVADYSVLYNSASFSTFKCYGVSPTKLNDLCFTNVYADSFVIRGDEVIQIAPGQTGKIADYNYKLPDDFTGCVIAWNSNNLDSKVGGNYNYLYRLFRKSNLKPFERDISTEIYQAGSTPCNGVEGFNCYFPLQSYGFQPTNGVGYQPYRVVVLSFELLHAPATVCGPKKSTNLVKNKCVNFNFNGLTGTGVLTESNKKFLPFQQFGRDIADTTDAVRDPQTLEILDITPCSFGGVSVITPGTNTSNQVAVLYQDVNCTEVPVAIHADQLTPTWRVYSTGSNVFQTRAGCLIGAEHVNNSYECDIPIGAGICASYQTQTNSPRRARSVASQSIIAYTMSLGAENSVAYSNNSIAIPTNFTISVTTEILPVSMTKTSVDCTMYICGDSTECSNLLLQYGSFCTQLNRALTGIAVEQDKNTQEVFAQVKQIYKTPPIKDFGGFNFSQILPDPSKPSKRSFIEDLLFNKVTLADAGFIKQYGDCLGDIAARDLICAQKFNGLTVLPPLLTDEMIAQYTSALLAGTITSGWTFGAGAALQIPFAMQMAYRFNGCGVTQNVLYENQKLIANQFNSAIGKIQDSLSSTASALGKLQDVVNQNAQALNTLVKQLSSNFGAISSVLNDILSRLDKVEAEVQIDRLITGRLQSLQTYVTQQLIRAAEIRASANLAATKMSECVLGQSKRVDFCGKGCHLMSFPQSAPHGVVFLHVTYVPAQEKNFTTAPAICHDGKAHFPREGVFVSNGTHWFVTQRNFYEPQIITTDNTFVSGNCDVVIGIVNNTVYDPLQPELDSFKEELDKYFKNHTSPDVDLGDISGINASVVNIQKEIDRLNEVAKNLNESLIDLQELGKYEQYIKGGGSGGGQIYEGKLTAEGLRFGIVASRFNHALVDRLVEGAIDAIVRHGGREEDITLVRVPGSWEIPVAAGELARKEDIDAVIAIGVLIRGATPHFDYIASEVSKGLADLSLELRKPITFGVITADTLEQAIERAGTKHGNKGWEAALSAIEMANLFKSLR

SEQ ID NO: 4290 - protein, 1365 aa, Artificial Sequence
  SARS-CoV-2/pangolin/Guangxi/P4L/2017__EPI_ISL_410538 spike protein (1-1205)(I903C_Y1041C) LumSynth construct
MFVFLFVLPLVSSQCVNLTTRTGIPPGYTNSSTRGVYYPDKVFRSSILHLTQDLFLPFFSNVTWFNTINYQGGFKKFDNPVLPFNDGVYFASTEKSNIIRGWIFGTTLDARTQSLLIVNNATNVVIKVCEFQFCTDPFLGVYYHNNNKTWVENEFRVYSSANNCTFEYISQPFLMDLEGKQGNFKNLREFVFKNVDGYFKIYSKHTPIDLVRDLPRGFAALEPLVDLPIGINITRFQTLLALHRSYLTPGNLESGWTTGAAAYYVGYLQQRTFLLSYNQNGTITDAVDCSLDPLSETKCTLKSLTVEKGIYQTSNFRVQPTISIVRFPNITNLCPFGEVFNASKFASVYAWNRKRISNCVADYSVLYNSTSFSTFKCYGVSPTKLNDLCFTNVYADSFVVKGDEVRQIAPGQTGVIADYNYKLPDDFTGCVIAWNSVKQDALTGGNYGYLYRLFRKSKLKPFERDISTEIYQAGSTPCNGQVGLNCYYPLERYGFHPTTGVNYQPFRVVVLSFELLNGPATVCGPKLSTTLVKDKCVNFNFNGLTGTGVLTTSKKQFLPFQQFGRDISDTTDAVRDPQTLEILDITPCSFGGVSVITPGTNTSNQVAVLYQDVNCTEVPMAIHAEQLTPAWRVYSAGANVFQTRAGCLVGAEHVNNSYECDIPVGAGICASYHSMSSLRSVNQRSIIAYTMSLGAENSVAYSNNSIAIPTNFTISVTTEILPVSMTKTSVDCTMYICGDSIECSNLLLQYGSFCTQLNRALTGIAVEQDKNTQEVFAQVKQIYKTPPIKDFGGFNFSQILPDPSKPSKRSFIEDLLFNKVTLADAGFIKQYGDCLGDIAARDLICAQKFNGLTVLPPLLTDEMIAQYTSALLAGTITSGWTFGAGAALQIPFAMQMAYRFNGCGVTQNVLYENQKLIANQFNSAIGKIQDSLSSTASALGKLQDVVNQNAQALNTLVKQLSSNFGAISSVLNDILSRLDKVEAEVQIDRLITGRLQSLQTYVTQQLIRAAEIRASANLAATKMSECVLGQSKRVDFCGKGCHLMSFPQSAPHGVVFLHVTYVPAQEKNFTTAPAICHEGKAHFPREGVFVSNGTHWFITQRNFYEPQIITTDNTFVSGSCDVVIGIVNNTVYDPLQPELDSFKEELDKYFKNHTSPDVDLGDISGINASVVNIQKEIDRLNEVAKNLNESPIDLQELGKYEQYIKGGGSGGGQIYEGKLTAEGLRFGIVASRFNHALVDRLVEGAIDAIVRHGGREEDITLVRVPGSWEIPVAAGELARKEDIDAVIAIGVLIRGATPHFDYIASEVSKGLADLSLELRKPITFGVITADTLEQAIERAGTKHGNKGWEAALSAIEMANLFKSLR

SEQ ID NO: 4291 - protein, 1365 aa, Artificial Sequence
  SARS-CoV-2/pangolin/Guangxi/P5L/2017__EPI_ISL_410540 spike protein (1-1205)(I903C_Y1041C) LumSynth construct
MFVFLFVLPLVSSQCVNLTTRTGIPPGYTNSSTRGVYYPDKVFRSSILHLTQDLFLPFFSNVTWFNTINYQGGFKKFDNPVLPFNDGVYFASTEKSNIIRGWIFGTTLDARTQSLLIVNNATNVVIKVCEFQFCTDPFLGVYYHNNNKTWVENEFRVYSSANNCTFEYISQPFLMDLEGKQGNFKNLREFVFKNVDGYFKIYSKHTPIDLVRDLPRGFAALEPLVDLPIGINITRFQTLLALHRSYLTPGKLESGWTTGAAAYYVGYLQQRTFLLSYNQNGTITDAVDCSLDPLSETKCTLKSLTVEKGIYQTSNFRVQPTISIVRFPNITNLCPFGEVFNASKFASVYAWNRKRISNCVADYSVLYNSTSFSTFKCYGVSPTKLNDLCFTNVYADSFVVKGDEVRQIAPGQTGVIADYNYKLPDDFTGCVIAWNSVKQDALTGGNYGYLYRLFRKSKLKPFERDISTEIYQAGSTPCNGQVGLNCYYPLERYGFHPTTGVNYQPFRVVVLSFELLNGPATVCGPKLSTTLVKDKCVNFNFNGLTGTGVLTTSKKQFLPFQQFGRDISDTTDAVRDPQTLEILDITPCSFGGVSVITPGTNTSNQVAVLYQDVNCTEVPMAIHAEQLTPAWRVYSAGANVFQTRAGCLVGAEHVNNSYECDIPVGAGICASYHSMSSFRSVNQRSIIAYTMSLGAENSVAYSNNSIAIPTNFTISVTTEILPVSMTKTSVDCTMYICGDSIECSNLLLQYGSFCTQLNRALTGIAVEQDKNTQEVFAQVKQIYKTPPIKDFGGFNFSQILPDPSKPSKRSFIEDLLFNKVTLADAGFIKQYGDCLGDIAARDLICAQKFNGLTVLPPLLTDEMIAQYTSALLAGTITSGWTFGAGAALQIPFAMQMAYRFNGCGVTQNVLYENQKLIANQFNSAIGKIQDSLSSTASALGKLQDVVNQNAQALNTLVKQLSSNFGAISSVLNDILSRLDKVEAEVQIDRLITGRLQSLQTYVTQQLIRAAEIRASANLAATKMSECVLGQSKRVDFCGKGCHLMSFPQSAPHGVVFLHVTYVPAQEKNFTTAPAICHEGKAHFPREGVFVSNGTHWFITQRNFYEPQIITTDNTFVSGSCDVVIGIVNNTVYDPLQPELDSFKEELDKYFKNHTSPDVDLGDISGINASVVNIQKEIDRLNEVAKNLNESLIDLQELGKYEQYIKGGGSGGGQIYEGKLTAEGLRFGIVASRFNHALVDRLVEGAIDAIVRHGGREEDITLVRVPGSWEIPVAAGELARKEDIDAVIAIGVLIRGATPHFDYIASEVSKGLADLSLELRKPITFGVITADTLEQAIERAGTKHGNKGWEAALSAIEMANLFKSLR

SEQ ID NO: 4292 - protein, 1365 aa, Artificial Sequence
  SARS-CoV-2/pangolin/Guangxi/P5E/2017__EPI_ISL_410541 spike protein (1-1205)(I903C_Y1041C) LumSynth construct
MFVFLFVLPLVSSQCVNLTTRTGIPPGYTNSSTRGVYYPDKVFRSSILHLTQDLFLPFFSNVTWFNTITYQGGSKKFDNPVLPFNDGVYFASTEKSNIIRGWIFGTTLDARTQSLLIVNNATNVVIKVCEFQFCTDPFLGVYYHNNNKTWVENEFRVYSSANNCTFEYISQPFLMDLEGKQGNFKNLREFVFKNVDGYFKIYSKHTPIDLVRDLPRGFAALEPLVDLPIGINITRFQTLLALHRSYLTPGKLESGWTTGAAAYYVGYLQQRTFLLSYNQNGTITDAVDCSLDPLSETKCTLKSLTVEKGIYQTSNFRVQPTISIVRFPNITNLCPFGEVFNASKFASVYAWNRKRISNCVADYSVLYNSTSFSTFKCYGVSPTKLNDLCFTNVYADSFVVKGDEVRQIAPGQTGVIADYNYKLPDDFTGCVIAWNSVKQDALTGDNYGYLYRLFRKSKLKPFERDISTEIYQAGSTPCNGQVGLNCYYPLERYGFHPTTGVNYQPFRVVVLSFELLNGPATVCGPKLSTTLVKDKCVNFNFNGLTGTGVLTTSKKQFLPFQQFGRDISDTTDAVRDPQTLEILDITPCSFGGVSVITPGTNTSNQVAVLYQDVNCTEVPMAIHAEQLTPAWRVYSAGANVFQTRAGCLVGAEHVNNSYECDIPVGAGICASYHSMSSFRSVNQRSIIAYTMSLGAENSVAYSNNSIAIPTNFTISVTTEILPVSMTKTSVDCTMYICGDSIECSNLLLQYGSFCTQLNRALTGIAVEQDKNTQEVFAQVKQIYKTPPIKDFGGFNFSQILPDPSKPSKRSFIEDLLFNKVTLADAGFIKQYGDCLGDIAARDLICAQKFNGLTVLPPLLTDEMIAQYTSALLAGTITSGWTFGAGAALQIPFAMQMAYRFNGCGVTQNVLYENQKLIANQFNSAIGKIQDSLSSTASALGKLQDVVNQNAQALNTLVKQLSSNFGAISSVLNDILSRLDKVEAEVQIDRLITGRLQSLQTYVTQQLIRAAEIRASANLAATKMSECVLGQSKRVDFCGKGCHLMSFPQSAPHGVVFLHVTYVPAQEKNFTTAPAICHEGKAHFPREGVFVSNGTHWFITQRNFYEPQIITTDNTFVSGSCDVVIGIVNNTVYDPLQPELDSFKEELDKYFKNHTSPDVDLGDISGINASVVNIQKEIDRLNEVAKNLNESLIDLQELGKYEQYIKGGGSGGGQIYEGKLTAEGLRFGIVASRFNHALVDRLVEGAIDAIVRHGGREEDITLVRVPGSWEIPVAAGELARKEDIDAVIAIGVLIRGATPHFDYIASEVSKGLADLSLELRKPITFGVITADTLEQAIERAGTKHGNKGWEAALSAIEMANLFKSLR

SEQ ID NO: 4293 - protein, 1363 aa, Artificial Sequence
  SARS-CoV-2/pangolin/Guangxi/P1E/2017__EPI_ISL_410539 spike protein (1-1203)(I901C_Y1039C) LumSynth construct
MFVFLFVLPLVSSQCVNLTTRTGIQPGYTNSSTRGVYYPDKVFRSSILHLTQDLFLPFFSNVTWFNTINYQGGFKKFDNPVLPFNDGVYFASTEKSNIIRGWIFGTTLDARTQSLLIVNNATNVVIKVCEFQFCTDPFLGVYYHNNNKTWVENEFRVYSSANNCTFEYISQPFLMDLEGKQGNFKNLREFVFKNVDGYFKIYSKHTPIDLVRDLPRGFAALEPLVDLPIGINITRFQTLLALHRSYLTPGKLESGWTTGAAAYYVGYLQQRTFLLSYNQNGTITDAVDCSLDPLSETKCTLKSLTVEKGIYQTSNFRVQPTISIVRFPNITNLCPFGEVFNASKFASVYAWNRKRISNCVADYSVLYNSTSFSTFKCYGVSPTKLNDLCFTNVYADSFVVKGDEVRQIAPGQTGVIADYNYKLPDDFTGCVIAWNSVKQDALTGGNYLYRLFRKSKLKPFERDISTEIYQAGSTPCNGQVGLNCYYPLERYGFHPTTGVNYQPFRVVVLSFELLNGPATVCGPKLSTTLVKDKCVNFNFNGLTGTGVLTTSKKQFLPFQQFGRDISDTTDAVRDPQTLEILDITPCSFGGVSVITPGTNTSNQVAVLYQDVNCTEVPMAIHAEQLTPAWRVYSAGANVFQTRAGCLVGAEHVNNSYECDIPVGAGICASYHSMSSLRSVNQRSIIAYTMSLGAENSVAYSNNSIAIPTNFTISVTTEILPVSMTKTSVDCTMYICGDSIECSNLLLQYGSFCTQLNRALTGIAVEQDKNTQEVFAQVKQIYKTPPIKDFGGFNFSQILPDPSKPSKRSFIEDLLFNKVTLADAGFIKQYGDCLGDIAARDLICAQKFNGLTVLPPLLTDEMIAQYTSALLAGTITSGWTFGAGAALQIPFAMQMAYRFNGCGVTQNVLYENQKLIANQFNSAIGKIQDSLSSTASALGKLQDVVNQNAQALNTLVKQLSSNFGAISSVLNDILSRLDKVEAEVQIDRLITGRLQSLQTYVTQQLIRAAEIRASANLAATKMSECVLGQSKRVDFCGKGCHLMSFPQSAPHGVVFLHVTYVPAQEKNFTTAPAICHEGKAHFPREGVFVSNGTHWFITQRNFYEPQIITTDNTFVSGSCDVVIGIVNNTVYDPLQPELDSFKEELDKYFKNHTSPDVDLGDISGINASVVNIQKEIDRLNEVAKNLNESLIDLQELGKYEQYIKGGGSGGGQIYEGKLTAEGLRFGIVASRFNHALVDRLVEGAIDAIVRHGGREEDITLVRVPGSWEIPVAAGELARKEDIDAVIAIGVLIRGATPHFDYIASEVSKGLADLSLELRKPITFGVITADTLEQAIERAGTKHGNKGWEAALSAIEMANLFKSLR

SEQ ID NO: 4294 - protein, 1371 aa, Artificial Sequence
  SARS-CoV-2/Wuhan/WIV05/2019__EPI_ISL_402128 spike protein (1-1211)(Q965C_S1003C) LumSynth construct
MFVFLVLLPLVSSQCVNLTTRTQLPPAYTNSFTRGVYYPDKVFRSSVLHSTQDLFLPFFSNVTWFHAIHVSGTNGTKRFDNPVLPFNDGVYFASTEKSNIIRGWIFGTTLDSKTQSLLIVNNATNVVIKVCEFQFCNDPFLGVYYHKNNKSWMESEFRVYSSANNCTFEYVSQPFLMDLEGKQGNFKNLREFVFKNIDGYFKIYSKHTPINLVRDLPQGFSALEPLVDLPIGINITRFQTLLALHRSYLTPGDSSSGWTAGAAAYYVGYLQPRTFLLKYNENGTITDAVDCALDPLSETKCTLKSFTVEKGIYQTSNFRVQPTESIVRFPNITNLCPFGEVFNATRFASVYAWNRKRISNCVADYSVLYNSASFSTFKCYGVSPTKLNDLCFTNVYADSFVIRGDEVRQIAPGQTGKIADYNYKLPDDFTGCVIAWNSNNLDSKVGGNYNYLYRLFRKSNLKPFERDISTEIYQAGSTPCNGVEGFNCYFPLQSYGFQPTNGVGYQPYRVVVLSFELLHAPATVCGPKKSTNLVKNKCVNFNFNGLTGTGVLTESNKKFLPFQQFGRDIADTTDAVRDPQTLEILDITPCSFGGVSVITPGTNTSNQVAVLYQDVNCTEVPVAIHADQLTPTWRVYSTGSNVFQTRAGCLIGAEHVNNSYECDIPIGAGICASYQTQTNSPRRARSVASQSIIAYTMSLGAENSVAYSNNSIAIPTNFTISVTTEILPVSMTKTSVDCTMYICGDSTECSNLLLQYGSFCTQLNRALTGIAVEQDKNTQEVFAQVKQIYKTPPIKDFGGFNFSQILPDPSKPSKRSFIEDLLFNKVTLADAGFIKQYGDCLGDIAARDLICAQKFNGLTVLPPLLTDEMIAQYTSALLAGTITSGWTFGAGAALQIPFAMQMAYRFNGIGVTQNVLYENQKLIANQFNSAIGKIQDSLSSTASALGKLQDVVNQNAQALNTLVKCLSSNFGAISSVLNDILSRLDKVEAEVQIDRLITGRLQCLQTYVTQQLIRAAEIRASANLAATKMSECVLGQSKRVDFCGKGYHLMSFPQSAPHGVVFLHVTYVPAQEKNFTTAPAICHDGKAHFPREGVFVSNGTHWFVTQRNFYEPQIITTDNTFVSGNCDVVIGIVNNTVYDPLQPELDSFKEELDKYFKNHTSPDVDLGDISGINASVVNIQKEIDRLNEVAKNLNESLIDLQELGKYEQYIKGGGSGGGQIYEGKLTAEGLRFGIVASRFNHALVDRLVEGAIDAIVRHGGREEDITLVRVPGSWEIPVAAGELARKEDIDAVIAIGVLIRGATPHFDYIASEVSKGLADLSLELRKPITFGVITADTLEQAIERAGTKHGNKGWEAALSAIEMANLFKSLR

SEQ ID NO: 4295 - protein, 1367 aa, Artificial Sequence
  SARS-CoV-2/bat/Yunnan/RaTG13/2013__EPI_ISL_402131 spike protein (1-1207)(Q961C_S999C) LumSynth construct
MFVFLVLLPLVSSQCVNLTTRTQLPPAYTNSSTRGVYYPDKVFRSSVLHLTQDLFLPFFSNVTWFHAIHVSGTNGIKRFDNPVLPFNDGVYFASTEKSNIIRGWIFGTTLDSKTQSLLIVNNATNVVIKVCEFQFCNDPFLGVYYHKNNKSWMESEFRVYSSANNCTFEYVSQPFLMDLEGKQGNFKNLREFVFKNIDGYFKIYSKHTPINLVRDLPPGFSALEPLVDLPIGINITRFQTLLALHRSYLTPGDSSSGWTAGAAAYYVGYLQPRTFLLKYNENGTITDAVDCALDPLSETKCTLKSFTVEKGIYQTSNFRVQPTDSIVRFPNITNLCPFGEVFNATTFASVYAWNRKRISNCVADYSVLYNSTSFSTFKCYGVSPTKLNDLCFTNVYADSFVITGDEVRQIAPGQTGKIADYNYKLPDDFTGCVIAWNSKHIDAKEGGNFNYLYRLFRKANLKPFERDISTEIYQAGSKPCNGQTGLNCYYPLYRYGFYPTDGVGHQPYRVVVLSFELLNAPATVCGPKKSTNLVKNKCVNFNFNGLTGTGVLTESNKKFLPFQQFGRDIADTTDAVRDPQTLEILDITPCSFGGVSVITPGTNASNQVAVLYQDVNCTEVPVAIHADQLTPTWRVYSTGSNVFQTRAGCLIGAEHVNNSYECDIPIGAGICASYQTQTNSRSVASQSIIAYTMSLGAENSVAYSNNSIAIPTNFTISVTTEILPVSMTKTSVDCTMYICGDSTECSNLLLQYGSFCTQLNRALTGIAVEQDKNTQEVFAQVKQIYKTPPIKDFGGFNFSQILPDPSKPSKRSFIEDLLFNKVTLADAGFIKQYGDCLGDIAARDLICAQKFNGLTVLPPLLTDEMIAQYTSALLAGTITSGWTFGAGAALQIPFAMQMAYRFNGIGVTQNVLYENQKLIANQFNSAIGKIQDSLSSTASALGKLQDVVNQNAQALNTLVKCLSSNFGAISSVLNDILSRLDKVEAEVQIDRLITGRLQCLQTYVTQQLIRAAEIRASANLAATKMSECVLGQSKRVDFCGKGYHLMSFPQSAPHGVVFLHVTYVPAQEKNFTTAPAICHDGKAHFPREGVFVSNGTHWFVTQRNFYEPQIITTDNTFVSGSCDVVIGIVNNTVYDPLQPELDSFKEELDKYFKNHTSPDVDLGDISGINASVVNIQKEIDRLNEVAKNLNESLIDLQELGKYEQYIKGGGSGGGQIYEGKLTAEGLRFGIVASRFNHALVDRLVEGAIDAIVRHGGREEDITLVRVPGSWEIPVAAGELARKEDIDAVIAIGVLIRGATPHFDYIASEVSKGLADLSLELRKPITFGVITADTLEQAIERAGTKHGNKGWEAALSAIEMANLFKSLR

SEQ ID NO: 4296 - protein, 1371 aa, Artificial Sequence
  SARS-CoV-2/Wuhan/HBCDC-HB-01/2019__EPI_ISL_402132 spike protein (1-1211)(Q965C_S1003C) LumSynth construct
MFVFLVLLPLVSSQCVNLTTRTQLPPAYTNSITRGVYYPDKVFRSSVLHSTQDLFLPFFSNVTWFHAIHVSGTNGTKRFDNPVLPFNDGVYFASTEKSNIIRGWIFGTTLDSKTQSLLIVNNATNVVIKVCEFQFCNDPFLGVYYHKNNKSWMESEFRVYSSANNCTFEYVSQPFLMDLEGKQGNFKNLREFVFKNIDGYFKIYSKHTPINLVRDLPQGFSALEPLVDLPIGINITRFQTLLALHRSYLTPGDSSSGWTAGAAAYYVGYLQPRTFLLKYNENGTITDAVDCALDPLSETKCTLKSFTVEKGIYQTSNFRVQPTESIVRFPNITNLCPFGEVFNATRFASVYAWNRKRISNCVADYSVLYNSASFSTFKCYGVSPTKLNDLCFTNVYADSFVIRGDEVRQIAPGQTGKIADYNYKLPDDFTGCVIAWNSNNLDSKVGGNYNYLYRLFRKSNLKPFERDISTEIYQAGSTPCNGVEGFNCYFPLQSYGFQPTNGVGYQPYRVVVLSFELLHAPATVCGPKKSTNLVKNKCVNFNFNGLTGTGVLTESNKKFLPFQQFGRDIADTTDAVRDPQTLEILDITPCSFGGVSVITPGTNTSNQVAVLYQDVNCTEVPVAIHADQLTPTWRVYSTGSNVFQTRAGCLIGAEHVNNSYECDIPIGAGICASYQTQTNSPRRARSVASQSIIAYTMSLGAENSVAYSNNSIAIPTNFTISVTTEILPVSMTKTSVDCTMYICGDSTECSNLLLQYGSFCTQLNRALTGIAVEQDKNTQEVFAQVKQIYKTPPIKDFGGFNFSQILPDPSKPSKRSFIEDLLFNKVTLADAGFIKQYGDCLGDIAARDLICAQKFNGLTVLPPLLTDEMIAQYTSALLAGTITSGWTFGAGAALQIPFAMQMAYRFNGIGVTQNVLYENQKLIANQFNSAIGKIQDSLSSTASALGKLQDVVNQNAQALNTLVKCLSSNFGAISSVLNDILSRLDKVEAEVQIDRLITGRLQCLQTYVTQQLIRAAEIRASANLAATKMSECVLGQSKRVDFCGKGYHLMSFPQSAPHGVVFLHVTYVPAQEKNFTTAPAICHDGKAHFPREGVFVSNGTHWFVTQRNFYEPQIITTDNTFVSGNCDVVIGIVNNTVYDPLQPELDSFKEELDKYFKNHTSPDVDLGDISGINASVVNIQKEIDRLNEVAKNLNESLIDLQELGKYEQYIKGGGSGGGQIYEGKLTAEGLRFGIVASRFNHALVDRLVEGAIDAIVRHGGREEDITLVRVPGSWEIPVAAGELARKEDIDAVIAIGVLIRGATPHFDYIASEVSKGLADLSLELRKPITFGVITADTLEQAIERAGTKHGNKGWEAALSAIEMANLFKSLR

SEQ ID NO: 4297 - protein, 1371 aa, Artificial Sequence
  SARS-CoV-2/Guangdong/20SF028/2020__EPI_ISL_403936 spike protein (1-1211)(Q965C_S1003C) LumSynth construct
MFVFLVLLPLVSSQCVNLTTRTQLPPAYTNSFTRGVYYPDKVFRSSVLYSTQDLFLPFFSNVTWFHAIHVSGTNGTKRFDNPVLPFNDGVYFASTEKSNIIRGWIFGTTLDSKTQSLLIVNNATNVVIKVCEFQFCNDPFLGVYYHKNNKSWMESEFRVYSSANNCTFEYVSQPFLMDLEGKQGNFKNLREFVFKNIDGYFKIYSKHTPINLVRDLPQGFSALEPLVDLPIGINITRFQTLLALHRSYLTPGDSSSGWTAGAAAYYVGYLQPRTFLLKYNENGTITDAVDCALDPLSETKCTLKSFTVEKGIYQTSNFRVQPTESIVRFPNITNLCPFGEVFNATRFASVYAWNRKRISNCVADYSVLYNSASFSTFKCYGVSPTKLNDLCFTNVYADSFVIRGDEVRQIAPGQTGKIADYNYKLPDDFTGCVIAWNSNNLDSKVGGNYNYLYRLFRKSNLKPFERDISTEIYQAGSTPCNGVEGFNCYFPLQSYGFQPTNGVGYQPYRVVVLSFELLHAPATVCGPKKSTNLVKNKCVNFNFNGLTGTGVLTESNKKFLPFQQFGRDIADTTDAVRDPQTLEILDITPCSFGGVSVITPGTNTSNQVAVLYQDVNCTEVPVAIHADQLTPTWRVYSTGSNVFQTRAGCLIGAEHVNNSYECDIPIGAGICASYQTQTNSPRRARSVASQSIIAYTMSLGAENSVAYSNNSIAIPTNFTISVTTEILPVSMTKTSVDCTMYICGDSTECSNLLLQYGSFCTQLNRALTGIAVEQDKNTQEVFAQVKQIYKTPPIKDFGGFNFSQILPDPSKPSKRSFIEDLLFNKVTLADAGFIKQYGDCLGDIAARDLICAQKFNGLTVLPPLLTDEMIAQYTSALLAGTITSGWTFGAGAALQIPFAMQMAYRFNGIGVTQNVLYENQKLIANQFNSAIGKIQDSLSSTASALGKLQDVVNQNAQALNTLVKCLSSNFGAISSVLNDILSRLDKVEAEVQIDRLITGRLQCLQTYVTQQLIRAAEIRASANLAATKMSECVLGQSKRVDFCGKGYHLMSFPQSAPHGVVFLHVTYVPAQEKNFTTAPAICHDGKAHFPREGVFVSNGTHWFVTQRNFYEPQIITTDNTFVSGNCDVVIGIVNNTVYDPLQPELDSFKEELDKYFKNHTSPDVDLGDISGINASVVNIQKEIDRLNEVAKNLNESLIDLQELGKYEQYIKGGGSGGGQIYEGKLTAEGLRFGIVASRFNHALVDRLVEGAIDAIVRHGGREEDITLVRVPGSWEIPVAAGELARKEDIDAVIAIGVLIRGATPHFDYIASEVSKGLADLSLELRKPITFGVITADTLEQAIERAGTKHGNKGWEAALSAIEMANLFKSLR

SEQ ID NO: 4298 - protein, 1371 aa, Artificial Sequence
  SARS-CoV-2/Shenzhen/SZTH-001/2020__EPI_ISL_406592 spike protein (1-1211)(Q965C_S1003C) LumSynth construct
MFVFLVLLPLVSSQCVNLTTRTQLPPAYTNSFTRGVYYPDKVFRSSVLHSTQDLFLPFFSNVTWFHAIHVSGTNGTKRFDNPVLPFNDGVYFASTEKSNIIRGWIFGTTLDSKTQSLLIVNNATNVVIKVCEFQFCNDPFLGVYYHKNNKSWMESEFRVYSSANNCTFEYVSQPFLMDLEGKQGNFKNLREFVFKNIDGYFKIYSKHTPINLVRDLPQGFSALEPLVDLPIGINITRFQTLLALHRSYLTPGDSSSGWTAGAAAYYVGYLQPRTFLLKYNENGTITDAVDCALDPLSETKCTLKSFTVEKGIYQTSNFRVQPTESIVRFPNITNLCPFGEVFNATRFASVYAWNRKRISNCVADYSVLYNSASFSTFKCYGVSPTKLNDLCFTNVYADSFVIRGDEVRQIAPGQTGKIADYNYKLPDDFTGCVIAWNSNNLDSKVGGNYNYLYRLFRKSNLKPFERDISTEIYQAGSTPCNGVEGFNCYFPLQSYGFQPTNGVGYQPYRVVVLSFELLHAPATVCGPKKSTNLVKNKCVNFNFNGLTGTGVLTESNKKFLPFQQFGRDIADTTDAVRDPQTLEILDITPCSFGGVSVITPGTNTSNQVAVLYQDVNCTEVPVAIHADQLTPTWRVYSTGSNVFQTRAGCLIGAEHVNNSYECDIPIGAGICASYQTQTNSPRRARSVASQSIIAYTMSLGAENSVAYSNNSIAIPTNFTISVTTEILPVSMTKTSVDCTMYICGDSTECSNLLLQYGSFCTQLNRALTGIAVEQDKNTQEVFAQVKQIYKTPPIKDFGGFNFSQILPDPSKPSKRSFIEDLLFNKVTLADAGFIKQYGDCLGDIAARDLICAQKFNGLTVLPPLLTDEMIAQYTSALLAGTITSGWTFGAGAALQIPFAMQMAYRFNGIGVTQNVLYENQKLIANQFNSAIGKIQDSLSSTASALGKLQDVVNQNAQALNTLVKCLSSNFGAISSVLNDILSRLDKVEAEVQIDRLITGRLQCLQTYVTQQLIRAAEIRASANLAATKMSECVLGQSKRVDFCGKGYHLMSFPQSAPHGVVFLHVTYVPAQEKNFTTAPAICHDGKAHFPREGVFVSNGTHWFVTQRNFYEPQIITTDNTFVSGNCDVLIGIVNNTVYDPLQPELDSFKEELDKYFKNHTSPDVDLGDISGINASVVNIQKEIDRLNEVAKNLNESLIDLQELGKYEQYIKGGGSGGGQIYEGKLTAEGLRFGIVASRFNHALVDRLVEGAIDAIVRHGGREEDITLVRVPGSWEIPVAAGELARKEDIDAVIAIGVLIRGATPHFDYIASEVSKGLADLSLELRKPITFGVITADTLEQAIERAGTKHGNKGWEAALSAIEMANLFKSLR

SEQ ID NO: 4299 - protein, 1371 aa, Artificial Sequence
  SARS-CoV-2/Shenzhen/SZTH-004/2020__EPI_ISL_406595 spike protein (1-1211)(Q965C_S1003C) LumSynth construct
MFVFLVLLPLVSSQCVNLTTRTQLPPAYTNSFTRGVYYPDKVFRSSVLHSTQDLFLPFFSNVTWFHAIHVSGTNGTKRFDNPVLPFNDGVYFASTEKSNIIRGWIFGTTLDSKTQSLLIVNNATNVVIKVCEFQFCNDPFLGVYYHKNNKSWMESEFRVYSSANNCTFEYVSQPFLMDLEGKQGNFKNLREFVFKNIDGYFKIYSKHTPINLVRDLPQGFSALEPLVDLPIGINITRFQTLLALHRSYLTPGDSSSGWTAGAAAYYVGYLQPRTFLLKYNENGTITDAVDCALDPLSETKCTLKSFTVEKGIYQTSNFRVQPTESIVRFPNITNLCPFGEVFNATRFASVYAWDRKRISNCVAYYSVLYNSASFSTFKCYGVSPTKLNDLCFTNVYADSFVIRGDEVRQIAPGQTGKIADYNYKLPDDFTGCVIAWNSNNLDSKVGGNYNYLYRLFRKSNLKPFERDISTEIYQAGSTPCNGVEGFNCYFPLQSYGFQPTNGVGYQPYRVVVLSFELLHAPATVCGPKKSTNLVKNKCVNFNFNGLTGTGVLTESNKKFLPFQQFGRDIADTTDAVRDPQTLEILDITPCSFGGVSVITPGTNTSNQVAVLYQDVNCTEVPVAIHADQLTPTWRVYSTGSNVFQTRAGCLIGAEHVNNSYECDIPIGAGICASYQTQTNSPRRARSVASQSIIAYTMSLGAENSVAYSNNSIAIPTNFTISVTTEILPVSMTKTSVDCTMYICGDSTECSNLLLQYGSFCTQLNRALTGIAVEQDKNTQEVFAQVKQIYKTPPIKDFGGFNFSQILPDPSKPSKRSFIEDLLFNKVTLADAGFIKQYGDCLGDIAARDLICAQKFNGLTVLPPLLTDEMIAQYTSALLAGTITSGWTFGAGAALQIPFAMQMAYRFNGIGVTQNVLYENQKLIANQFNSAIGKIQDSLSSTASALGKLQDVVNQNAQALNTLVKCLSSNFGAISSVLNDILSRLDKVEAEVQIDRLITGRLQCLQTYVTQQLIRAAEIRASANLAATKMSECVLGQSKRVDFCGKGYHLMSFPQSAPHGVVFLHVTYVPAQEKNFTTAPAICHDGKAHFPREGVFVSNGTHWFVTQRNFYEPQIITTDNTFVSGNCDVVIGIVNNTVYDPLQPELDSFKEELDKYFKNHTSPDVDLGDISGINASVVNIQKEIDRLNEVAKNLNESLIDLQELGKYEQYIKGGGSGGGQIYEGKLTAEGLRFGIVASRFNHALVDRLVEGAIDAIVRHGGREEDITLVRVPGSWEIPVAAGELARKEDIDAVIAIGVLIRGATPHFDYIASEVSKGLADLSLELRKPITFGVITADTLEQAIERAGTKHGNKGWEAALSAIEMANLFKSLR

SEQ ID NO: 4300 - protein, 1371 aa, Artificial Sequence
  SARS-CoV-2/France/IDF0372/2020__EPI_ISL_406596 spike protein (1-1211)(Q965C_S1003C) LumSynth construct
MFVFLVLLPLVSSQCVNLTTRTQLPPAYTNSFTRGVYYPDKVFRSSVLHSTQDLFLPFFSNVTWFHAIHVSGTNGTKRFDNPVLPFNDGVYFASTEKSNIIRGWIFGTTLDSKTQSLLIVNNATNVVIKVCEFQFCNDPFLGVYYHKNNKSWMESEFRVYSSANNCTFEYVSQPFLMDLEGKQGNFKNLREFVFKNIDGYFKIYSKHTPINLVRDLPQGFSALEPLVDLPIGINITRFQTLLALHRSYLTPGDSSSGWTAGAAAYYVGYLQPRTFLLKYNENGTITDAVDCALDPLSETKCTLKSFTVEKGIYQTSNFRVQPTESIVRFPNITNLCPFGEVFNATRFASVYAWNRKRISNCVADYSFLYNSASFSTFKCYGVSPTKLNDLCFTNVYADSFVIRGDEVRQIAPGQTGKIADYNYKLPDDFTGCVIAWNSNNLDSKVGGNYNYLYRLFRKSNLKPFERDISTEIYQAGSTPCNGVEGFNCYFPLQSYGFQPTNGVGYQPYRVVVLSFELLHAPATVCGPKKSTNLVKNKCVNFNFNGLTGTGVLTESNKKFLPFQQFGRDIADTTDAVRDPQTLEILDITPCSFGGVSVITPGTNTSNQVAVLYQDVNCTEVPVAIHADQLTPTWRVYSTGSNVFQTRAGCLIGAEHVNNSYECDIPIGAGICASYQTQTNSPRRARSVASQSIIAYTMSLGAENSVAYSNNSIAIPTNFTISVTTEILPVSMTKTSVDCTMYICGDSTECSNLLLQYGSFCTQLNRALTGIAVEQDKNTQEVFAQVKQIYKTPPIKDFGGFNFSQILPDPSKPSKRSFIEDLLFNKVTLADAGFIKQYGDCLGDIAARDLICAQKFNGLTVLPPLLTDEMIAQYTSALLAGTITSGWTFGAGAALQIPFAMQMAYRFNGIGVTQNVLYENQKLIANQFNSAIGKIQDSLSSTASALGKLQDVVNQNAQALNTLVKCLSSNFGAISSVLNDILSRLDKVEAEVQIDRLITGRLQCLQTYVTQQLIRAAEIRASANLAATKMSECVLGQSKRVDFCGKGYHLMSFPQSAPHGVVFLHVTYVPAQEKNFTTAPAICHDGKAHFPREGVFVSNGTHWFVTQRNFYEPQIITTDNTFVSGNCDVVIGIVNNTVYDPLQPELDSFKEELDKYFKNHTSPDVDLGDISGINASVVNIQKEIDRLNEVAKNLNESLIDLQELGKYEQYIKGGGSGGGQIYEGKLTAEGLRFGIVASRFNHALVDRLVEGAIDAIVRHGGREEDITLVRVPGSWEIPVAAGELARKEDIDAVIAIGVLIRGATPHFDYIASEVSKGLADLSLELRKPITFGVITADTLEQAIERAGTKHGNKGWEAALSAIEMANLFKSLR

SEQ ID NO: 4301 - protein, 1371 aa, Artificial Sequence
  SARS-CoV-2/Australia/VIC01/2020__EPI_ISL_406844 spike protein (1-1211)(Q965C_S1003C) LumSynth construct
MFVFLVLLPLVSSQCVNLTTRTQLPPAYTNSFTRGVYYPDKVFRSSVLHSTQDLFLPFFSNVTWFHAIHVSGTNGTKRFDNPVLPFNDGVYFASTEKSNIIRGWIFGTTLDSKTQSLLIVNNATNVVIKVCEFQFCNDPFLGVYYHKNNKSWMESEFRVYSSANNCTFEYVSQPFLMDLEGKQGNFKNLREFVFKNIDGYFKIYSKHTPINLVRDLPQGFSALEPLVDLPIGINITRFQTLLALHRRYLTPGDSSSGWTAGAAAYYVGYLQPRTFLLKYNENGTITDAVDCALDPLSETKCTLKSFTVEKGIYQTSNFRVQPTESIVRFPNITNLCPFGEVFNATRFASVYAWNRKRISNCVADYSVLYNSASFSTFKCYGVSPTKLNDLCFTNVYADSFVIRGDEVRQIAPGQTGKIADYNYKLPDDFTGCVIAWNSNNLDSKVGGNYNYLYRLFRKSNLKPFERDISTEIYQAGSTPCNGVEGFNCYFPLQSYGFQPTNGVGYQPYRVVVLSFELLHAPATVCGPKKSTNLVKNKCVNFNFNGLTGTGVLTESNKKFLPFQQFGRDIADTTDAVRDPQTLEILDITPCSFGGVSVITPGTNTSNQVAVLYQDVNCTEVPVAIHADQLTPTWRVYSTGSNVFQTRAGCLIGAEHVNNSYECDIPIGAGICASYQTQTNSPRRARSVASQSIIAYTMSLGAENSVAYSNNSIAIPTNFTISVTTEILPVSMTKTSVDCTMYICGDSTECSNLLLQYGSFCTQLNRALTGIAVEQDKNTQEVFAQVKQIYKTPPIKDFGGFNFSQILPDPSKPSKRSFIEDLLFNKVTLADAGFIKQYGDCLGDIAARDLICAQKFNGLTVLPPLLTDEMIAQYTSALLAGTITSGWTFGAGAALQIPFAMQMAYRFNGIGVTQNVLYENQKLIANQFNSAIGKIQDSLSSTASALGKLQDVVNQNAQALNTLVKCLSSNFGAISSVLNDILSRLDKVEAEVQIDRLITGRLQCLQTYVTQQLIRAAEIRASANLAATKMSECVLGQSKRVDFCGKGYHLMSFPQSAPHGVVFLHVTYVPAQEKNFTTAPAICHDGKAHFPREGVFVSNGTHWFVTQRNFYEPQIITTDNTFVSGNCDVVIGIVNNTVYDPLQPELDSFKEELDKYFKNHTSPDVDLGDISGINASVVNIQKEIDRLNEVAKNLNESLIDLQELGKYEQYIKGGGSGGGQIYEGKLTAEGLRFGIVASRFNHALVDRLVEGAIDAIVRHGGREEDITLVRVPGSWEIPVAAGELARKEDIDAVIAIGVLIRGATPHFDYIASEVSKGLADLSLELRKPITFGVITADTLEQAIERAGTKHGNKGWEAALSAIEMANLFKSLR

SEQ ID NO: 4302 - protein, 1371 aa, Artificial Sequence
  SARS-CoV-2/Germany/BavPat1/2020__EPI_ISL_406862 spike protein (1-1211)(Q965C_S1003C) LumSynth construct
MFVFLVLLPLVSSQCVNLTTRTQLPPAYTNSFTRGVYYPDKVFRSSVLHSTQDLFLPFFSNVTWFHAIHVSGTNGTKRFDNPVLPFNDGVYFASTEKSNIIRGWIFGTTLDSKTQSLLIVNNATNVVIKVCEFQFCNDPFLGVYYHKNNKSWMESEFRVYSSANNCTFEYVSQPFLMDLEGKQGNFKNLREFVFKNIDGYFKIYSKHTPINLVRDLPQGFSALEPLVDLPIGINITRFQTLLALHRSYLTPGDSSSGWTAGAAAYYVGYLQPRTFLLKYNENGTITDAVDCALDPLSETKCTLKSFTVEKGIYQTSNFRVQPTESIVRFPNITNLCPFGEVFNATRFASVYAWNRKRISNCVADYSVLYNSASFSTFKCYGVSPTKLNDLCFTNVYADSFVIRGDEVRQIAPGQTGKIADYNYKLPDDFTGCVIAWNSNNLDSKVGGNYNYLYRLFRKSNLKPFERDISTEIYQAGSTPCNGVEGFNCYFPLQSYGFQPTNGVGYQPYRVVVLSFELLHAPATVCGPKKSTNLVKNKCVNFNFNGLTGTGVLTESNKKFLPFQQFGRDIADTTDAVRDPQTLEILDITPCSFGGVSVITPGTNTSNQVAVLYQGVNCTEVPVAIHADQLTPTWRVYSTGSNVFQTRAGCLIGAEHVNNSYECDIPIGAGICASYQTQTNSPRRARSVASQSIIAYTMSLGAENSVAYSNNSIAIPTNFTISVTTEILPVSMTKTSVDCTMYICGDSTECSNLLLQYGSFCTQLNRALTGIAVEQDKNTQEVFAQVKQIYKTPPIKDFGGFNFSQILPDPSKPSKRSFIEDLLFNKVTLADAGFIKQYGDCLGDIAARDLICAQKFNGLTVLPPLLTDEMIAQYTSALLAGTITSGWTFGAGAALQIPFAMQMAYRFNGIGVTQNVLYENQKLIANQFNSAIGKIQDSLSSTASALGKLQDVVNQNAQALNTLVKCLSSNFGAISSVLNDILSRLDKVEAEVQIDRLITGRLQCLQTYVTQQLIRAAEIRASANLAATKMSECVLGQSKRVDFCGKGYHLMSFPQSAPHGVVFLHVTYVPAQEKNFTTAPAICHDGKAHFPREGVFVSNGTHWFVTQRNFYEPQIITTDNTFVSGNCDVVIGIVNNTVYDPLQPELDSFKEELDKYFKNHTSPDVDLGDISGINASVVNIQKEIDRLNEVAKNLNESLIDLQELGKYEQYIKGGGSGGGQIYEGKLTAEGLRFGIVASRFNHALVDRLVEGAIDAIVRHGGREEDITLVRVPGSWEIPVAAGELARKEDIDAVIAIGVLIRGATPHFDYIASEVSKGLADLSLELRKPITFGVITADTLEQAIERAGTKHGNKGWEAALSAIEMANLFKSLR

SEQ ID NO: 4303 - protein, 1371 aa, Artificial Sequence
  SARS-CoV-2/Wuhan/HBCDC-HB-02/2020__EPI_ISL_412978 spike protein (1-1211)(Q965C_S1003C) LumSynth construct
MFVFLVLLPLVSSQCVNLTTRTQLPPAYTNSFTRGVYYPDKVFRSSVLHSTQDLFLPFFSNVTWFHAIHVSGTNGTKRFDNPVLPFNDGVYFASTEKSNIIRGWIFGTTLDSKTQSLLIVNNATNVVIKVCEFQFCNDPFLGVYYHKNNKSWMESEFRVYSSANNCTFEYVSQPFLMDLEGKQGNFKNLREFVFKNIDGYFKIYSKHTPINLVRDLPQGFSALEPLVDLPIGINITRFQTLLALHRSYLTPGDSSSGWTAGAAAYYVGYLQPRTFLLKYNENGTITDAVDCALDPLSETKCTLKSFTVEKGIYQTSNFRVQPTESIVRFPNITNLCPFGEVFNATRFASVYAWNRKRISNCVADYSVLYNSASFSTFKCYGVSPTKLNDLCFTNVYADSFVIRGDEVRQIAPGQTGKIADYNYKLPDDFTGCVIAWNSNNLDSKVGGNYNYLYRLFRKSNLKPFERDISTEIYQAGSTPCNGVEGFNCYFPLQSYGFQPTNGVGYQPYRVVVLSFELLHAPATVCGPKKSTNLVKNKCVNFNFNGLTGTGVLTESNKKFLPFQQFGRDIADTTDAVRDPQTLEILDITPCSFGGVSVITPGTNTSNQVAVLYQDVNCTEVPVAIHADQLTPTWRVYSTGSNVFQTRAGCLIGAEHVNNSYECDIPIGAGICASYQTQTNSPRRARSVASQSIIAYTMSLGAENSVAYSNNSIAIPTNFTISVTTEILPVSMTKTSVDCTMYICGDSTECSNFLLQYGSFCTQLNRALTGIAVEQDKNTQEVFAQVKQIYKTPPIKDFGGFNFSQILPDPSKPSKRSFIEDLLFNKVTLADAGFIKQYGDCLGDIAARDLICAQKFNGLTVLPPLLTDEMIAQYTSALLAGTITSGWTFGAGAALQIPFAMQMAYRFNGIGVTQNVLYENQKLIANQFNSAIGKIQDSLSSTASALGKLQDVVNQNAQALNTLVKCLSSNFGAISSVLNDILSRLDKVEAEVQIDRLITGRLQCLQTYVTQQLIRAAEIRASANLAATKMSECVLGQSKRVDFCGKGYHLMSFPQSAPHGVVFLHVTYVPAQEKNFTTAPAICHDGKAHFPREGVFVSNGTHWFVTQRNFYEPQIITTDNTFVSGNCDVVIGIVNNTVYDPLQPELDSFKEELDKYFKNHTSPDVDLGDISGINASVVNIQKEIDRLNEVAKNLNESLIDLQELGKYEQYIKGGGSGGGQIYEGKLTAEGLRFGIVASRFNHALVDRLVEGAIDAIVRHGGREEDITLVRVPGSWEIPVAAGELARKEDIDAVIAIGVLIRGATPHFDYIASEVSKGLADLSLELRKPITFGVITADTLEQAIERAGTKHGNKGWEAALSAIEMANLFKSLR

SEQ ID NO: 4304 - protein, 1371 aa, Artificial Sequence
  SARS-CoV-2/Australia/QLD02/2020__EPI_ISL_407896 spike protein (1-1211)(Q965C_S1003C) LumSynth construct
MFVFLVLLPLVSSQCVNLTTRTQLPPAYTNSFTRGVYYPDKVFRSSVLHSTQDLFLPFFSNVTWFHAIHVSGTNGTKRFDNPVLPFNDGVYFASTEKSNIIRGWIFGTTLDSKTQSLLIVNNATNVVIKVCEFQFCNDPFLGVYYHKNNKSWMESEFRVYSSANNCTFEYVSQPFLMDLEGKQGNFKNLREFVFKNIDGYFKIYSKHTPINLVRDLPQGFSALEPLVDLPIGINITRFQTLLALHRSYLTPGDSSSGWTAGAAAYYVGYLQPRTFLLKYNENGTITDAVDCALDPLSETKCTLKSFTVEKGIYQTSNFRVQPTESIVRFPNITNLCPFGEVFNATRFASVYAWNRKRISNCVADYSVLYNSASFSTFKCYGVSPTKLNDLCFTNVYADSFVIRGDEVRQIAPGQTGKIADYNYKLPDDFTGCVIAWNSNNLDSKVGGNYNYLYRLFRKSNLKPFERDISTEIYQAGSTPCNGVEGFNCYFPLQSYGFQPTNGVGYQPYRVVVLSFELLHAPATVCGPKKSTNLVKNKCVNFNFNGLTGTGVLTESNKKFLPFQQFGRDIADTTDAVRDPQTLEILDITPCSFGGVSVITPGTNTSNQVAVLYQDVNCTEVPVAIHADQLTPTWRVYSTGSNVFQTRAGCLIGAEHVNNSYECDIPIGAGICASYQTQTNSPRRARSVASQSIIAYTMSLGAENSVAYSNNSIAIPTNFTISVTTEILPVSMTKTSVDCTMYICGDSTECSNLLLQYGSFCTQLNRALTGIAVEQDKNTQEVFAQVKQIYKTPPIKDFGGFNFSQILPDPSKPSKRSFIEDLLFNKVTLADAGFIKQYGDCLGDIAARDLICAQKFNGLTVLPPLLTDEMIAQYTSALLAGTITSGWTFGAGAALQIPFAMQMAYRFNGIGVTQNVLYENQKLIANQFNSAIGKIQDSLSSTASALGKLQDVVNQNAQALNTLVKCLSSNFGAISSVLNDILSRLDKVEAEVQIDRLITGRLQCLQTYVTQQLIRAAEIRASANLAATKMSECVLGQSKRVDFCGKGYHLMSFPQSAPHGVVFLHVTYVPAQEKNFTTAPAICHDGKAHFPREGVFVSNGTHWFVTQRNFYEPQIITTDNTFVSGNCDVVIGIVNNTVYDPLQLELDSFKEELDKYFKNHTSPDVDLGDISGINASVVNIQKEIDRLNEVAKNLNESLIDLQELGKYEQYIKGGGSGGGQIYEGKLTAEGLRFGIVASRFNHALVDRLVEGAIDAIVRHGGREEDITLVRVPGSWEIPVAAGELARKEDIDAVIAIGVLIRGATPHFDYIASEVSKGLADLSLELRKPITFGVITADTLEQAIERAGTKHGNKGWEAALSAIEMANLFKSLR

SEQ ID NO: 4305 - protein, 1371 aa, Artificial Sequence
  SARS-CoV-2/India/1-31/2020__EPI_ISL_413523 spike protein (1-1211)(Q965C_S1003C) LumSynth construct
MFVFLVLLPLVSSQCVNLTTRTQLPPAYTNSFTRGVYYPDKVFRSSVLHSTQDLFLPFFSNVTWFHAIHVSGTNGTKRFDNPVLPFNDGVYFASTEKSNIIRGWIFGTTLDSKTQSLLIVNNATNVVIKVCEFQFCNDPFLGVYYHKNNKSWMESEFRVYSSANNCTFEYVSQPFLMDLEGKQGNFKNLREFVFKNIDGYFKIYSKHTPINLVRDLPQGFSALEPLVDLPIGINITRFQTLLALHRSYLTPGDSSSGWTAGAAAYYVGYLQPRTFLLKYNENGTITDAVDCALDPLSETKCTLKSFTVEKGIYQTSNFRVQPTESIVRFPNITNLCPFGEVFNATRFASVYAWNRKRISNCVADYSVLYNSASFSTFKCYGVSPTKLNDLCFTNVYADSFVIRGDEVRQIAPGQTGKIADYNYKLPDDFTGCVIAWNSNNLDSKVGGNYNYLYRLFRKSNLKPFERDISTEIYQAGSTPCNGVEGFNCYFPLQSYGFQPTNGVGYQPYRVVVLSFELLHAPATVCGPKKSTNLVKNKCVNFNFNGLTGTGVLTESNKKFLPFQQFGRDIADTTDAVRDPQTLEILDITPCSFGGVSVITPGTNTSNQVAVLYQDVNCTEVPVAIHADQLTPTWRVYSTGSNVFQTRAGCLIGAEHVNNSYECDIPIGAGICASYQTQTNSPRRARSVASQSIIAYTMSLGAENSVAYSNNSIAIPTNFTISVTTEILPVSMTKTSVDCTMYICGDSTECSNLLLQYGSFCTQLNRALTGIAVEQDKNTQEVFAQVKQIYKTPPIKDFGGFNFSQILPDPSKPSKRSFIEDLLFNKVTLADAGFIKQYGDCLGDIAARDLICAQKFNGLTVLPPLLTDEMIAQYTSALLAGTITSGWTFGAGAALQIPFAMQMAYRFNGIGVTQNVLYENQKLIANQFNSVIGKIQDSLSSTASALGKLQDVVNQNAQALNTLVKCLSSNFGAISSVLNDILSRLDKVEAEVQIDRLITGRLQCLQTYVTQQLIRAAEIRASANLAATKMSECVLGQSKRVDFCGKGYHLMSFPQSAPHGVVFLHVTYVPAQEKNFTTAPAICHDGKAHFPREGVFVSNGTHWFVTQRNFYEPQIITTDNTFVSGNCDVVIGIVNNTVYDPLQPELDSFKEELDKYFKNHTSPDVDLGDISGINASVVNIQKEIDRLNEVAKNLNESLIDLQELGKYEQYIKGGGSGGGQIYEGKLTAEGLRFGIVASRFNHALVDRLVEGAIDAIVRHGGREEDITLVRVPGSWEIPVAAGELARKEDIDAVIAIGVLIRGATPHFDYIASEVSKGLADLSLELRKPITFGVITADTLEQAIERAGTKHGNKGWEAALSAIEMANLFKSLR

SEQ ID NO: 4306 - protein, 1371 aa, Artificial Sequence
  SARS-CoV-2/Guangdong/GD2020087-P0008/2020__EPI_ISL_413863 spike protein (1-1211)(Q965C_S1003C) LumSynth construct
MFVFLVLLPLVSSQCVNLTTRTQLPPAYTNSFTRGVYYPDKVFRSSVLHSTQDLFLPFFSNVTWFHAIHVSGTNGTKRFDNPVLPFNDGVYFASTEKSNIIRGWIFGTTLDSKTQSLLIVNNATNVVIKVCEFQFCNDPFLGVYYHKNNKSWMESEFRVYSSANNCTFEYVSQPFLMDLEGKQGNFKNLREFVFKNIDGYFKIYSKHTPINLVRDLPQGFSALEPLVDLPIGINITRFQTLLALHRSYLTPGDSSSGWTAGAAAYYVGYLQPRTFLLKYNENGTITDAVDCALDPLSETKCTLKSFTVEKGIYQTSNFRVQPTESIVRFPNITNLCPFGEVFNATRFASVYAWNRKRISNCVADYSVLYNSASFSTFKCYGVSPTKLNDLCFTNVYADSFVIRGDEVREIAPGQTGKIADYNYKLPDDFTGCVIAWNSNNLDSKVGGNYNYLYRLFRKSNLKPFERDISTEIYQAGSTPCNGVEGFNCYFPLQSYGFQPTNGVGYQPYRVVVLSFELLHAPATVCGPKKSTNLVKNKCVNFNFNGLTGTGVLTESNKKFLPFQQFGRDIADTTDAVRDPQTLEILDITPCSFGGVSVITPGTNTSNQVAVLYQDVNCTEVPVAIHADQLTPTWRVYSTGSNVFQTRAGCLIGAEHVNNSYECDIPIGAGICASYQTQTNSPRRARSVASQSIIAYTMSLGAENSVAYSNNSIAIPTNFTISVTTEILPVSMTKTSVDCTMYICGDSTECSNLLLQYGSFCTQLNRALTGIAVEQDKNTQEVFAQVKQIYKTPPIKDFGGFNFSQILPDPSKPSKRSFIEDLLFNKVTLADAGFIKQYGDCLGDIAARDLICAQKFNGLTVLPPLLTDEMIAQYTSALLAGTITSGWTFGAGAALQIPFAMQMAYRFNGIGVTQNVLYENQKLIANQFNSAIGKIQDSLSSTASALGKLQDVVNQNAQALNTLVKCLSSNFGAISSVLNDILSRLDKVEAEVQIDRLITGRLQCLQTYVTQQLIRAAEIRASANLAATKMSECVLGQSKRVDFCGKGYHLMSFPQSAPHGVVFLHVTYVPAQEKNFTTAPAICHDGKAHFPREGVFVSNGTHWFVTQRNFYEPQIITTDNTFVSGNCDVVIGIVNNTVYDPLQPELDSFKEELDKYFKNHTSPDVDLGDISGINASVVNIQKEIDRLNEVAKNLNESLIDLQELGKYEQYIKGGGSGGGQIYEGKLTAEGLRFGIVASRFNHALVDRLVEGAIDAIVRHGGREEDITLVRVPGSWEIPVAAGELARKEDIDAVIAIGVLIRGATPHFDYIASEVSKGLADLSLELRKPITFGVITADTLEQAIERAGTKHGNKGWEAALSAIEMANLFKSLR

SEQ ID NO: 4307 - protein, 1371 aa, Artificial Sequence
  SARS-CoV-2/Sweden/01/2020__EPI_ISL_411951 spike protein (1-1211)(Q965C_S1003C) LumSynth construct
MFVFLVLLPLVSSQCVNLTTRTQLPPAYTNSFTRGVYYPDKVFRSSVLHSTQDLFLPFFSNVTWFHAIHVSGTNGTKRFDNPVLPFNDGVYFASTEKSNIIRGWIFGTTLDSKTQSLLIVNNATNVVIKVCEFQFCNDPFLGVYYHKNNKSWMESEFRVYSSANNCTFEYVSQPFLMDLEGKQGNFKNLREFVFKNIDGYFKIYSKHTPINLVRDLPQGFSALEPLVDLPIGINITRFQTLLALHRSYLTPGDSSSGWTAGAAAYYVGYLQPRTFLLKYNENGTITDAVDCALDPLSETKCTLKSFTVEKGIYQTSNFRVQPTESIVRFPNITNLCPFGEVFNATRFASVYAWNRKRISNCVADYSVLYNSASFSTFKCYGVSPTKLNDLCFTNVYADSFVIRGDEVRQIAPGQTGKIADYNYKLPDDFTGCVIAWNSNNLDSKVGGNYNYLYRLFRKSNLKPFERDISTEIYQAGSTPCNGVEGFNCYFPLQSYGFQPTNGVGYQPYRVVVLSFELLHAPATVCGPKKSTNLVKNKCVNFNFNGLTGTGVLTESNKKFLPFQQFGRDIADTTDAVRDPQTLEILDITPCSFGGVSVITPGTNTSNQVAVLYQDVNCTEVPVAIHADQLTPTWRVYSTGSNVFQTRAGCLIGAEHVNNSYECDIPIGAGICASYQTQTNSPRRARSVASQSIIAYTMSLGAENSVAYSNNSIAIPTNFTISVTTEILPVSMTKTSVDCTMYICGDSTECSNLLLQYGSFCTQLNRALTGIAVEQDKNTQEVFAQVKQIYKTPPIKDCGGFNFSQILPDPSKPSKRSFIEDLLFNKVTLADAGFIKQYGDCLGDIAARDLICAQKFNGLTVLPPLLTDEMIAQYTSALLAGTITSGWTFGAGAALQIPFAMQMAYRFNGIGVTQNVLYENQKLIANQFNSAIGKIQDSLSSTASALGKLQDVVNQNAQALNTLVKCLSSNFGAISSVLNDILSRLDKVEAEVQIDRLITGRLQCLQTYVTQQLIRAAEIRASANLAATKMSECVLGQSKRVDFCGKGYHLMSFPQSAPHGVVFLHVTYVPAQEKNFTTAPAICHDGKAHFPREGVFVSNGTHWFVTQRNFYEPQIITTDNTFVSGNCDVVIGIVNNTVYDPLQPELDSFKEELDKYFKNHTSPDVDLGDISGINASVVNIQKEIDRLNEVAKNLNESLIDLQELGKYEQYIKGGGSGGGQIYEGKLTAEGLRFGIVASRFNHALVDRLVEGAIDAIVRHGGREEDITLVRVPGSWEIPVAAGELARKEDIDAVIAIGVLIRGATPHFDYIASEVSKGLADLSLELRKPITFGVITADTLEQAIERAGTKHGNKGWEAALSAIEMANLFKSLR

SEQ ID NO: 4308 - protein, 1371 aa, Artificial Sequence
  SARS-CoV-2/Tianmen/HBCDC-HB-07/2020__EPI_ISL_412983 spike protein (1-1211)(Q965C_S1003C) LumSynth construct
MFVFLVLLPLVSSQCVNLTTRTQLPPAYTNSFTRGVYYPDKVFRSSVLHSTQDLFLPFFSNVTWFHAIHVSGTNGTKRFDNPVLPFNDGVYFASTEKSNIIRGWIFGTTLDSKTQSLLIVNNATNVVIKVCEFQFCNDPFLGVYYHKNNKSWMESEFRVYSSANNCTFEYVSQPFLMDLEGKQGNFKNLREFVFKNIDGYFKIYSKHTPINLVRDLPQGFSALEPLVDLPIGINITRFQTLLALHRSYLTPGDSSSGWTAGAAAYYVGYLQPRTFLLKYNENGTITDAVDCALDPLSETKCTLKSFTVEKGIYQTSNFRVQPTESIVRFPNITNLCPFGEVFNATRFASVYAWNRKRISNCVADYSVLYNSASFSTFKCYGVSPTKLNDLCFTNVYADSFVIRGDEVRQIAPGQTGKIADYNYKLPDDFTGCVIAWNSNNLDSKVGGNYNYLYRLFRKSNLKPFERDISTEIYQAGSTPCNGVEGFNCYFPLQSYGFQPTNGVGYQPYRVVVLSFELLHAPATVCGPKKSTNLVKNKCVNFNFNGLTGTGVLTESNKKFLPFQQFGRDIADTTDAVRDPQTLEILDITPCSFGGVSVITPGTNTSNQVAVLYQDLNCTEVPVAIHADQLTPTWRVYSTGSNVFQTRAGCLIGAEHVNNSYECDIPIGAGICASYQTQTNSPRRARSVASQSIIAYTMSLGAENSVAYSNNSIAIPTNFTISVTTEILPVSMTKTSVDCTMYICGDSTECSNLLLQYGSFCTQLNRALTGIAVEQDKNTQEVFAQVKQIYKTPPIKDFGGFNFSQILPDPSKPSKRSFIEDLLFNKVTLADAGFIKQYGDCLGDIAARDLICAQKFNGLTVLPPLLTDEMIAQYTSALLAGTITSGWTFGAGAALQIPFAMQMAYRFNGIGVTQNVLYENQKLIANQFNSAIGKIQDSLSSTASALGKLQDVVNQNAQALNTLVKCLSSNFGAISSVLNDILSRLDKVEAEVQIDRLITGRLQCLQTYVTQQLIRAAEIRASANLAATKMSECVLGQSKRVDFCGKGYHLMSFPQSAPHGVVFLHVTYVPAQEKNFTTAPAICHDGKAHFPREGVFVSNGTHWFVTQRNFYEPQIITTDNTFVSGNCDVVIGIVNNTVYDPLQPELDSFKEELDKYFKNHTSPDVDLGDISGINASVVNIQKEIDRLNEVAKNLNESLIDLQELGKYEQYIKGGGSGGGQIYEGKLTAEGLRFGIVASRFNHALVDRLVEGAIDAIVRHGGREEDITLVRVPGSWEIPVAAGELARKEDIDAVIAIGVLIRGATPHFDYIASEVSKGLADLSLELRKPITFGVITADTLEQAIERAGTKHGNKGWEAALSAIEMANLFKSLR

SEQ ID NO: 4309 - protein, 1371 aa, Artificial Sequence
  SARS-CoV-2/Hong Kong/case42_VM20002493/2020__EPI_ISL_414527 spike protein (1-1211)(Q965C_S1003C) LumSynth construct
MFVFLVLLPLVSSQCVNLTTRTQLPPAYTNSFTRGVYYPDKVFRSSVLHSTQDLFLPFFSNVTWFHAIHVSGTNGTKRFDNPVLPFNDGVYFASTEKSNIIRGWIFGTTLDSKTQSLLIVNNATNVVIKVCEFQFCNDPFLGVYYHKNNKSWMESEFRVYSSANNCTFEYVSQPFLMDLEGKQGNFKNLREFVFKNIDGYFKIYSKHTPINLVRDLPQGFSALEPLVDLPIGINITRFQTLLALHRSYLTPGDSSSGWTAGAAAYYVGYLQPRTFLLKYNENGTITDAVDCALDPLSETKCTLKSFTVEKGIYQTSNFRVQPTESIVRFPNITNLCPFGEVFNATRFASVYAWNRKRISNCVADYSVLYNSASFSTFKCYGVSPTKLNDLCFTNVYADSFVIRGDEVRQIAPGQTGKIADYNYKLPDDFTGCVIAWNSNNLDSKVGGNYNYLYRLFRKSNLKPFERDISTEIYQAGSTPCNGVEGFNCYFPLQSYGFQPTNGVGYQPYRVVVLSFELLHAPATVCGPKKSTNLVKNKCVNFNFNGLTGTGVLTESNKKFLPFQQFGRDIADTTDAVRDPQTLEILDITPCSFGGVSVITPGTNTSNQVAVLYQDVNCTEVPVAIHADQLTPTWRVYSTGSNVFQTRAGCLIGAEHVNNSYECDIPIGAGICASYQTQTNSPRRARSVASQSIIAYTMSLGAENSVAYSNNSIAIPTNFAISVTTEILPVSMTKTSVDCTMYICGDSTECSNLLLQYGSFCTQLNRALTGIAVEQDKNTQEVFAQVKQIYKTPPIKDFGGFNFSQILPDPSKPSKRSFIEDLLFNKVTLADAGFIKQYGDCLGDIAARDLICAQKFNGLTVLPPLLTDEMIAQYTSALLAGTITSGWTFGAGAALQIPFAMQMAYRFNGIGVTQNVLYENQKLIANQFNSAIGKIQDSLSSTASALGKLQDVVNQNAQALNTLVKCLSSNFGAISSVLNDILSRLDKVEAEVQIDRLITGRLQCLQTYVTQQLIRAAEIRASANLAATKMSECVLGQSKRVDFCGKGYHLMSFPQSAPHGVVFLHVTYVPAQEKNFTTAPAICHDGKAHFPREGVFVSNGTHWFVTQRNFYEPQIITTDNTFVSGNCDVVIGIVNNTVYDPLQPELDSFKEELDKYFKNHTSPDVDLGDISGINASVVNIQKEIDRLNEVAKNLNESLIDLQELGKYEQYIKGGGSGGGQIYEGKLTAEGLRFGIVASRFNHALVDRLVEGAIDAIVRHGGREEDITLVRVPGSWEIPVAAGELARKEDIDAVIAIGVLIRGATPHFDYIASEVSKGLADLSLELRKPITFGVITADTLEQAIERAGTKHGNKGWEAALSAIEMANLFKSLR

SEQ ID NO: 4310 - protein, 1371 aa, Artificial Sequence
  SARS-CoV-2/USA/CruiseA-23/2020__EPI_ISL_414482 spike protein (1-1211)(Q965C_S1003C) LumSynth construct
MFVFLVLLPLVSSQCVNLTTRTQLPPAYTNSFTRGVYYPDKVFRSSVLHSTQDLFLPFFSNVTWFHAIHVSGTNGTKRFDNPVLPFNDGVYFASTEKSNIIRGWIFGTTLDSKTQSLLIVNNATNVVIKVCEFQFCNDPFLGVYYHKNNKSWMESEFRVYSSANNCTFEYVSQPFLMDLEVKQGNFKNLREFVFKNIDGYFKIYSKHTPINLVRDLPQGFSALEPLVDLPIGINITRFQTLLALHRSYLTPGDSSSGWTAGAAAYYVGYLQPRTFLLKYNENGTITDAVDCALDPLSETKCTLKSFTVEKGIYQTSNFRVQPTESIVRFPNITNLCPFGEVFNATRFASVYAWNRKRISNCVADYSVLYNSASFSTFKCYGVSPTKLNDLCFTNVYADSFVIRGDEVRQIAPGQTGKIADYNYKLPDDFTGCVIAWNSNNLDSKVGGNYNYLYRLFRKSNLKPFERDISTEIYQAGSTPCNGVEGFNCYFPLQSYGFQPTNGVGYQPYRVVVLSFELLHAPATVCGPKKSTNLVKNKCVNFNFNGLTGTGVLTESNKKFLPFQQFGRDIADTTDAVRDPQTLEILDITPCSFGGVSVITPGTNTSNQVAVLYQDVNCTEVPVAIHADQLTPTWRVYSTGSNVFQTRAGCLIGAEHVNNSYECDIPIGAGICASYQTQTNSPRRARSVASQSIIAYTMSLGAENSVAYSNNSIAIPTNFTISVTTEILPVSMTKTSVDCTMYICGDSTECSNLLLQYGSFCTQLNRALTGIAVEQDKNTQEVFAQVKQIYKTPPIKDFGGFNFSQILPDPSKPSKRSFIEDLLFNKVTLADAGFIKQYGDCLGDIAARDLICAQKFNGLTVLPPLLTDEMIAQYTSALLAGTITSGWTFGAGAALQIPFAMQMAYRFNGIGVTQNVLYENQKLIANQFNSAIGKIQDSLSSTASALGKLQDVVNQNAQALNTLVKCLSSNFGAISSVLNDILSRLDKVEAEVQIDRLITGRLQCLQTYVTQQLIRAAEIRASANLAATKMSECVLGQSKRVDFCGKGYHLMSFPQSAPHGVVFLHVTYVPAQEKNFTTAPAICHDGKAHFPREGVFVSNGTHWFVTQRNFYEPQIITTDNTFVSGNCDVVIGIVNNTVYDPLQPELDSFKEELDKYFKNHTSPDVDLGDISGINASVVNIQKEIDRLNEVAKNLNESLIDLQELGKYEQYIKGGGSGGGQIYEGKLTAEGLRFGIVASRFNHALVDRLVEGAIDAIVRHGGREEDITLVRVPGSWEIPVAAGELARKEDIDAVIAIGVLIRGATPHFDYIASEVSKGLADLSLELRKPITFGVITADTLEQAIERAGTKHGNKGWEAALSAIEMANLFKSLR

SEQ ID NO: 4311 - protein, 1371 aa, Artificial Sequence
  SARS-CoV-2/Hong Kong/case85_VM20002868/2020__EPI_ISL_414519 spike protein (1-1211)(Q965C_S1003C) LumSynth construct
MFVFLVLVPLVSSQCVNLTTRTQLPPAYTNSFTRGVYYPDKVFRSSVLHSTQDLFLPFFSNVTWFHAIHVSGTNGTKRFDNPVLPFNDGVYFASTEKSNIIRGWIFGTTLDSKTQSLLIVNNATNVVIKVCEFQFCNDPFLGVYYHKNNKSWMESEFRVYSSANNCTFEYVSQPFLMDLEGKQGNFKNLREFVFKNIDGYFKIYSKHTPINLVRDLPQGFSALEPLVDLPIGINITRFQTLLALHRSYLTPGDSSSGWTAGAAAYYVGYLQPRTFLLKYNENGTITDAVDCALDPLSETKCTLKSFTVEKGIYQTSNFRVQPTESIVRFPNITNLCPFGEVFNATRFASVYAWNRKRISNCVADYSVLYNSASFSTFKCYGVSPTKLNDLCFTNVYADSFVIRGDEVRQIAPGQTGKIADYNYKLPDDFTGCVIAWNSNNLDSKVGGNYNYLYRLFRKSNLKPFERDISTEIYQAGSTPCNGVEGFNCYFPLQSYGFQPTNGVGYQPYRVVVLSFELLHAPATVCGPKKSTNLVKNKCVNFNFNGLTGTGVLTESNKKFLPFQQFGRDIADTTDAVRDPQTLEILDITPCSFGGVSVITPGTNTSNQVAVLYQDVNCTEVPVAIHADQLTPTWRVYSTGSNVFQTRAGCLIGAEHVNNSYECDIPIGAGICASYQTQTNSPRRARSVASQSIIAYTMSLGAENSVAYSNNSIAIPTNFTISVTTEILPVSMTKTSVDCTMYICGDSTECSNLLLQYGSFCTQLNRALTGIAVEQDKNTQEVFAQVKQIYKTPPIKDFGGFNFSQILPDPSKPSKRSFIEDLLFNKVTLADAGFIKQYGDCLGDIAARDLICAQKFNGLTVLPPLLTDEMIAQYTSALLAGTITSGWTFGAGAALQIPFAMQMAYRFNGIGVTQNVLYENQKLIANQFNSAIGKIQDSLSSTASALGKLQDVVNQNAQALNTLVKCLSSNFGAISSVLNDILSRLDKVEAEVQIDRLITGRLQCLQTYVTQQLIRAAEIRASANLAATKMSECVLGQSKRVDFCGKGYHLMSFPQSAPHGVVFLHVTYVPAQEKNFTTAPAICHDGKAHFPREGVFVSNGTHWFVTQRNFYEPQIITTDNTFVSGNCDVVIGIVNNTVYDPLQPELDSFKEELDKYFKNHTSPDVDLGDISGINASVVNIQKEIDRLNEVAKNLNESLIDLQELGKYEQYIKGGGSGGGQIYEGKLTAEGLRFGIVASRFNHALVDRLVEGAIDAIVRHGGREEDITLVRVPGSWEIPVAAGELARKEDIDAVIAIGVLIRGATPHFDYIASEVSKGLADLSLELRKPITFGVITADTLEQAIERAGTKHGNKGWEAALSAIEMANLFKSLR

SEQ ID NO: 4312 - protein, 1371 aa, Artificial Sequence; identical to SEQ ID NO: 4302
  SARS-CoV-2/England/200990660/2020__EPI_ISL_414523 spike protein (1-1211)(Q965C_S1003C) LumSynth construct

SEQ ID NO: 4313 - protein, 1371 aa, Artificial Sequence
  SARS-CoV-2/Australia/NSW09/2020__EPI_ISL_413595 spike protein (1-1211)(Q965C_S1003C) LumSynth construct
MFVFLVLLPLVSSQCVNLTTRTQLPPAYTNSFTRGVYYPDKVFRSSVLHSTQDLFLPFFSNVTWFHAIHVSGTNGTKRFDNPVLPFNDGVYFASTEKSNIIRGWIFGTTLDSKTQSLLIVNNATNVVIKVCEFQFCNDPFLGVYYHKNNKSWMESEFRVYSSANNCTFEYVSQPFLMDLEGKQGNFKNLREFVFKNIDGYFKIYSKHTPINLVRDLPQGFSALEPLVDLPIGINITRFQTLLALHRSYLTPGDSSSGWTAGAAAYYVGYLQPRTFLLKYNENGTITDAVDCALDPLSETKCTLKSFTVEKGIYQTSNFRVQPTESIVRFPNITNLCPFGEVFNATRFASVYAWNRKRISNCVADYSVLYNSASFSTFKCYGVSPTKLNDLCFTNVYADSFVIRGDEVRQIAPGQTGKIADYNYKLPDDFTGCVIAWNSNNLDSKVGGNYNYLYRLFRKSNLKPFERDISTEIYQAGSTPCNGVEGFNCYFPLQSYGFQPTNGVGYQPYRVVVLSFELLHAPATVCGPKKSTNLVKNKCVNFNFNGLTGTGVLTESNKKFLPFQQFGRDIADTTDAVRDPQTLEILDITPCSFGGVSVITPGTNTSNQVAVLYQDVNCTEVPVAIHADQLTPTWRVYSTGSNVFQTRAGCLIGAEHVNNSYECDIPIGAGICASYQTQTNSPRRARSVASQSIIAYTMSLGAENSVAYSNNSIAIPTNFTISVTTEILPVSMTKTSVDCTMYICGDSTECSNLLLQYGSFCTQLNRALTGIAVEQDKNTQEVFAQVKQIYKTPPIKDFGGFNFSQILPDPSKPSKRSFIEDLLFNKVTLADAGFIKQYGDCLGDIAARDLICAQKFNGLTVLPPLLTDEMIAQYTSALLAGTITSGWTFGAGAALQIPFAMQMAYRFNGIGVTQNVLYENQKLIANQFNSAIGKIQDSLSFTASALGKLQDVVNQNAQALNTLVKCLSSNFGAISSVLNDILSRLDKVEAEVQIDRLITGRLQCLQTYVTQQLIRAAEIRASANLAATKMSECVLGQSKRVDFCGKGYHLMSFPQSAPHGVVFLHVTYVPAQEKNFTTAPAICHDGKAHFPREGVFVSNGTHWFVTQRNFYEPQIITTDNTFVSGNCDVVIGIVNNTVYDPLQPELDSFKEELDKYFKNHTSPDVDLGDISGINASVVNIQKEIDRLNEVAKNLNESLIDLQELGKYEQYIKGGGSGGGQIYEGKLTAEGLRFGIVASRFNHALVDRLVEGAIDAIVRHGGREEDITLVRVPGSWEIPVAAGELARKEDIDAVIAIGVLIRGATPHFDYIASEVSKGLADLSLELRKPITFGVITADTLEQAIERAGTKHGNKGWEAALSAIEMANLFKSLR

SEQ ID NO: 4314 - protein, 1371 aa, Artificial Sequence; identical to SEQ ID NO: 4294
  SARS-CoV-2/Australia/NSW10/2020__EPI_ISL_413596 spike protein (1-1211)(Q965C_S1003C) LumSynth construct

SEQ ID NO: 4315 - protein, 1371 aa, Artificial Sequence
  SARS-CoV-2/Switzerland/1000477797/2020__EPI_ISL_413023 spike protein (1-1211)(Q965C_S1003C) LumSynth construct
MFVFLVLLPLVSSQCVNLTTRTQLPPAYTNSFTRGVYYPDKVFRSSVLHSTQDLFLPFFSNVTWFHAIHVSGTNGTKRFDNPVLPFNDGVYFASTEKSNIIRGWIFGTTLDSKTQSLLIVNNATNVVIKVCEFQFCNDPFLGVYYHKNNKSWMESEFRVYSSANNCTFEYVSQPFLMDLEGKQGNFKNLREFVFKNIDGYFNIYSKHTPINLVRDLPQGFSALEPLVDLPIGINITRFQTLLALHRSYLTPGDSSSGWTAGAAAYYVGYLQPRTFLLKYNENGTITDAVDCALDPLSETKCTLKSFTVEKGIYQTSNFRVQPTESIVRFPNITNLCPFGEVFNATRFASVYAWNRKRISNCVADYSVLYNSASFSTFKCYGVSPTKLNDLCFTNVYADSFVIRGDEVRQIAPGQTGKIADYNYKLPDDFTGCVIAWNSNNLDSKVGGNYNYLYRLFRKSNLKPFERDISTEIYQAGSTPCNGVEGFNCYFPLQSYGFQPTNGVGYQPYRVVVLSFELLHAPATVCGPKKSTNLVKNKCVNFNFNGLTGTGVLTESNKKFLPFQQFGRDIADTTDAVRDPQTLEILDITPCSFGGVSVITPGTNTSNQVAVLYQGVNCTEVPVAIHADQLTPTWRVYSTGSNVFQTRAGCLIGAEHVNNSYECDIPIGAGICASYQTQTNSPRRARSVASQSIIAYTMSLGAENSVAYSNNSIAIPTNFTISVTTEILPVSMTKTSVDCTMYICGDSTECSNLLLQYGSFCTQLNRALTGIAVEQDKNTQEVFAQVKQIYKTPPIKDFGGFNFSQILPDPSKPSKRSFIEDLLFNKVTLADAGFIKQYGDCLGDIAARDLICAQKFNGLTVLPPLLTDEMIAQYTSALLAGTITSGWTFGAGAALQIPFAMQMAYRFNGIGVTQNVLYENQKLIANQFNSAIGKIQDSLSSTASALGKLQDVVNQNAQALNTLVKCLSSNFGAISSVLNDILSRLDKVEAEVQIDRLITGRLQCLQTYVTQQLIRAAEIRASANLAATKMSECVLGQSKRVDFCGKGYHLMSFPQSAPHGVVFLHVTYVPAQEKNFTTAPAICHDGKAHFPREGVFVSNGTHWFVTQRNFYEPQIITTDNTFVSGNCDVVIGIVNNTVYDPLQPELDSFKEELDKYFKNHTSPDVDLGDISGINASVVNIQKEIDRLNEVAKNLNESLIDLQELGKYEQYIKGGGSGGGQIYEGKLTAEGLRFGIVASRFNHALVDRLVEGAIDAIVRHGGREEDITLVRVPGSWEIPVAAGELARKEDIDAVIAIGVLIRGATPHFDYIASEVSKGLADLSLELRKPITFGVITADTLEQAIERAGTKHGNKGWEAALSAIEMANLFKSLR

SEQ ID NO: 4316 - protein, 1371 aa, Artificial Sequence
  SARS-CoV-2/Belgium/BA-02291/2020__EPI_ISL_415159 spike protein (1-1211)(Q965C_S1003C) LumSynth construct
MFVFLVLLPLVSSQCVNLTTRTQLPPAYTNSFTRGVYYPDKVFRSSVLHSTQDLFLPFFSNVTWFHAIHVSGTNGTKRFDNPVLPFNDGVYFASTEKSNIIRGWIFGTTLDSKTQSLLIVNNATNVVIKVCEFQFCNDPFLGVYYHKNNKSWMESEFRVYSSANNCTFEYVSQPFLMDLEGKQGNFKNLREFVFKNIDGYFKIYSKHTPINLVRDLPQGFSALEPLVDLPIGINITRFQTLLALHRSYLTPGDSSSGWTAGAAAYYVGYLQPRTFLLKYNENGTITDAVDCALDPLSETKCTLKSFTVEKGIYQTSNFRVQPTESIVRFPNITNLCPFGEVFNATRFASVYAWNRKRISNCVADYSVLYNSASFSTFKCYGVSPTKLNDLCFTNVYADSFVIRGDEVRQIAPGQTGKIADYNYKLPDDFTGCVIAWNSNNLDSKVGGNYNYLYRLFRRSNLKPFERDISTEIYQAGSTPCNGVEGFNCYFPLQSYGFQPTNGVGYQPYRVVVLSFELLPAPATVCGPKKSTNLVKNKCVNFNFNGLTGTGVLTESNKKFLPFQQFGRDIADTTDAVRDPQTLEILDITPCSFGGVSVITPGTNTSNQVAVLYQGVNCTEVPVAIHADQLTPTWRVYSTGSNVFQTRAGCLIGAEHVNNSYECDIPIGAGICASYQTQTNSPRRARSVASQSIIAYTMSLGAENSVAYSNNSIAIPTNFTISVTTEILPVSMTKTSVDCTMYICGDSTECSNLLLQYGSFCTQLNRALTGIAVEQDKNTQEVFAQVKQIYKTPPIKDFGGFNFSQILPDPSKPSKRSFIEDLLFNKVTLADAGFIKQYGDCLGDIAARDLICAQKFNGLTVLPPLLTDEMIAQYTSALLAGTITSGWTFGAGAALQIPFAMQMAYRFNGIGVTQNVLYENQKLIANQFNSAIGKIQDSLSSAAPALGKLQDVVNQNAQALNTLVKCLSSNFGAISSVLNDILSRLDKVEAEVQIDRLITGRLQCLQTYVTQQLIRAAEIRASANLAATKMSECVLGQSKRVDFCGKGYHLMSFPQSAPHGVVFLHVTYVPAQEKNFTTAPAICHDGKAHFPREGVFVSNGTHWFVTQRNFYEPQIITTDNTFVSGNCDVVIGIVNNTVYDPLQPELDSFKEELDKYFKNHTSPDVDLGDISGINASVVNIQKEIDRLNEVAKNLNESLIDLQELGKYEQYIKGGGSGGGQIYEGKLTAEGLRFGIVASRFNHALVDRLVEGAIDAIVRHGGREEDITLVRVPGSWEIPVAAGELARKEDIDAVIAIGVLIRGATPHFDYIASEVSKGLADLSLELRKPITFGVITADTLEQAIERAGTKHGNKGWEAALSAIEMANLFKSLR

SEQ ID NO: 4317 - protein, 1371 aa, Artificial Sequence
  SARS-CoV-2/USA/WA8-UW5/2020__EPI_ISL_413486 spike protein (1-1211)(Q965C_S1003C) LumSynth construct
MFVFLVLLPLVSSQCVNLTTRTQLPPAYTNSFTRGVYYPDKVFRSSVLHSTQDLFLPFFSNVTWFHAIHVSGTNGTKRFDNPVLPFNDGVYFASTEKSNIIRGWIFGTTLDSKTQSLLIVNNATNVVIKVCEFQFCNDPFLGVYYHKNNKSWMESEFRVYSSANNCTFEYVSQPFLMDLEGKQGNFKNLREFVFKNIDGYFKIYSKHTPINLVRDLPQGFSALEPLVDLPIGINITRFQTLLALHRSYLTPGDSSSGWTAGAAAYYVGYLQPRTFLLKYNENGTITDAVDCALDPLSETKCTLKSFTVEKGIYQTSNFRVQPTESIVRFPNITNLCPFGEVFNATRFASVYAWNRKRISNCVADYSVLYNSASFSTFKCYGVSPTKLNDLCFTNVYADSFVIRGDEVRQIAPGQTGKIADYNYKLPDDFTGCVIAWNSNNLDSKVGGNYNYLYRLFRKSNLKPFERDISTEIYQAGSTPCNGVEGFNCYFPLQSYGFQPTNGVGYQPYRVVVLSFELLHAPATVCGPKKSTNLVKNKCVNFNFNGLTGTGVLTESNKKFLPFQQFGRDIADTTDAVRDPQTLEILDITPCSFGGVSVITPGTNTSNQVAVLYQDVNCTEVPVAIHADQLTPTWRVYSTGSNVFQTRAGCLIGAEYVNNSYECDIPIGAGICASYQTQTNSPRRARSVASQSIIAYTMSLGAENSVAYSNNSIAIPTNFTISVTTEILPVSMTKTSVDCTMYICGDSTECSNLLLQYGSFCTQLNRALTGIAVEQDKNTQEVFAQVKQIYKTPPIKDFGGFNFSQILPDPSKPSKRSFIEDLLFNKVTLADAGFIKQYGDCLGDIAARDLICAQKFNGLTVLPPLLTDEMIAQYTSALLAGTITSGWTFGAGAALQIPFAMQMAYRFNGIGVTQNVLYENQKLIANQFNSAIGKIQDSLSSTASALGKLQDVVNQNAQALNTLVKCLSSNFGAISSVLNDILSRLDKVEAEVQIDRLITGRLQCLQTYVTQQLIRAAEIRASANLAATKMSECVLGQSKRVDFCGKGYHLMSFPQSAPHGVVFLHVTYVPAQEKNFTTAPAICHDGKAHFPREGVFVSNGTHWFVTQRNFYEPQIITTDNTFVSGNCDVVIGIVNNTVYDPLQPELDSFKEELDKYFKNHTSPDVDLGDISGINASVVNIQKEIDRLNEVAKNLNESLIDLQELGKYEQYIKGGGSGGGQIYEGKLTAEGLRFGIVASRFNHALVDRLVEGAIDAIVRHGGREEDITLVRVPGSWEIPVAAGELARKEDIDAVIAIGVLIRGATPHFDYIASEVSKGLADLSLELRKPITFGVITADTLEQAIERAGTKHGNKGWEAALSAIEMANLFKSLR

SEQ ID NO: 4318 - protein, 1371 aa, Artificial Sequence
  SARS-CoV-2/England/20102000506/2020__EPI_ISL_415147 spike protein (1-1211)(Q965C_S1003C) LumSynth construct
MFVFLVLLPLVSSQCVNLTTRTQLPPAYTNSFTRGVYYPDKVFRSSVLHSTQDLFLPFFSNVTWFHAIHVSGTNGTKRFDNPVLPFNDGVYFASTEKSNIIRGWIFGTTLDSKTQSLLIVNNATNVVIKVCEFQFCNDPFLGVYYHKNNKSWMESEFRVYSSANNCTFEYVSQPFLMDLEGKQGNFKNLREFVFKNIDGYFKIYSKHTPINLVRDLPQGFSALEPLVDLPIGINITRFQTLLALHRSYLTPGDSSSGWTAGAAAYYVGYLQPRTFLLKYNENGTITDAVDCALDPLSETKCTLKSFTVEKGIYQTSNFRVQPTESIVRFPNITNLCPFGEVFNATRFASVYAWNRKRISNCVADYSVLYNSASFSTFKCYGVSPTKLNDLCFTNVYADSFVIRGDEVRQIAPGQTGKIADYNYKLPDDFTGCVIAWNSNNLDSKVGGNYNYLYRLFRKSNLKPFERDISTEIYQAGSTPCNGVEGFNCYFPLQSYGFQPTNGVGYQPYRVVVLSFELLHAPATVCGPKKSTNLVKNKCVNFNFNGLTGTGVLTESNKKFLPFQQFGRDIADTTDAVRDPQTLEILDITPCSFGGVSVITPGTNTSNQVAVLYQGVNCTEVPVAIHADQLTPTWRVYSTGSNVFQTRAGCLIGAEHVNNSYECDIPIGAGICASYQTQTNSPRRARSVASQSIIAYTMSLGAENSVAYSNNSIAIPTNFTISVTTEILPVSMTKTSVDCTMYICGDSTECSNLLLQYGSFCTQLNRALTGIAVEQDKNTQEVFAQVKQIYKTPPIKDFGGFNFSQILPDPSKPSKRSFIEDLLFNKVTLADAGFIKQYGYCLGDIAARDLICAQKFNGLTVLPPLLTDEMIAQYTSALLAGTITSGWTFGAGAALQIPFAMQMAYRFNGIGVTQNVLYENQKLIANQFNSAIGKIQDSLSSTASALGKLQDVVNQNAQALNTLVKCLSSNFGAISSVLNDILSRLDKVEAEVQIDRLITGRLQCLQTYVTQQLIRAAEIRASANLAATKMSECVLGQSKRVDFCGKGYHLMSFPQSAPHGVVFLHVTYVPAQEKNFTTAPAICHDGKAHFPREGVFVSNGTHWFVTQRNFYEPQIITTDNTFVSGNCDVVIGIVNNTVYDPLQPELDSFKEELDKYFKNHTSPDVDLGDISGINASVVNIQKEIDRLNEVAKNLNESLIDLQELGKYEQYIKGGGSGGGQIYEGKLTAEGLRFGIVASRFNHALVDRLVEGAIDAIVRHGGREEDITLVRVPGSWEIPVAAGELARKEDIDAVIAIGVLIRGATPHFDYIASEVSKGLADLSLELRKPITFGVITADTLEQAIERAGTKHGNKGWEAALSAIEMANLFKSLR

SEQ ID NO: 4319 - protein, 1371 aa, Artificial Sequence
  SARS-CoV-2/Belgium/VAG-03013/2020__EPI_ISL_415155 spike protein (1-1211)(Q965C_S1003C) LumSynth construct
MFVFLVLLPLVSSQCVNLTTRTQLPPAYTNSFTRGVYYPDKVFRSSVLHSTQDLFLPFFSNVTWFHAIHVSGTNGTKRFDNPVLPFNDGVYFASTEKSNIIRGWIFGTTLDSKTQSLLIVNNATNVVIKVCEFQFCNDPFLGVYYHKNNKSWMESEFRVYSSANNCTFEYVSQPFLMDLEGKQGNFKNLREFVFKNIDGYFKIYSKHTPINLVRDLPQGFSALEPLVDLPIGINITRFQTLLALHRSYLTPGDSSSGWTAGAAAYYVGYLQPRTFLLKYNENGTITDAVDCALDPLSETKCTLKSFTVEKGIYQTSNFRVQPTESIVRFPNITNLCPFGEVFNATRFASVYAWNRKRISNCVADYSVLYNSASFSTFKCYGVSPTKLNDLCFTNVYADSFVIRGDEVRQIAPGQTGKIADYNYKLPDDFTGCVIAWNSNNLDSKVGGNYNYLYRLFRKSNLKPFERDISTEIYQAGSTPCNGVEGFNCYFPLQSYGFQPTNGVGYQPYRVVVLSFELLHAPATVCGPKKSTNLVKNKCVNFNFNGLTGTGVLTESNKKFLPFQQFGRDIADTTDAVRDPQTLEILDITPCSFGGVSVITPGTNTSNQVAVLYQGVNCTEVPVAIHADQLTPTWRVYSTGSNVFQTRAGCLIGAEHVNNSYECDIPIGAGICASYQTQTNSPRRARSVASQSIIAYTMSLGAENSVAYSNNSIAIPTNFTISVTTEILPVSMTKTSVDCTMYICGDSTECSNLLLQYGSFCTQLNRALTGIAVEQDKNTQEVFAQVKQIYKTPPIKDFGGFNFSQILPDPSKPSKRSFIEDLLFNKVTLADAGFIKQYGDCLGDIAARDLICAQKFNGLTVLPPLLTDEMIAQYTSALLAGTITSGWTFGAGAALQIPFAMQMAYRFNGIGVTQNVLYENQKLIANQFNSAIGKIQDSLSSTATALGKLQDVVNQNAQALNTLVKCLSSNFGAISSVLNDILSRLDKVEAEVQIDRLITGRLQCLQTYVTQQLIRAAEIRASANLAATKMSECVLGQSKRVDFCGKGYHLMSFPQSAPHGVVFLHVTYVPAQEKNFTTAPAICHDGKAHFPREGVFVSNGTHWFVTQRNFYEPQIITTDNTFVSGNCDVVIGIVNNTVYDPLQPELDSFKEELDKYFKNHTSPDVDLGDISGINASVVNIQKEIDRLNEVAKNLNESLIDLQELGKYEQYIKGGGSGGGQIYEGKLTAEGLRFGIVASRFNHALVDRLVEGAIDAIVRHGGREEDITLVRVPGSWEIPVAAGELARKEDIDAVIAIGVLIRGATPHFDYIASEVSKGLADLSLELRKPITFGVITADTLEQAIERAGTKHGNKGWEAALSAIEMANLFKSLR

SEQ ID NO: 4320 - protein, 1371 aa, Artificial Sequence
  SARS-CoV-2/Belgium/BC-03016/2020__EPI_ISL_415157 spike protein (1-1211)(Q965C_S1003C) LumSynth construct
MFVFLVLLPLVSSQCVNLTTRTQLPPAYTNSFTRGVYYPDKVFRSSVLHSTQDLFLPFFSNVTWFHAIHVSGTNGTKRFDNPVLPFNDGVYFASTEKSNIIRGWIFGTTLDSKTQSLLIVNNATNVVIKVCEFQFCNDPFLGVYYHKNNKSWMESEFRVYSSANNCTFEYVSQPFLMDLEGKQGNFKNLREFVFKNIDGYFKIYSKHTPINLVRDLPQGFSALEPLVDLPIGINITRFQTLLALHRSYLTPGDSSSGWTAGAAAYYVGYLQPRTFLLKYNENGTITDAVDCALDPLSETKCTLKSFTVEKGIYQTSNFRVQPTESIVRFPNITNLCPFGEVFNATRFASVYAWNRKRISNCVADYSVLYNSASFSTFKCYGVSPTKLNDLCFTNVYADSFVIRGDEVRQIAPGQTGKIADYNYKLPDDFTGCVIAWNSNNLDSKVGGNYNYLYRLFRKSNLKPFERDISTEIYQAGSTPCNGVEGFNCYFPLQSYGFQPTNGVGYQPYRVVVLSFELLHAPATVCGPKKSTNLVKNKCVNFNFNGLTGTGVLTESNKKFLPFQQFGRDIADTTDAVRDPQTLEILDITPCSFGGVSVITPGTNTSNQVAVLYQGVNCTEVPVAIHADQLTPTWRVYSTGSNVFQTRAGCLIGAEHVNNSYECDIPIGAGICASYQTQTNSPRRARSVASQSIIAYTMSLGAENSVAYSNNSIAIPTNFTISVTTEILPVSMTKTSVDCTMYICGDSTECSNLLLQYGSFCTQLNRALTGIAVEQDKNTQEVFAQVKQIYKTPPIKDFGGFNFSQILPDPSKPSKRSFIEDLLFNKVTLADAGFIKQYGDCLGDIAARDLICAQKFNGLTVLPPLLTDEMIAQYTSALLAGTITSGWTFGAGAALQIPFAMQMAYRFNGIGVTQNVLYENQKLIANQFNSAIGKIQDSLSSTAPALGKLQDVVNQNAQALNTLVKCLSSNFGAISSVLNDILSRLDKVEAEVQIDRLITGRLQCLQTYVTQQLIRAAEIRASANLAATKMSECVLGQSKRVDFCGKGYHLMSFPQSAPHGVVFLHVTYVPAQEKNFTTAPAICHDGKAHFPREGVFVSNGTHWFVTQRNFYEPQIITTDNTFVSGNCDVVIGIVNNTVYDPLQPELDSFKEELDKYFKNHTSPDVDLGDISGINASVVNIQKEIDRLNEVAKNLNESLIDLQELGKYEQYIKGGGSGGGQIYEGKLTAEGLRFGIVASRFNHALVDRLVEGAIDAIVRHGGREEDITLVRVPGSWEIPVAAGELARKEDIDAVIAIGVLIRGATPHFDYIASEVSKGLADLSLELRKPITFGVITADTLEQAIERAGTKHGNKGWEAALSAIEMANLFKSLR

SEQ ID NO: 4321 - protein, 1371 aa, Artificial Sequence
  SARS-CoV-2/Germany/BavPat3/2020__EPI_ISL_414521 spike protein (1-1211)(Q965C_S1003C) LumSynth construct
MFVFLVLLPLVSSQCVNLTTRTQLPPAYTNSFTRGVYYPDKVFRSSVLHSTQDLFLPFFSNVTWFHAIHVSGTNGTKRFDNPVLPFNDGVYFASTEKSNIIRGWIFGTTLDSKTQSLLIVNNATNVVIKVCEFQFCNDPFLGVYYHKNNKSWMESEFRVYSSANNCTFEYVSQPFLMDLEGKQGNFKNLREFVFKNIDGYFKIYSKHTPINLVRDLPQGFSALEPLVDLPIGINITRFQTLLALHRSYLTPGDSSSGWTAGAAAYYVGYLQPRTFLLKYNENGTITDAVDCALDPLSETKCTLKSFTVEKGIYQTSNFRVQPTESIVRFPNITNLCPFGEVFNATRFASVYAWNRKRISNCVADYSVLYNSASFSTFKCYGVSPTKLNDLCFTNVYADSFVIRGDEVRQIAPGQTGKIADYNYKLPDDFTGCVIAWNSNNLDSKVGGNYNYLYRLFRKSNLKPFERDISTEIYQAGSTPCNGVEGFNCYFPLQSYGFQPTNGVGYQPYRVVVLSFELLHAPATVCGPKKSTNLVKNKCVNFNFNGLTGTGVLTESNKKFLPFQQFGRDIADTTDAVRDPQTLEILDITPCSFGGVSVITPGTNTSNQVAVLYQDVNCTEVPVAIHADQLTPTWRVYSTGSNVFQTRAGCLIGAEHVNNSYECDIPIGAGICASYQTQTNSPRRARSVASQSIIAYTMSLGAENSVAYSNNSIAIPTNFTISVTTEILPVSMTKTSVDCTMYICGDSTECSNLLLQYGSFCTQLNRALTGIAVEQDKNTQQVFAQVKQIYKTPPIKDFGGFNFSQILPDPSKPSKRSFIEDLLFNKVTLADAGFIKQYGDCLGDIAARDLICAQKFNGLTVLPPLLTDEMIAQYTSALLAGTITSGWTFGAGAALQIPFAMQMAYRFNGIGVTQNVLYENQKLIANQFNSAIGKIQDSLSSTASALGKLQDVVNQNAQALNTLVKCLSSNFGAISSVLNDILSRLDKVEAEVQIDRLITGRLQCLQTYVTQQLIRAAEIRASANLAATKMSECVLGQSKRVDFCGKGYHLMSFPQSAPHGVVFLHVTYVPAQEKNFTTAPAICHDGKAHFPREGVFVSNGTHWFVTQRNFYEPQIITTDNTFVSGNCDVVIGIVNNTVYDPLQPELDSFKEELDKYFKNHTSPDVDLGDISGINASVVNIQKEIDRLNEVAKNLNESLIDLQELGKYEQYIKGGGSGGGQIYEGKLTAEGLRFGIVASRFNHALVDRLVEGAIDAIVRHGGREEDITLVRVPGSWEIPVAAGELARKEDIDAVIAIGVLIRGATPHFDYIASEVSKGLADLSLELRKPITFGVITADTLEQAIERAGTKHGNKGWEAALSAIEMANLFKSLR

SEQ ID NO: 4322 - protein, 1371 aa, Artificial Sequence
  SARS-CoV-2/France/HF1805/2020__EPI_ISL_414628 spike protein (1-1211)(Q965C_S1003C) LumSynth construct
MFVFLVLLPLVSSQCVNLTTRTQLPPAYTNSFTRGVYYPDKVFRSSVLHSTQDLFLPFFSNVTWFHAIHVSGTNGTKRFDNPVLPFNDGVYFASTEKSNIIRGWIFGTTLDSKTQSLLIVNNATNVVIKVCEFQFCNDPFLGVYYHKNNKSWMESEFRVYSSANNCTFEYVSQPFLMDLEGKQGNFKNLREFVFKNIDGYFKIYSKHTPINLVRDLPQGFSALEPLVDLPIGINITRFQTLLALHRSYLTPGDSSSGWTAGAAAYYVGYLQPRTFLLKYNENGTITDAVDCALDPLSETKCTLKSFTVEKGIYQTSNFRVQPTESIVRFPNITNLCPFGEVFNATRFASVYAWNRKRISNCVADYSVLYNSASFSTFKCYGVSPTKLNDLCFTNVYADSFVIRGDEVRQIAPGQTGKIADYNYKLPDDFTGCVIAWNSNNLDSKVGGNYNYLYRLFRKSNLKPFERDISTEIYQAGSTPCNGVEGFNCYFPLQSYGFQPTNGVGYQPYRVVVLSFELLHAPATVCGPKKSTNLVKNKCVNFNFNGLTGTGVLTESNKKFLPFQQFGRDIADTTDAVRDPQTLEILDITPCSFGGVSVITPGTNTSNQVAVLYQGVNCTEVPVAIHADQLTPTWRVYSTGSNVFQTRAGCLIGAEHVNNSYECDIPIGAGICASYQTQTNSPRRARSVASQSIIAYTMSLGAENSVAYSNNSIAIPTNFTISVTTEILPVSMTKTSVDCTMYICGDSTECSNLLLQYGSFCTQLNRALTGIAVEQDKNTQEVFAQVKQIYKTPPIKDFGGFNFSQILPDPSKPSKRSFIEDLLFNKVTLADAGFIKQYGDCLGDIAARDLICAQKFNGLTVLPPLLTDEMIAQYTSALLAGTITSGWTFGAGAALQIPFAMQMAYRFNGIGVTQNVLYENQKLIANQFNSAIGKIQDSLSSTASALGKLQDVVNQNAQALNTLVKCLSSNFGAISSVLNDILSRLDKVEAEVQIDRLITGRLQCLQTYVTQQLIRAAEIRASANLAATKMSECVLGQSKRVDFCGKGYHLMSFPQSAPHGVVFLHVTYVPAQEKNFTTAPAICHDGKAHFPREGVFVSNGTHWFVTQRNFYEPQIITTDNTFVSGNCDVVIGVVNNTVYDPLQPELDSFKEELDKYFKNHTSPDVDLGDISGINASVVNIQKEIDRLNEVAKNLNESLIDLQELGKYEQYIKGGGSGGGQIYEGKLTAEGLRFGIVASRFNHALVDRLVEGAIDAIVRHGGREEDITLVRVPGSWEIPVAAGELARKEDIDAVIAIGVLIRGATPHFDYIASEVSKGLADLSLELRKPITFGVITADTLEQAIERAGTKHGNKGWEAALSAIEMANLFKSLR

SEQ ID NO: 4323 - protein, 1371 aa, Artificial Sequence
  SARS-CoV-2/Netherlands/ZuidHolland_9/2020__EPI_ISL_414445 spike protein (1-1211)(Q965C_S1003C) LumSynth construct
MFVFLVLLPLVSSQCVNLTTRTQLPPAYTNSFTRGVYYPDKVFRSSVLHSTQDLFLPFFSNVTWFHAIHVSGTNGTKRFDNPVLPFNDGVYFASTEKSNIIRGWIFGTTLDSKTQSLLIVNNATNVVIKVCEFQFCNDPFLGVYYHKNNKSWMESEFRVYSSANNCTFEYVSQPFLMDLEGKQGNFKNLREFVFKNIDGYFKIYSKHTPINLVRDLPQGFSALEPLVDLPIGINITRFQTLLALHRSYLTPGDSSSGWTAGAAAYYVGYLQPRTFLLKYNENGTITDAVDCALDPLSETKCTLKSFTVEKGIYQTSNFRVQPTESIVRFPNITNLCPFGEVFNATRFASVYAWNRKRISNCVADYSVLYNSASFSTFKCYGVSPTKLNDLCFTNVYADSFVIRGDEVRQIAPGQTGKIADYNYKLPDDFTGCVIAWNSNNLDSKVGGNYNYLYRLFRKSNLKPFERDISTEIYQAGSTPCNGVEGFNCYFPLQSYGFQPTNGVGYQPYRVVVLSFELLHAPATVCGPKKSTNLVKNKCVNFNFNGLTGTGVLTESNKKFLPFQQFGRDIADTTDAVRDPQTLEILDITPCSFGGVSVITPGTNTSNQVAVLYQGVNCTEVPVAIHADQLTPTWRVYSTGSNVFQTRAGCLIGAEHVNNSYECDIPIGAGICASYQTQTNSPRRARSVASQSIIAYTMSLGAENSVAYSNNSIAIPTNFTISVTTEILPVSMTKTSVDCTMYICGDSTECSNLLLQYGSFCTQLNRALTGIAVEQDKNTQEVFAQVKQIYKTPPIKDFGGFNFSQILPDPSKPSKRSFIEDLLFNKVTLADAGFIKQYGDCLGDIAARDLICVQKFNGLTVLPPLLTDEMIAQYTSALLAGTITSGWTFGAGAALQIPFAMQMAYRFNGIGVTQNVLYENQKLIANQFNSAIGKIQDSLSSTASALGKLQDVVNQNAQALNTLVKCLSSNFGAISSVLNDILSRLDKVEAEVQIDRLITGRLQCLQTYVTQQLIRAAEIRASANLAATKMSECVLGQSKRVDFCGKGYHLMSFPQSAPHGVVFLHVTYVPAQEKNFTTAPAICHDGKAHFPREGVFVSNGTHWFVTQRNFYEPQIITTDNTFVSGNCDVVIGIVNNTVYDPLQPELDSFKEELDKYFKNHTSPDVDLGDISGINASVVNIQKEIDRLNEVAKNLNESLIDLQELGKYEQYIKGGGSGGGQIYEGKLTAEGLRFGIVASRFNHALVDRLVEGAIDAIVRHGGREEDITLVRVPGSWEIPVAAGELARKEDIDAVIAIGVLIRGATPHFDYIASEVSKGLADLSLELRKPITFGVITADTLEQAIERAGTKHGNKGWEAALSAIEMANLFKSLR

SEQ ID NO: 4324 - protein, 1371 aa, Artificial Sequence
  SARS-CoV-2/Finland/FIN03032020A/2020__EPI_ISL_413602 spike protein (1-1211)(Q965C_S1003C) LumSynth construct
MFVFLVLLPLVSSQCVNLTTRTQLPPAYTNSFTRGVYYPDKVFRSSVLHSTQDLFLPFFSNVTWFHAIHVSGTNGTKRFDNPVLPFNDGVYFASTEKSNIIRGWIFGTTLDSKTQSLLIVNNATNVVIKVCEFQFCNDPFLGVYYHKNNKSWMESEFRVYSSANNCTFEYVSQPFLMDLEGKQGNFKNLREFVFKNIDGYFKIYSKHTPINLVRDLPQGFSALEPLVDLPIGINITRFQTLLALHRSYLTPGDSSSGWTAGAAAYYVGYLQPRTFLLKYNENGTITDAVDCALDPLSETKCTLKSFTVEKGIYQTSNFRVQPTESIVRFPNITNLCPFGEVFNATRFASVYAWNRKRISNCVADYSVLYNSASFSTFKCYGVSPTKLNDLCFTNVYADSFVIRGDEVRQIAPGQTGKIADYNYKLPDDFTGCVISWNSNNLDSKVGGNYNYLYRLFRKSNLKPFERDISTEIYQAGSTPCNGVEGFNCYFPLQSYGFQPTNGVGYQPYRVVVLSFELLHAPATVCGPKKSTNLVKNKCVNFNFNGLTGTGVLTESNKKFLPFQQFGRDIADTTDAVRDPQTLEILDITPCSFGGVSVITPGTNTSNQVAVLYQGVNCTEVPVAIHADQLTPTWRVYSTGSNVFQTRAGCLIGAEHVNNSYECDIPIGAGICASYQTQTNSPRRARSVASQSIIAYTMSLGAENSVAYSNNSIAIPTNFTISVTTEILPVSMTKTSVDCTMYICGDSTECSNLLLQYGSFCTQLNRALTGIAVEQDKNTQEVFAQVKQIYKTPPIKDFGGFNFSQILPDPSKPSKRSFIEDLLFNKVTLADAGFIKQYGDCLGDIAARDLICAQKFNGLTVLPPLLTDEMIAQYTSALLAGTITSGWTFGAGAALQIPFAMQMAYRFNGIGVTQNVLYENQKLIANQFNSAIGKIQDSLSSTASALGKLQDVVNQNAQALNTLVKCLSSNFGAISSVLNDILSRLDKVEAEVQIDRLITGRLQCLQTYVTQQLIRAAEIRASANLAATKMSECVLGQSKRVDFCGKGYHLMSFPQSAPHGVVFLHVTYVPAQEKNFTTAPAICHDGKAHFPREGVFVSNGTHWFVTQRNFYEPQIITTDNTFVSGNCDVVIGIVNNTVYDPLQPELDSFKEELDKYFKNHTSPDVDLGDISGINASVVNIQKEIDRLNEVAKNLNESLIDLQELGKYEQYIKGGGSGGGQIYEGKLTAEGLRFGIVASRFNHALVDRLVEGAIDAIVRHGGREEDITLVRVPGSWEIPVAAGELARKEDIDAVIAIGVLIRGATPHFDYIASEVSKGLADLSLELRKPITFGVITADTLEQAIERAGTKHGNKGWEAALSAIEMANLFKSLR

SEQ ID NO: 4325 - protein, 1371 aa, Artificial Sequence
  SARS-CoV-2/France/GE1977/2020__EPI_ISL_414632 spike protein (1-1211)(Q965C_S1003C) LumSynth construct
MFVFLVLLPLVSSQCVNLTTRTQLPPAYTNSFTRGVYYPDKVFRSSVLHSTQDLFLPFFSNVTWFHAIHVSGTNGTKRFDNPVLPFNDGVYFASTEKSNIIRGWIFGTTLDSKTQSLLIVNNATNVVIKVCEFQFCNDPFLGVYYHKNNKSWMESEFRVYSSANNCTFEYVSQPFLMDLEGKQGNFKNLREFVFKNIDGYFKIYSKHTPINLVRDLPQGFSALEPLVDLPIGINITRFQTLLALHRSYLTPGDSSSGWTAGAAAYYVGYLQPRTFLLKYNENGTITDAVDCALDPLSETKCTLKSFTVEKGIYQTSNFRVQPTESIVRFPNITNLCPFGEVFNATRFASVYAWNRKRISNCVADYSVLYNSASFSTFKCYGVSPTKLNDLCFTNVYADSFVIRGDEVRQIAPGQTGKIADYNYKLPDDFTGCVIAWNSNNLDSKVGGNYNYLYRLFRKSNLKPFERDISTEIYQAGSTPCNGVEGFNCYFPLQSYGFQPTNGVGYQPYRVVVLSFELLHAPATVCGPKKSTNLVKNKCVNFNFNGLTGTGVLTESNKKFLPFQQFGRDIADTTDAVRDPQTLEILDITPCSFGGVSVITPGTNTSNQVAVLYQGVNCTEVPVAIHADQLTPTWRVYSTGSNVFQTRAGCLIGAEHVNNSYECDIPIGAGICASYQTQTNSPRRARSVASQSIIAYTMSLGAENSVAYSNNSIAIPTNFTISVTTEILPVSMTKTSVDCTMYICGDSTECSNLLLQYGSFCTQLNRALTGIAVEQDKNTQEVFAQVKQIYKTPPIKDFGGFNFSQILPDPSKPSKRSFIEDLLFNKVTLADAGFIKQYGDCLGDIAARDLICAQKFNGLTVLPPLLTDEMIAQYTSALLAGTITSGWTFGAGAALQIPFAMQMAYRFNGIGVTQNVLYENQKLIANQFNSAIGKIQDSLFSTASALGKLQDVVNQNAQALNTLVKCLSSNFGAISSVLNDILSRLDKVEAEVQIDRLITGRLQCLQTYVTQQLIRAAEIRASANLAATKMSECVLGQSKRVDFCGKGYHLMSFPQSAPHGVVFLHVTYVPAQEKNFTTAPAICHDGKAHFPREGVFVSNGTHWFVTQRNFYEPQIITTDNTFVSGNCDVVIGIVNNTVYDPLQPELDSFKEELDKYFKNHTSPDVDLGDISGINASVVNIQKEIDRLNEVAKNLNESLIDLQELGKYEQYIKGGGSGGGQIYEGKLTAEGLRFGIVASRFNHALVDRLVEGAIDAIVRHGGREEDITLVRVPGSWEIPVAAGELARKEDIDAVIAIGVLIRGATPHFDYIASEVSKGLADLSLELRKPITFGVITADTLEQAIERAGTKHGNKGWEAALSAIEMANLFKSLR

SEQ ID NO: 4326 - protein, 1371 aa, Artificial Sequence
  SARS-CoV-2/Finland/FIN-313/2020__EPI_ISL_414641 spike protein (1-1211)(Q965C_S1003C) LumSynth construct
MFVFLVLLPLVSSQCVNLTTRTQLPPAYTNSFTRGVYYPDKVFRSSVLHSTQDLFLPFFSNVTWFHAIHVSGTNGTKRFDNPVLPFNDGVYFASTEKSNIIRGWIFGTTLDSKTQSLLIVNNATNVVIKVCEFQFCNDPFLGVYYHKNNKSWMESEFRVYSSANNCTFEYVSQPFLMDLEGKQGNFKNLREFVFKNIDGYFKIYSKHTPINLVRDLPQGFSALEPLVDLPIGINITRFKTLLALHRSYLTPGDSSSGWTAGAAAYYVGYLQPRTFLLKYNENGTITDAVDCALDPLSETKCTLKSFTVEKGIYQTSNFRVQPTESIVRFPNITNLCPFGEVFNATRFASVYAWNRKRISNCVADYSVLYNSASFSTFKCYGVSPTKLNDLCFTNVYADSFVIRGDEVRQIAPGQTGKIADYNYKLPDDFTGCVIAWNSNNLDSKVGGNYNYLYRLFRKSNLKPFERDISTEIYQAGSTPCNGVEGFNCYFPLQSYGFQPTNGVGYQPYRVVVLSFELLHAPATVCGPKKSTNLVKNKCVNFNFNGLTGTGVLTESNKKFLPFQQFGRDIADTTDAVRDPQTLEILDITPCSFGGVSVITPGTNTSNQVAVLYQGVNCTEVPVAIHADQLTPTWRVYSTGSNVFQTRAGCLIGAEHVNNSYECDIPIGAGICASYQTQTNSPRRARSVASQSIIAYTMSLGAENSVAYSNNSIAIPTNFTISVTTEILPVSMTKTSVDCTMYICGDSTECSNLLLQYGSFCTQLNRALTGIAVEQDKNTQEVFAQVKQIYKTPPIKDFGGFNFSQILPDPSKPSKRSFIEDLLFNKVTLADAGFIKQYGDCLGDIAARDLICAQKFNGLTVLPPLLTDEMIAQYTSALLAGTITSGWTFGAGAALQIPFAMQMAYRFNGIGVTQNVLYENQKLIANQFNSAIGKIQDSLSSTASALGKLQDVVNQNAQALNTLVKCLSSNFGAISSVLNDILSRLDKVEAEVQIDRLITGRLQCLQTYVTQQLIRAAEIRASANLAATKMSECVLGQSKRVDFCGKGYHLMSFPQSAPHGVVFLHVTYVPAQEKNFTTAPAICHDGKAHFPREGVFVSNGTHWFVTQRNFYEPQIITTDNTFVSGNCDVVIGIVNNTVYDPLQPELDSFKEELDKYFKNHTSPDVDLGDISGINASVVNIQKEIDRLNEVAKNLNESLIDLQELGKYEQYIKGGGSGGGQIYEGKLTAEGLRFGIVASRFNHALVDRLVEGAIDAIVRHGGREEDITLVRVPGSWEIPVAAGELARKEDIDAVIAIGVLIRGATPHFDYIASEVSKGLADLSLELRKPITFGVITADTLEQAIERAGTKHGNKGWEAALSAIEMANLFKSLR

SEQ ID NO: 4327 - protein, 1371 aa, Artificial Sequence
  SARS-CoV-2/Netherlands/ZuidHolland_2/2020__EPI_ISL_414556 spike protein (1-1211)(Q965C_S1003C) LumSynth construct
MFVFLVLLPLVSSQCVNLTTRTQLPPAYTNSFTRGVYYPDKVFRSSVLHSTQDLFLPFFSNVTWFHAIHVSGTNGTKRFDNPVLPFNDGVYFASTEKSNIIRGWIFGTTLDSKTQSLLIVNNATNVVIKVCEFQFCNDPFLGVYYHKNNKSWMESEFRVYSSANNCTFEYVSQPFLMDLEGKQGNFKNLREFVFKNIDGYFKIYSKHTPINLVRDLPQGFSALEPLVDLPIGINITRFQTLLALHRSYLTPGDSSSGWTAGAAAYYVGYLQPRTFLLKYNENGTITDAVDCALDPLSETKCTLKSFTVEKGIYQTSNFRVQPTESIVRFPNITNLCPFGEVFNATRFASVYAWNRKRISNCVADYSVLYNSASFSTFKCYGVSPTKLNDLCFTNVYADSFVIRGDEVRQIAPGQTGKIADYNYKLPDDFTGCVIAWNSNNLDSKVGGNYNYLYRLFRKSNLKPFERDISTEIYQAGSTPCNGVEGFNCYFPLQSYGFQPTNGVGYQPYRVVVLSFELLHAPATVCGPKKSTNLVKNKCVNFNFNGLTGTGVLTESNKKFLPFQQFGRDIADTTDAVRDPQTLEILDITPCSFGGVSVITPGTNTSNQVAVLYQGVNCTEVPVAIHADQLTPTWRVYSTGSNVFQTRAGCLIGAEHVNNSYECDIPIGAGICASYQTQTNSPRRARSVASQSIIAYTMSLGAENSVAYSNNSIAIPTNFTISVTTEILPVSMTKTSVDCTMYICGDSTECSNLLLQYGSFCTQLNRALTGIALEQDKNTQEVFAQVKQIYKTPPIKDFGGFNFSQILPDPSKPSKRSFIEDLLFNKVTLADAGFIKQYGDCLGDIAARDLICAQKFNGLTVLPPLLTDEMIAQYTSALLAGTITSGWTFGAGAALQIPFAMQMAYRFNGIGVTQNVLYENQKLIANQFNSAIGKIQDSLSSTASALGKLQDVVNQNAQALNTLVKCLSSNFGAISSVLNDILSRLDKVEAEVQIDRLITGRLQCLQTYVTQQLIRAAEIRASANLAATKMSECVLGQSKRVDFCGKGYHLMSFPQSAPHGVVFLHVTYVPAQEKNFTTAPAICHDGKAHFPREGVFVSNGTHWFVTQRNFYEPQIITTDNTFVSGNCDVVIGIVNNTVYDPLQPELDSFKEELDKYFKNHTSPDVDLGDISGINASVVNIQKEIDRLNEVAKNLNESLIDLQELGKYEQYIKGGGSGGGQIYEGKLTAEGLRFGIVASRFNHALVDRLVEGAIDAIVRHGGREEDITLVRVPGSWEIPVAAGELARKEDIDAVIAIGVLIRGATPHFDYIASEVSKGLADLSLELRKPITFGVITADTLEQAIERAGTKHGNKGWEAALSAIEMANLFKSLR

SEQ ID NO: 4328 - protein, 1371 aa, Artificial Sequence
  SARS-CoV-2/USA/WA-UW31/2020__EPI_ISL_414618 spike protein (1-1211)(Q965C_S1003C) LumSynth construct
MFVFLVLLPLVSSQCVNLTTRTQLPPAYTNSFTRGVYYPDKVFRSSVLHSTQDLFLPFFSNVTWFHAIHVSGTNGTKRFDNPVLPFNDGVYFASTEKSNIIRGWIFGTTLDSKTQSLLIVNNATNVVIKVCEFQFCNDPFLGVYYHKNNKSWMESEFRVYSSANNCTFEYVSQPFLMDLEGKQGNFKNLREFVFKNIDGYFKIYSKHTPINLVRDLPQGFSALEPLVDLPIGINITRFQTLLALHRSYLTPGDSSSGWTAGAAAYYVGYLQPRTFLLKYNENGTITDAVDCALDPLSETKCTLKSFTVEKGIYQTSNFRVQPTESIVRFPNITNLCPFGEVFNATRFASVYAWNRKRISNCVADYSVLYNSASFSTFKCYGVSPTKLNDLCFTNVYADSFVIRGDEVRQIAPGQTGKIADYNYKLPDDFTGCVIAWNSNNLDSKVGGNYNYLYRLFRKSNLKPFERDISTEIYQAGSTPCNGAEGFNCYFPLQSYGFQPTNGVGYQPYRVVVLSFELLHAPATVCGPKKSTNLVKNKCVNFNFNGLTGTGVLTESNKKFLPFQQFGRDIADTTDAVRDPQTLEILDITPCSFGGVSVITPGTNTSNQVAVLYQDVNCTEVPVAIHADQLTPTWRVYSTGSNVFQTRAGCLIGAEHVNNSYECDIPIGAGICASYQTQTNSPRRARSVASQSIIAYTMSLGAENSVAYSNNSIAIPTNFTISVTTEILPVSMTKTSVDCTMYICGDSTECSNLLLQYGSFCTQLNRALTGIAVEQDKNTQEVFAQVKQIYKTPPIKDFGGFNFSQILPDPSKPSKRSFIEDLLFNKVTLADAGFIKQYGDCLGDIAARDLICAQKFNGLTVLPPLLTDEMIAQYTSALLAGTITSGWTFGAGAALQIPFAMQMAYRFNGIGVTQNVLYENQKLIANQFNSAIGKIQDSLSSTASALGKLQDVVNQNAQALNTLVKCLSSNFGAISSVLNDILSRLDKVEAEVQIDRLITGRLQCLQTYVTQQLIRAAEIRASANLAATKMSECVLGQSKRVDFCGKGYHLMSFPQSAPHGVVFLHVTYVPAQEKNFTTAPAICHDGKAHFPREGVFVSNGTHWFVTQRNFYEPQIITTDNTFVSGNCDVVIGIVNNTVYDPLQPELDSFKEELDKYFKNHTSPDVDLGDISGINASVVNIQKEIDRLNEVAKNLNESLIDLQELGKYEQYIKGGGSGGGQIYEGKLTAEGLRFGIVASRFNHALVDRLVEGAIDAIVRHGGREEDITLVRVPGSWEIPVAAGELARKEDIDAVIAIGVLIRGATPHFDYIASEVSKGLADLSLELRKPITFGVITADTLEQAIERAGTKHGNKGWEAALSAIEMANLFKSLR

SEQ ID NO: 4329 - protein, 1371 aa, Artificial Sequence
  SARS-CoV-2/South Korea/SNU01/2020__EPI_ISL_411929 spike protein (1-1211)(Q965C_S1003C) LumSynth construct
MFVFLVLLPLVSSQCVNLTTRTQLPPAYTNSFTRGVYYPDKVFRSSVLHSTQDLFLPFFSNVTWFHAIHVSGTNGTKRFDNPVLPFNDGVYFASTEKSNIIRGWIFGTTLDSKTQSLLIVNNATNVVIKVCEFQFCNDPFLGVYYHKNNKSWMESEFRVYSSANNCTFEYVSQPFLMDLEGKQGNFKNLREFVFKNIDGYFKIYSKHTPINLVRDLPQGFWALEPLVDLPIGINITRFQTLLALHRSYLTPGDSSSGWTAGAAAYYVGYLQPRTFLLKYNENGTITDAVDCALDPLSETKCTLKSFTVEKGIYQTSNFRVQPTESIVRFPNITNLCPFGEVFNATRFASVYAWNRKRISNCVADYSVLYNSASFSTFKCYGVSPTKLNDLCFTNVYADSFVIRGDEVRQIAPGQTGKIADYNYKLPDDFTGCVIAWNSNNLDSKVGGNYNYLYRLFRKSNLKPFERDISTEIYQAGSTPCNGVEGFNCYFPLQSYGFQPTNGVGYQPYRVVVLSFELLHAPATVCGPKKSTNLVKNKCVNFNFNGLTGTGVLTESNKKFLPFQQFGRDIADTTDAVRDPQTLEILDITPCSFGGVSVITPGTNTSNQVAVLYQDVNCTEVPVAIHADQLTPTWRVYSTGSNVFQTRAGCLIGAEHVNNSYECDIPIGAGICASYQTQTNSPRRARSVASQSIIAYTMSLGAENSVAYSNNSIAIPTNFTISVTTEILPVSMTKTSVDCTMYICGDSTECSNLLLQYGSFCTQLNRALTGIAVEQDKNTQEVFAQVKQIYKTPPIKDFGGFNFSQILPDPSKPSKRSFIEDLLFNKVTLADAGFIKQYGDCLGDIAARDLICAQKFNGLTVLPPLLTDEMIAQYTSALLAGTITSGWTFGAGAALQIPFAMQMAYRFNGIGVTQNVLYENQKLIANQFNSAIGKIQDSLSSTASALGKLQDVVNQNAQALNTLVKCLSSNFGAISSVLNDILSRLDKVEAEVQIDRLITGRLQCLQTYVTQQLIRAAEIRASANLAATKMSECVLGQSKRVDFCGKGYHLMSFPQSAPHGVVFLHVTYVPAQEKNFTTAPAICHDGKAHFPREGVFVSNGTHWFVTQRNFYEPQIITTDNTFVSGNCDVVIGIVNNTVYDPLQPELDSFKEELDKYFKNHTSPDVDLGDISGINASVVNIQKEIDRLNEVAKNLNESLIDLQELGKYEQYIKGGGSGGGQIYEGKLTAEGLRFGIVASRFNHALVDRLVEGAIDAIVRHGGREEDITLVRVPGSWEIPVAAGELARKEDIDAVIAIGVLIRGATPHFDYIASEVSKGLADLSLELRKPITFGVITADTLEQAIERAGTKHGNKGWEAALSAIEMANLFKSLR

SEQ ID NO: 4330 - protein, 1371 aa, Artificial Sequence
  SARS-CoV-2/China/WF0004/2020__EPI_ISL_413694 spike protein (1-1211)(Q965C_S1003C) LumSynth construct
MFVFLVLLPLVSSQCVNLTTRTQLPPAYTNSFTRGVYYPDKVFRSSVLHSTQDLFLPFFSNVTWFHAIHVSGTNGTKRFDNPVLPFNDGVYFASTEKSNIIRGWIFGTTLDSKTQSLLIVNNATNVVIKVCEFQFCNDPFLGVYYHKNNKSWTESEFRVYSSANNCTFEYVSQPFLMDLEGKQGNFKNLREFVFKNIDGYFKIYSKHTPINLVRDLPQGFSALEPLVDLPIGINITRFQTLLALHRSYLTPGDSSSGWTAGAAAYYVGYLQPRTFLLKYNENGTITDAVDCALDPLSETKCTLKSFTVEKGIYQTSNFRVQPTESIVRFPNITNLCPFGEVFNATRFASVYAWNRKRISNCVADYSVLYNSASFSTFKCYGVSPTKLNDLCFTNVYADSFVIRGDEVRQIAPGQTGKIADYNYKLPDDFTGCVIAWNSNNLDSKVGGNYNYLYRLFRKSNLKPFERDISTEIYQAGSTPCNGVEGFNCYFPLQSYGFQPTNGVGYQPYRVVVLSFELLHAPATVCGPKKSTNLVKNKCVNFNFNGLTGTGVLTESNKKFLPFQQFGRDIADTTDAVRDPQTLEILDITPCSFGGVSVITPGTNTSNQVAVLYQDVNCTEVPVAIHADQLTPTWRVYSTGSNVFQTRAGCLIGAEHVNNSYECDIPIGAGICASYQTQTNSPRRARSVASQSIIAYTMSLGAENSVAYSNNSIAIPTNFTISVTTEILPVSMTKTSVDCTMYICGDSTECSNLLLQYGSFCTQLNRALTGIAVEQDKNTQEVFAQVKQIYKTPPIKDFGGFNFSQILPDPSKPSKRSFIEDLLFNKVTLADAGFIKQYGDCLGDIAARDLICAQKFNGLTVLPPLLTDEMIAQYTSALLAGTITSGWTFGAGAALQIPFAMQMAYRFNGIGVTQNVLYENQKLIANQFNSAIGKIQDSLSSTASALGKLQDVVNQNAQALNTLVKCLSSNFGAISSVLNDILSRLDKVEAEVQIDRLITGRLQCLQTYVTQQLIRAAEIRASANLAATKMSECVLGQSKRFDFCGKGYHLMSFPQSAPHGVVFLHVTYVPAQEKNFTTAPAICHDGKAHFPREGVFVSNGTHWFVTQRNFYEPQIITTDNTFVSGNCDVVIGIVNNTVYDPLQPELDSFKEELDKYFKNHTSPDVDLGDISGINASVVNIQKEIDRLNEVAKNLNESLIDLQELGKYEQYIKGGGSGGGQIYEGKLTAEGLRFGIVASRFNHALVDRLVEGAIDAIVRHGGREEDITLVRVPGSWEIPVAAGELARKEDIDAVIAIGVLIRGATPHFDYIASEVSKGLADLSLELRKPITFGVITADTLEQAIERAGTKHGNKGWEAALSAIEMANLFKSLR

SEQ ID NO: 4331 - protein, 1371 aa, Artificial Sequence
  SARS-CoV-2/China/WF0028/2020__EPI_ISL_413791 spike protein (1-1211)(Q965C_S1003C) LumSynth construct
MFVFLVLLPLVSSQCVNLTTRTQLPPAYTNSFTRGVYYPDKVFRSSVLHSTQDLFLPFFSNVTWFHAIHVSGTNGTKRFDNPVLPFNDGVYFASTEKSNIIRGWIFGTTLDSKTQSLLIVNNATNVVIKVCEFQFCNDPFLGVYYHKNNKSWMESEFRVYSSANNCTFEYVSQPFLMDLEGKQGNFKNLREFVFKNIDGYFKIYSKHTPINLVRDLPQGFSALEPLVDLPIGINITRFQTLLALHRSYLTPGDSSSGWTAGAAAYYVGYLQPRTFLLKYNENGTITDAVDCALDPLSETKCTLKSFTVEKGIYQTSNFRVQPTESIVRFPNITNLCPFGEVFNATRFASVYAWNRKRISNCVADYSVLYNSASFSTFKCYGVSPTKLNDLCFTNVYADSFVIRGDEVRQIAPGQTGKIADYNYKLPDDFTGCVIAWNSNNLDSKVGGNYNYLYRLFRKSNLKPFERDISTEIYQAGSTPCNGVEGFNCYFPLQSYGFQPTNGVGYQPYRVVVLSFELLHAPATVCGPKKSTNLVKNKCVNFNFNGLTGTGVLTESNKKFLPFQQFGRDIADTTDAVRDPQTLEILDITPCSFGGVSVITPGTNTSNQVAVLYQDVNCTEVPVAIHADQLTPTWRVYSTGSNVFQTRAGCLIGAEHVNNSYECDIPIGAGICASYQTQTNSPRRARSVASQSIIAYTMSLGAENSVAYSNNSIAIPTNFTISVTTEILPVSMTKTSVDCTMYICGDSTECSNLLLQYGSFCTQLNRALTGIAVEQDKNTQEVFAQVKQIYKTPPIKDFGGFNFSQILPDPSKPSKRSFIEDLLFNKVTLADAGFIKQYGDCLGDIAARDLICAQKFNGLTVLPPLLTDEMIAQYTSALLAGTITSGWTFGAGAALQIPFAMQMAYRFNGIGVTQNVLYENQKLIANQFNSAIGKIQDSLSSTASALGKLQDVVNQNAQALNTLVKCLSSNFGAISSVLNDILSRLDKVEAEVQIDRLITGRLQCLQTYVTQQLIRAAEIRASANLAATKMSECVLGQSKRVDFCGKGYHLMSFPQSAPHGVVFLHVTYVPAQEKNFTTAPAICHDGKAHFPREGVFVSNGTHWFVTQRNFYEPQIITTDNTFVSGNCDVVIGIVNNTVYDPLQPELESFKEELDKYFKNHTSPDVDLGDISGINASVVNIQKEIDRLNEVAKNLNESLIDLQELGKYEQYIKGGGSGGGQIYEGKLTAEGLRFGIVASRFNHALVDRLVEGAIDAIVRHGGREEDITLVRVPGSWEIPVAAGELARKEDIDAVIAIGVLIRGATPHFDYIASEVSKGLADLSLELRKPITFGVITADTLEQAIERAGTKHGNKGWEAALSAIEMANLFKSLR

SEQ ID NO: 4332 - protein, 1371 aa, Artificial Sequence
  SARS-CoV-2/2019-nCoV/USA-CruiseA-18/2020__MT159716.1 spike protein (1-1211)(Q965C_S1003C) LumSynth construct
MFVFLVLLPLVSSQCVNLTTRTQLPPAYTNSFTRGVYYPDKVFRSSVLHSTQDLFLPFFSNVTWFHAIHVSGTNGTKRFDNPVLPFNDGVYFASTEKSNIIRGWIFGTTLDSKTQSLLIVNNATNVVIKVCEFQFCNDPFLGVYYHKNNKSWMESELRVYSSANNCTFEYVSQPFLMDLEGKQGNFKNLREFVFKNIDGYFKIYSKHTPINLVRDLPQGFSALEPLVDLPIGINITRFQTLLALHRSYLTPGDSSSGWTAGAAAYYVGYLQPRTFLLKYNENGTITDAVDCALDPLSETKCTLKSFTVEKGIYQTSNFRVQPTESIVRFPNITNLCPFGEVFNATRFASVYAWNRKRISNCVADYSVLYNSASFSTFKCYGVSPTKLNDLCFTNVYADSFVIRGDEVRQIAPGQTGKIADYNYKLPDDFTGCVIAWNSNNLDSKVGGNYNYLYRLFRKSNLKPFERDISTEIYQAGSTPCNGVEGFNCYFPLQSYGFQPTNGVGYQPYRVVVLSFELLHAPATVCGPKKSTNLVKNKCVNFNFNGLTGTGVLTESNKKFLPFQQFGRDIADTTDAVRDPQTLEILDITPCSFGGVSVITPGTNTSNQVAVLYQDVNCTEVPVAIHADQLTPTWRVYSTGSNVFQTRAGCLIGAEHVNNSYECDIPIGAGICASYQTQTNSPRRARSVASQSIIAYTMSLGAENSVAYSNNSIAIPTNFTISVTTEILPVSMTKTSVDCTMYICGDSTECSNLLLQYGSFCTQLNRALTGIAVEQDKNTQEVFAQVKQIYKTPPIKDFGGFNFSQILPDPSKPSKRSFIEDLLFNKVTLADAGFIKQYGDCLGDIAARDLICAQKFNGLTVLPPLLTDEMIAQYTSALLAGTITSGWTFGAGAALQIPFAMQMAYRFNGIGVTQNVLYENQKLIANQFNSAIGKIQDSLSSTASALGKLQDVVNQNAQALNTLVKCLSSNFGAISSVLNDILSRLDKVEAEVQIDRLITGRLQCLQTYVTQQLIRAAEIRASANLAATKMSECVLGQSKRVDFCGKGYHLMSFPQSAPHGVVFLHVTYVPAQEKNFTTAPAICHDGKAHFPREGVFVSNGTHWFVTQRNFYEPQIITTDNTFVSGNCDVVIGIVNNTVYDPLQPELDSFKEELDKYFKNHTSPDVDLGDISGINASVVNIQKEIDRLNEVAKNLNESLIDLQELGKYEQYIKGGGSGGGQIYEGKLTAEGLRFGIVASRFNHALVDRLVEGAIDAIVRHGGREEDITLVRVPGSWEIPVAAGELARKEDIDAVIAIGVLIRGATPHFDYIASEVSKGLADLSLELRKPITFGVITADTLEQAIERAGTKHGNKGWEAALSAIEMANLFKSLR

SEQ ID NO: 4333 - protein, 1371 aa, Artificial Sequence
  SARS-CoV-2/SARS-CoV-2/Yunnan-01/human/2020/CHN__MT049951.1 spike protein (1-1211)(Q965C_S1003C) LumSynth construct
MFVFLVLLPLVSSQCVNLTTRTQLPPANTNSFTRGVYYPDKVFRSSVLHSTQDLFLPFFSNVTWFHAIHVSGTNGTKRFDNPVLPFNDGVYFASTEKSNIIRGWIFGTTLDSKTQSLLIVNNATNVVIKVCEFQFCNDPFLGVYYHKNNKSWMESEFRVYSSANNCTFEYVSQPFLMDLEGKQGNFKNLREFVFKNIDGYFKIYSKHTPINLVRDLPQGFSALEPLVDLPIGINITRFQTLLALHRSYLTPGDSSSGWTAGAAAYYVGYLQPRTFLLKYNENGTITDAVDCALDPLSETKCTLKSFTVEKGIYQTSNFRVQPTESIVRFPNITNLCPFGEVFNATRFASVYAWNRKRISNCVADYSVLYNSASFSTFKCYGVSPTKLNDLCFTNVYADSFVIRGDEVRQIAPGQTGKIADYNYKLPDDFTGCVIAWNSNNLDSKVGGNYNYLYRLFRKSNLKPFERDISTEIYQAGSTPCNGVEGFNCYFPLQSYGFQPTNGVGYQPYRVVVLSFELLHAPATVCGPKKSTNLVKNKCVNFNFNGLTGTGVLTESNKKFLPFQQFGRDIADTTDAVRDPQTLEILDITPCSFGGVSVITPGTNTSNQVAVLYQDVNCTEVPVAIHADQLTPTWRVYSTGSNVFQTRAGCLIGAEHVNNSYECDIPIGAGICASYQTQTNSPRRARSVASQSIIAYTMSLGAENSVAYSNNSIAIPTNFTISVTTEILPVSMTKTSVDCTMYICGDSTECSNLLLQYGSFCTQLNRALTGIAVEQDKNTQEVFAQVKQIYKTPPIKDFGGFNFSQILPDPSKPSKRSFIEDLLFNKVTLADAGFIKQYGDCLGDIAARDLICAQKFNGLTVLPPLLTDEMIAQYTSALLAGTITSGWTFGAGAALQIPFAMQMAYRFNGIGVTQNVLYENQKLIANQFNSAIGKIQDSLSSTASALGKLQDVVNQNAQALNTLVKCLSSNFGAISSVLNDILSRLDKVEAEVQIDRLITGRLQCLQTYVTQQLIRAAEIRASANLAATKMSECVLGQSKRVDFCGKGYHLMSFPQSAPHGVVFLHVTYVPAQEKNFTTAPAICHDGKAHFPREGVFVSNGTHWFVTQRNFYEPQIITTDNTFVSGNCDVVIGIVNNTVYDPLQPELDSFKEELDKYFKNHTSPDVDLGDISGINASVVNIQKEIDRLNEVAKNLNESLIDLQELGKYEQYIKGGGSGGGQIYEGKLTAEGLRFGIVASRFNHALVDRLVEGAIDAIVRHGGREEDITLVRVPGSWEIPVAAGELARKEDIDAVIAIGVLIRGATPHFDYIASEVSKGLADLSLELRKPITFGVITADTLEQAIERAGTKHGNKGWEAALSAIEMANLFKSLR

SEQ ID NO: 4334 - protein, 1371 aa, Artificial Sequence
  SARS-CoV-2/USA/WA-UW292/2020__EPI_ISL_418077 spike protein (1-1211)(Q965C_S1003C) LumSynth construct
MFVFLVLLPLVSSQCVNLTTRTQLPPAYTNSFTRGVYYPDKVFRSSVLHSTQDLFLPFFSNVTWFHAIHVSGTNGTKRFDNPVLPFNDGVYFASTEKSNIIRGWIFGTTLDSKTQSLLIVNNATNVVIKVCEFQFCNDPFLGVYYHKNNKSWMESEFRVYSSANNCTFEYVSQPFLMDLEGKQGNFKNLREFVFKNIDGYFKIYSKHTPINLVRDLPQGFSALEPLVDLPIGINITRFQTLLALHRSYLTPGDSSSGWTAGAAAYYVGYLQPRTFLLKYNENGTITDAVDCALDPLSETKCTLKSFTVEKGIYQTSNFRVQPTESIVRFPNITNLCPFGEVFNATRFASVYAWNRKRISNCVADYSVLYNSASFSTFKCYGVSPTKLNDLCFTNVYADSFVIRGDEVRQIAPGQTGKIADYNYKLPDDFTGCVIAWNSNNLDSKVGGNYNYLYRLFRKSNLKPFERDISTEIYQASSTPCNGVEGFNCYFPLQSYGFQPTNGVGYQPYRVVVLSFELLHAPATVCGPKKSTNLVKNKCVNFNFNGLTGTGVLTESNKKFLPFQQFGRDIADTTDAVRDPQTLEILDITPCSFGGVSVITPGTNTSNQVAVLYQDVNCTEVPVAIHADQLTPTWRVYSTGSNVFQTRAGCLIGAEHVNNSYECDIPIGAGICASYQTQTNSPRRARSVASQSIIAYTMSLGAENSVAYSNNSIAIPTNFTISVTTEILPVSMTKTSVDCTMYICGDSTECSNLLLQYGSFCTQLNRALTGIAVEQDKNTQEVFAQVKQIYKTPPIKDFGGFNFSQILPDPSKPSKRSFIEDLLFNKVTLADAGFIKQYGDCLGDIAARDLICAQKFNGLTVLPPLLTDEMIAQYTSALLAGTITSGWTFGAGAALQIPFAMQMAYRFNGIGVTQNVLYENQKLIANQFNSAIGKIQDSLSSTASALGKLQDVVNQNAQALNTLVKCLSSNFGAISSVLNDILSRLDKVEAEVQIDRLITGRLQCLQTYVTQQLIRAAEIRASANLAATKMSECVLGQSKRVDFCGKGYHLMSFPQSAPHGVVFLHVTYVPAQEKNFTTAPAICHDGKAHFPREGVFVSNGTHWFVTQRNFYEPQIITTDNTFVSGNCDVVIGIVNNTVYDPLQPELDSFKEELDKYFKNHTSPDVDLGDISGINASVVNIQKEIDRLNEVAKNLNESLIDLQELGKYEQYIKGGGSGGGQIYEGKLTAEGLRFGIVASRFNHALVDRLVEGAIDAIVRHGGREEDITLVRVPGSWEIPVAAGELARKEDIDAVIAIGVLIRGATPHFDYIASEVSKGLADLSLELRKPITFGVITADTLEQAIERAGTKHGNKGWEAALSAIEMANLFKSLR

SEQ ID NO: 4335 - protein, 1371 aa, Artificial Sequence
  SARS-CoV-2/Iceland/192/2020__EPI_ISL_417819 spike protein (1-1211)(Q965C_S1003C) LumSynth construct
MFVFFVLLPLVSSQCVNLTTRTQLPPAYTNSFTRGVYYPDKVFRSSVLHSTQDLFLPFFSNVTWFHAIHVSGTNGTKRFDNPVLPFNDGVYFASTEKSNIIRGWIFGTTLDSKTQSLLIVNNATNVVIKVCEFQFCNDPFLGVYYHKNNKSWMESEFRVYSSANNCTFEYVSQPFLMDLEGKQGNFKNLREFVFKNIDGYFKIYSKHTPINLVRDLPQGFSALEPLVDLPIGINITRFQTLLALHRSYLTPGDSSSGWTAGAAAYYVGYLQPRTFLLKYNENGTITDAVDCALDPLSETKCTLKSFTVEKGIYQTSNFRVQPTESIVRFPNITNLCPFGEVFNATRFASVYAWNRKRISNCVADYSVLYNSASFSTFKCYGVSPTKLNDLCFTNVYADSFVIRGDEVRQIAPGQTGKIADYNYKLPDDFTGCVIAWNSNNLDSKVGGNYNYLYRLFRKSNLKPFERDISTEIYQAGSTPCNGVEGFNCYFPLQSYGFQPTNGVGYQPYRVVVLSFELLHAPATVCGPKKSTNLVKNKCVNFNFNGLTGTGVLTESNKKFLPFQQFGRDIADTTDAVRDPQTLEILDITPCSFGGVSVITPGTNTSNQVAVLYQGVNCTEVPVAIHADQLTPTWRVYSTGSNVFQTRAGCLIGAEHVNNSYECDIPIGAGICASYQTQTNSPRRARSVASQSIIAYTMSLGAENSVAYSNNSIAIPTNFTISVTTEILPVSMTKTSVDCTMYICGDSTECSNLLLQYGSFCTQLNRALTGIAVEQDKNTQEVFAQVKQIYKTPPIKDFGGFNFSQILPDPSKPSKRSFIEDLLFNKVTLADAGFIKQYGDCLGDIAARDLICAQKFNGLTVLPPLLTDEMIAQYTSALLAGTITSGWTFGAGAALQIPFAMQMAYRFNGIGVTQNVLYENQKLIANQFNSAIGKIQDSLSSTASALGKLQDVVNQNAQALNTLVKCLSSNFGAISSVLNDILSRLDKVEAEVQIDRLITGRLQCLQTYVTQQLIRAAEIRASANLAATKMSECVLGQSKRVDFCGKGYHLMSFPQSAPHGVVFLHVTYVPAQEKNFTTAPAICHDGKAHFPREGVFVSNGTHWFVTQRNFYEPQIITTDNTFVSGNCDVVIGIVNNTVYDPLQPELDSFKEELDKYFKNHTSPDVDLGDISGINASVVNIQKEIDRLNEVAKNLNESLIDLQELGKYEQYIKGGGSGGGQIYEGKLTAEGLRFGIVASRFNHALVDRLVEGAIDAIVRHGGREEDITLVRVPGSWEIPVAAGELARKEDIDAVIAIGVLIRGATPHFDYIASEVSKGLADLSLELRKPITFGVITADTLEQAIERAGTKHGNKGWEAALSAIEMANLFKSLR

SEQ ID NO: 4336 - protein, 1371 aa, Artificial Sequence
  SARS-CoV-2/Belgium/ULG-6939/2020__EPI_ISL_417020 spike protein (1-1211)(Q965C_S1003C) LumSynth construct
MFVFLVLLPLVSSQCVNLTTRTQLPPAYTNSFTRGVYYPDKVFRSSVLHSTQDLFLPFFSNVTWFHAIHVSGTNGTKRFDNPVLPFNDGVYFASTEKSNIIRGWIFGTTLDSKTQSLLIVNNATNVVIKVCEFQFCNDPFLGVYYHKNNKSWMESEFRVYSSANNCTFEYVSQPFLMDLEGKQGNFKNLREFVFKNIDGYFKIYSKHTPINLVRDLPQGFSALEPLVDLPIGINITRFQTLLALHRSYLTPGDSSSGWTAGAAAYYVGYLQPRTFLLKYNENGTITDAVDCALDPLSETKCTLKSFTVEKGIYQTSNFRVQPTESIVRFPNITNLCPFGEVFNATRFASVYAWNRKRISNCVADYSVLYNSASFSTFKCYGVSPTKLNDLCFTNVYADSFVIRGDEVRQIAPGQTGKIADYNYKLPDDFTGCVIAWNSNNLDSKVGGNYNYLYRLFRKSNLKPFERDISTEIYQAGSTPCNGVEGFNCYFPLQSYGFQPTNGVGYQPYRVVVLSFELLHAPATVCGPKKSTNLVKNKCVNFNFNGLTGTGVLTESNKKFLPFQQFGRDIADTTDAVRDPQTLEILDITPCSFGGVSVITPGTNTSNQVAVLYQGVNCTEVPVAIHADQLTPTWRVYSTGSNVFQTRAGCLIGAEHVNNSYECDIPIGAGICASYQTQTNSPRRARSVASQSIIAYTMSLGAENSVVYSNNSIAIPTNFTISVTTEILPVSMTKTSVDCTMYICGDSTECSNLLLQYGSFCTQLNRALTGIAVEQDKNTQEVFAQVKQIYKTPPIKDFGGFNFSQILPDPSKPSKRSFIEDLLFNKVTLADAGFIKQYGDCLGDIAARDLICAQKFNGLTVLPPLLTDEMIAQYTSALLAGTITSGWTFGAGAALQIPFAMQMAYRFNGIGVTQNVLYENQKLIANQFNSAIGKIQDSLSSTASALGKLQDVVNQNAQALNTLVKCLSSNFGAISSVLNDILSRLDKVEAEVQIDRLITGRLQCLQTYVTQQLIRAAEIRASANLAATKMSECVLGQSKRVDFCGKGYHLMSFPQSAPHGVVFLHVTYVPAQEKNFTTAPAICHDGKAHFPREGVFVSNGTHWFVTQRNFYEPQIITTDNTFVSGNCDVVIGIVNNTVYDPLQPELDSFKEELDKYFKNHTSPDVDLGDISGINASVVNIQKEIDRLNEVAKNLNESLIDLQELGKYEQYIKGGGSGGGQIYEGKLTAEGLRFGIVASRFNHALVDRLVEGAIDAIVRHGGREEDITLVRVPGSWEIPVAAGELARKEDIDAVIAIGVLIRGATPHFDYIASEVSKGLADLSLELRKPITFGVITADTLEQAIERAGTKHGNKGWEAALSAIEMANLFKSLR

SEQ ID NO: 4337 - protein, 1371 aa, Artificial Sequence
  SARS-CoV-2/France/HF2496/2020__EPI_ISL_418231 spike protein (1-1211)(Q965C_S1003C) LumSynth construct
MFVFLVLLPLVSSQCVNLTTRTQLPPAYTNSFTRGVYYPDKVFRSSVLHSTQDLFLPFFSNVTWFHAIHVSGTNGTKRFDNPVLPFNDGVYFASTEKSNIIRGWIFGTTLDSKTQSLLIVNNATNVVIKVCEFQFCNDPFLGVYYHKNNKSWMESEFRVYSSANNCTFEYVSQPFLMDLEGKQGNFKNLREFVFKNIDGYFKIYSKHTPINLVRDLPQGFSALEPLVDLPIGINITRFQTLLALHRSYLTPGDSSSGWTAGAAAYYVGYLQPRTFLLKYNENGTITDAVDCALDPLSETKCTLKSFTVEKGIYQTSNFRVQPTESIVRFPNITNLCPFGEVFNATRFASVYAWNRKRISNCVADYSVLYNSASFSTFKCYGVSPTKLNDLCFTNVYADSFVIRGDEVRQIAPGQTGKIADYNYKLPDDFTGCVIAWNSNNLDSKVGGNYNYLYRLFRKSNLKPFERDISTEIYQAGSTPCNGVEGFNCYFPLQSYGFQPTNGVGYQPYRVVVLSFELLHAPATVCGPKKSTNLVKNKCVNFNFNGLTGTGVLTESNKKFLPFQQFGRDIADTTDAVRDPQTLEILDITPCSFGGVSVITPGTNTSNQVAVLYQGVNCTEVPVAIHADQLTPTWRVYSTGSNVFQTRAGCLIGAEHVNNSYECDIPIGAGICASYQTQTNSPRRARSVASQSIIAYTMSLGAENSVAYSNNSIAIPTNFTISVTTEILPVSMTKTSVDCTMYICGDSTECSNLLLQYGSFCTQLNRALTGIAVEQDKNTQEVFAQVKQIYKTPPIKDFGGFNFSQILPDPSKPSKRSFIEDLLFNKVTLADAGFIKQYGDCLGDIVARDLICAQKFNGLTVLPPLLTDEMIAQYTSALLAGTITSGWTFGAGAALQIPFAMQMAYRFNGIGVTQNVLYENQKLIANQFNSAIGKIQDSLSSTASALGKLQDVVNQNAQALNTLVKCLSSNFGAISSVLNDILSRLDKVEAEVQIDRLITGRLQCLQTYVTQQLIRAAEIRASANLAATKMSECVLGQSKRVDFCGKGYHLMSFPQSAPHGVVFLHVTYVPAQEKNFTTAPAICHDGKAHFPREGVFVSNGTHWFVTQRNFYEPQIITTDNTFVSGNCDVVIGIVNNTVYDPLQPELDSFKEELDKYFKNHTSPDVDLGDISGINASVVNIQKEIDRLNEVAKNLNESLIDLQELGKYEQYIKGGGSGGGQIYEGKLTAEGLRFGIVASRFNHALVDRLVEGAIDAIVRHGGREEDITLVRVPGSWEIPVAAGELARKEDIDAVIAIGVLIRGATPHFDYIASEVSKGLADLSLELRKPITFGVITADTLEQAIERAGTKHGNKGWEAALSAIEMANLFKSLR

SEQ ID NO: 4338 - protein, 1371 aa, Artificial Sequence
  SARS-CoV-2/USA/WA-UW291/2020__EPI_ISL_418076 spike protein (1-1211)(Q965C_S1003C) LumSynth construct
MFVFLVLLPLVSSQCVNLTTRTQLPPAYTNSFTRGVYYPDKVFRSSVLHSTQDLFLPFFSNVTWFHAIHVSGTNGTKRFDNPVLPFNDGVYFASTEKSNIIRGWIFGTTLDSKTQSLLIVNNATNVVIKVCEFQFCNDPFLGVYYHKNNKSWMESEFRVYSSANNCTFEYVSQPFLMDLEGKQGNFKNLREFVFKNIDGYFKIYSKHTPINLVRDLPQGFSALEPLVDLPIGINITRFQTLLALHRSYLTPGDSSSGWTAGAAAYYVGYLQPRTFLLKYNENGTITDAVDCALDPLSETKCTLKSFTVEKGIYQTSNFRVQPTESIVRFPNITNLCPFGEVFNATRFASVYAWNRKRISNCVADYSVLYNSASFSTFKCYGVSPTKLNDLCFTNVYADSFVIRGDEVRQIAPGQTGKIADYNYKLPDDFTGCVIAWNSNNLDSKVGGNYNYLYRLFRKSNLKPFERDISTEIYQAGSTPCNGVEGFNCYFPLQSYGFQPTNGVGYQPYRVVVLSFELLHAPATVCGPKKSTNLVKNKCVNFNFNGLTGTGVLTESNKKFLPFQQFGRDIADTTDAVRDPQTLEILDITPCSFGGVSVITPGTNTSNQVAVLYQGVNCTEVPVAIHADQLTPTWRVYSTGSNVFQTRAGCLIGAEHVNNSYECDIPIGAGICASYQTQTNSPRRARSVASQSIIAYTMSLGAENSVAYSNNSIAIPTNFTISVTTEILPVSMTKTSVDCTMYICGDSTECSNLLLQYGSFCTQLNRALTGIAVEQDKNTQEVFAQVKQIYKTPPIKDFGGFNFSQILPDPSKPSKRSFIEDLLFNKVTLADAGFIKQYGDCLGDIAARDLICAQKFNGLTVLPPLLTDEMIAQYTSALLAGTITSGWTFGAGAALQIPFAMQMAYRFNGIGVTQNVLYENQKLIANQFNSAIGKIQYSLSSTASALGKLQDVVNQNAQALNTLVKCLSSNFGAISSVLNDILSRLDKVEAEVQIDRLITGRLQCLQTYVTQQLIRAAEIRASANLAATKMSECVLGQSKRVDFCGKGYHLMSFPQSAPHGVVFLHVTYVPAQEKNFTTAPAICHDGKAHFPREGVFVSNGTHWFVTQRNFYEPQIITTDNTFVSGNCDVVIGIVNNTVYDPLQPELDSFKEELDKYFKNHTSPDVDLGDISGINASVVNIQKEIDRLNEVAKNLNESLIDLQELGKYEQYIKGGGSGGGQIYEGKLTAEGLRFGIVASRFNHALVDRLVEGAIDAIVRHGGREEDITLVRVPGSWEIPVAAGELARKEDIDAVIAIGVLIRGATPHFDYIASEVSKGLADLSLELRKPITFGVITADTLEQAIERAGTKHGNKGWEAALSAIEMANLFKSLR

SEQ ID NO: 4339 - protein, 1371 aa, Artificial Sequence; identical to SEQ ID NO: 4302
  SARS-CoV-2/Portugal/PT0034/2020__EPI_ISL_418019 spike protein (1-1211)(Q965C_S1003C) LumSynth construct

SEQ ID NO: 4340 - protein, 1371 aa, Artificial Sequence
  SARS-CoV-2/Iceland/202/2020__EPI_ISL_417750 spike protein (1-1211)(Q965C_S1003C) LumSynth construct
MFVFLVLLPLVSSQCVNLTTRTQLPPAYTNSFTRGVYYPDKVFRSSVLHSTQDLFLPFFSNVTWFHAIHVSGTNGTKRFDNPVLPFNDGVYFASTEKSNIIRGWIFGTTLDSKTQSLLIVNNATNVVIKVCEFQFCNDPFLGVYYHKNNKSWMESEFRVYSSANNCTFEYVSQPFLMDLEGKQGNFKNLREFVFKNIDGYFKIYSKHTPINLVRDLPQGFSALEPLVDLPIGINITRFQTLLALHRSYLTPGDSSSGWTAGAAAYYVGYLQPRTFLLKYNENGTITDAVDCALDPLSETKCTLKSFTVEKGIYQTSNFRVQPTESIVRFPNITNLCPFGEVFNATRFASVYAWNRKRISNCVADYSVLYNSASFSTFKCYGVSPTKLNDLCFTNVYADSFVIRGDEVRQIAPGQTGKIADYNYKLPDDFTGCVIAWNSNNLDSKVGGNYNYLYRLFRKSNLKPFERDISTEIYQAGSTPCNGVEGFNCYFPLQSYGFQPTNGVGYQPYRVVVLSFELLHAPATVCGPKKSTNLVKNKCVNFNFNGLTGTGVLTESNKKFLPFQQFGRDIADTTDAVRDPQTLEILDITPCSFGGVSVITPGTNTSNQVAVLYQDVNCTEVPVAIHADQLTPTWRVYSTGSNVFQTRAGCLIGAEHVNNSYECDIPIGAGICASYQTQTNSPRRARSVASQSIIAYTMSLGAENSVAYSNNSIAIPTNFTISVTTEILPVSMTKTSVDCTMYICGDSTECSNLLLQYGSFCTQLNRALTGIAVEQDKNTQEVFAQVKQIYKTPPIKDFGGFNFSQILPDPSKPSKRSFIEDLLFNKVTLADAGFIKQYGDCLGDIAARDLICAQKFNGLTVLPPLLTDEMIAQYTSALLAGTITSGWTFGAGAALQIPFAMQMAYRFNGIGVTQNVLYENQKLIANQFNSAIGKIQDSLSSTASALGKLQDVVNQNAQALNTLVKCLSSNFGAISSVLNDILSRLDKVEAEVQIDRLITGRLQCLQTYVTQQLIRAAEIRASANLAATKMSECVLGQSKRVDFCGKGYHLMSFPQSAPHGVVFLHVTYVPAQEKNFTTAPAICHDGKAHFPREGVFVSNGTHWFVTQRNFYEPQIITTDNTFVSGNCDVVIGIVNNTVYDPLQPELDSFKEELDKYFKNHTSPDVDLGDIPGINASVVNIQKEIDRLNEVAKNLNESLIDLQELGKYEQYIKGGGSGGGQIYEGKLTAEGLRFGIVASRFNHALVDRLVEGAIDAIVRHGGREEDITLVRVPGSWEIPVAAGELARKEDIDAVIAIGVLIRGATPHFDYIASEVSKGLADLSLELRKPITFGVITADTLEQAIERAGTKHGNKGWEAALSAIEMANLFKSLR

SEQ ID NO: 4341 - protein, 1371 aa, Artificial Sequence
  SARS-CoV-2/USA/WA-UW261/2020__EPI_ISL_418046 spike protein (1-1211)(Q965C_S1003C) LumSynth construct
MFVFLVLLPLVSSQCVNLTTRTQLPPAYTNSFTRGVYYPDKVFRSSVLHSTQDLFLPFFSNVTWFHAIHVSGTNGTKRFDNPVLPFNDGVYFASTEKSNIIRGWIFGTTLDSKTQSLLIVNNATNVVIKVCEFQFCNDPFLGVYYHKNNKSWMESEFRVYSSANNCTFEYVSQPFLMDLEGKQGNFKNLREFVFKNIDGYFKIYSKHTPINLVRDLPQGFSALEPLVDLPIGINITRFQTLLALHRSYLTPGDSSSGWTAGAAAYYVGYLQPRTFLLKYNENGTITDAVDCALDPLSETKCTLKSFTVEKGIYQTSNFRVQPTESIVRFPNITNLCPFGEVFNATRFTSVYAWNRKRISNCVADYSVLYNSASFSTFKCYGVSPTKLNDLCFTNVYADSFVIRGDEVRQIAPGQTGKIADYNYKLPDDFTGCVIAWNSNNLDSKVGGNYNYLYRLFRKSNLKPFERDISTEIYQAGSTPCNGVEGFNCYFPLQSYGFQPTNGVGYQPYRVVVLSFELLHAPATVCGPKKSTNLVKNKCVNFNFNGLTGTGVLTESNKKFLPFQQFGRDIADTTDAVRDPQTLEILDITPCSFGGVSVITPGTNTSNQVAVLYQDVNCTEVPVAIHADQLTPTWRVYSTGSNVFQTRAGCLIGAEHVNNSYECDIPIGAGICASYQTQTNSPRRARSVASQSIIAYTMSLGAENSVAYSNNSIAIPTNFTISVTTEILPVSMTKTSVDCTMYICGDSTECSNLLLQYGSFCTQLNRALTGIAVEQDKNTQEVFAQVKQIYKTPPIKDFGGFNFSQILPDPSKPSKRSFIEDLLFNKVTLADAGFIKQYGDCLGDIAARDLICAQKFNGLTVLPPLLTDEMIAQYTSALLAGTITSGWTFGAGAALQIPFAMQMAYRFNGIGVTQNVLYENQKLIANQFNSAIGKIQDSLSSTASALGKLQDVVNQNAQALNTLVKCLSSNFGAISSVLNDILSRLDKVEAEVQIDRLITGRLQCLQTYVTQQLIRAAEIRASANLAATKMSECVLGQSKRVDFCGKGYHLMSFPQSAPHGVVFLHVTYVPAQEKNFTTAPAICHDGKAHFPREGVFVSNGTHWFVTQRNFYEPQIITTDNTFVSGNCDVVIGIVNNTVYDPLQPELDSFKEELDKYFKNHTSPDVDLGDISGINASVVNIQKEIDRLNEVAKNLNESLIDLQELGKYEQYIKGGGSGGGQIYEGKLTAEGLRFGIVASRFNHALVDRLVEGAIDAIVRHGGREEDITLVRVPGSWEIPVAAGELARKEDIDAVIAIGVLIRGATPHFDYIASEVSKGLADLSLELRKPITFGVITADTLEQAIERAGTKHGNKGWEAALSAIEMANLFKSLR

SEQ ID NO: 4342 - protein, 1371 aa, Artificial Sequence
  SARS-CoV-2/Portugal/PT0035/2020__EPI_ISL_418020 spike protein (1-1211)(Q965C_S1003C) LumSynth construct
MFVFLVLLPLVSSQCVNLTTRTQLPPAYTNSFTRGVYYPDKVFRSSVLHSTQDLFLPFFSNVTWFHAIHVSGTNGTKRFDNPVLPFNDGVYFASTEKSNIIRGWIFGTTLDSKTQSLLIVNNATNVVIKVCEFQFCNDPFLGVYYHKNNKSWMESEFRVYSSANNCTFEYVSQPFLMDLEGKQGNFKNLREFVFKNIDGYFKIYSKHTPINLVRDLPQGFSALEPLVDLPIGINITRFQTLLALHRSYLTPGDSSSGWTAGAAAYYVGYLQPRTFLLKYNENGTITDAVDCALDPLSETKCTLKSFTVEKGIYQTSNFRVQPTESIVRFPNITNLCPFGEVFNATRFASVYAWNRKRISNCVADYSVLYNSASFSTFKCYGVSPTKLNDLCFTNVYADSFVIRGDEVRQIAPGQTGKIADYNYKLPDDFTGCVIAWNSNNLDSKVGGNYNYLYRLFRKSNLKPFERDISTEIYQAGSTPCNGVEGFNCYFPLQSYGFQPTNGVGYQPYRVVVLSFELLHAPATVCGPKKSTNLVKNKCVNFNFNGLTGTGVLTESNKKFLPFQQFGRDIADTTDAVRDPQTLEILDITPCSFGGVSVITPGTNTSNQVAVLYQDVNCTEVPVAIHADQLTPTWRVYSTGSNVFQTRAGCLIGAEHVNNSYECDIPIGAGICASYQTQTNSPRRARSVASQSIIAYTMSLGAENSVAYSNNSIAIPTNFTISVTTEILPVSMTKTSVDCTMYICGDSTECSNLLLQYGSFCTQLNRALTGIAVEQDKNTQEVFAQVKQIYKTPPIKDFGGFNFSQILPDPSKPSKRSFIEDLLFNKVTLADAGFIKQYGDCLGDISARDLICAQKFNGLTVLPPLLTDEMIAQYTSALLAGTITSGWTFGAGAALQIPFAMQMAYRFNGIGVTQNVLYENQKLIANQFNSAIGKIQDSLSSTASALGKLQDVVNQNAQALNTLVKCLSSNFGAISSVLNDILSRLDKVEAEVQIDRLITGRLQCLQTYVTQQLIRAAEIRASANLAATKMSECVLGQSKRVDFCGKGYHLMSFPQSAPHGVVFLHVTYVPAQEKNFTTAPAICHDGKAHFPREGVFVSNGTHWFVTQRNFYEPQIITTDNTFVSGNCDVVIGIVNNTVYDPLQPELDSFKEELDKYFKNHTSPDVDLGDISGINASVVNIQKEIDRLNEVAKNLNESLIDLQELGKYEQYIKGGGSGGGQIYEGKLTAEGLRFGIVASRFNHALVDRLVEGAIDAIVRHGGREEDITLVRVPGSWEIPVAAGELARKEDIDAVIAIGVLIRGATPHFDYIASEVSKGLADLSLELRKPITFGVITADTLEQAIERAGTKHGNKGWEAALSAIEMANLFKSLR

SEQ ID NO: 4343 - protein, 1371 aa, Artificial Sequence
  SARS-CoV-2/USA/NY-NYUMC7/2020__EPI_ISL_418192 spike protein (1-1211)(Q965C_S1003C) LumSynth construct
MFVFLVLLPLVSSQCVNLTTRTQLPPAYTNSFTRGVYYPDKVFRSSVLHSTQDLFLPFFSNVTWFHAIHVSGTNGTKRFDNPVLPFNDGVYFASTEKSNIIRGWIFGTTLDSKTQSLLIVNNATNVVIKVCEFQFCNDPFLGVYHHKNNKSWMESEFRVYSSANNCTFEYVSQPFLMDLEGKQGNFKNLREFVFKNIDGYFKIYSKHTPINLVRDLPQGFSALEPLVDLPIGINITRFQTLLALHRSYLTPGDSSSGWTAGAAAYYVGYLQPRTFLLKYNENGTITDAVDCALDPLSETKCTLKSFTVEKGIYQTSNFRVQPTESIVRFPNITNLCPFGEVFNATRFASVYAWNRKRISNCVADYSVLYNSASFSTFKCYGVSPTKLNDLCFTNVYADSFVIRGDEVRQIAPGQTGKIADYNYKLPDDFTGCVIAWNSNNLDSKVGGNYNYLYRLFRKSNLKPFERDISTEIYQAGSTPCNGVEGFNCYFPLQSYGFQPTNGVGYQPYRVVVLSFELLHAPATVCGPKKSTNLVKNKCVNFNFNGLTGTGVLTESNKKFLPFQQFGRDIADTTDAVRDPQTLEILDITPCSFGGVSVITPGTNTSNQVAVLYQGVNCTEVPVAIHADQLTPTWRVYSTGSNVFQTRAGCLIGAEHVNNSYECDIPIGAGICASYQTQTNSPRRARSVASQSIIAYTMSLGAENSVAYSNNSIAIPTNFTISVTTEILPVSMTKTSVDCTMYICGDSTECSNLLLQYGSFCTQLNRALTGIAVEQDKNTQEVFAQVKQIYKTPPIKDFGGFNFSQILPDPSKPSKRSFIEDLLFNKVTLADAGFIKQYGDCLGDIAARDLICAQKFNGLTVLPPLLTDEMIAQYTSALLAGTITSGWTFGAGAALQIPFAMQMAYRFNGIGVTQNVLYENQKLIANQFNSAIGKIQDSLSSTASALGKLQDVVNQNAQALNTLVKCLSSNFGAISSVLNDILSRLDKVEAEVQIDRLITGRLQCLQTYVTQQLIRAAEIRASANLAATKMSECVLGQSKRVDFCGKGYHLMSFPQSAPHGVVFLHVTYVPAQEKNFTTAPAICHDGKAHFPREGVFVSNGTHWFVTQRNFYEPQIITTDNTFVSGNCDVVIGIVNNTVYDPLQPELDSFKEELDKYFKNHTSPDVDLGDISGINASVVNIQKEIDRLNEVAKNLNESLIDLQELGKYEQYIKGGGSGGGQIYEGKLTAEGLRFGIVASRFNHALVDRLVEGAIDAIVRHGGREEDITLVRVPGSWEIPVAAGELARKEDIDAVIAIGVLIRGATPHFDYIASEVSKGLADLSLELRKPITFGVITADTLEQAIERAGTKHGNKGWEAALSAIEMANLFKSLR

SEQ ID NO: 4344 - protein, 1371 aa, Artificial Sequence
  SARS-CoV-2/Iceland/189/2020__EPI_ISL_417709 spike protein (1-1211)(Q965C_S1003C) LumSynth construct
MFVFLVLLPLVSSQCVNLTTRTQLPPAYTNSFTRGVYYPDKVFRSSVLHSTQDLFLPFFSNVTWFHAIHVSGTNGTKRFDNPVLPFNDGVYFASTEKSNIIRGWIFGTTLDSKTQSLLIVNNATNVVIKVCEFQFCNDPFLGVYYHKNNKSWMESEFRVYSSANNCTFEYVSQPFLMDLEGKQGNFKNLREFVFKNIDGYFKIYSKHTPINLVRDLPQGFSALEPLVDLPIGINITRFQTLLALHRSYLTPGDSSSGWTAGAAAYYVGYLQPRTFLLKYNENGTITDAVDCALDPLSETKCTLKSFTVEKGIYQTSNFRVQPTESIVRFPNITNLCPFGEVFNATRFASVYAWNRKRISNCVADYSVLYNSASFSTFKCYGVSPTKLNDLCFTNVYADSFVIRGDEVRQIAPGQTGKIADYNYKLPDDFTGCVIAWNSNNLDSKVGGNYNYLYRLFRKSNLKPFERDISTEIYQAGSTPCNGVEGFNCYFPLQSYGFQPTNGVGYQPYRVVVLSFELLHAPATVCGPKKSTNLVKNKCVNFNFNGLTGTGVLTESNKKFLPFQQFGRDIADTTDAVRDPQTLEILDITPCSFGGVSVITPGTNTSNQVAVLYQGVNCTEVPVAIHADQLTPTWRVYSTGSNVFQTRAGCLIGAEHVNNSYECDIPIGAGICASYQTQTNSPRRARSVASQSIIAYTMSLGAENSVAYSNNSIAIPTNFTISVTTEILPVSMTKTSVDCTMYICGDSTECSNLLLQYGSFCTQLNRALTGIAVEQDKNTQEVFAQVKQIYKTPPIKDFGGFNFSQILPDPSKPSKRSFIEDLLFNKVTLADAGFTKQYGDCLGDIAARDLICAQKFNGLTVLPPLLTDEMIAQYTSALLAGTITSGWTFGAGAALQIPFAMQMAYRFNGIGVTQNVLYENQKLIANQFNSAIGKIQDSLSSTASALGKLQDVVNQNAQALNTLVKCLSSNFGAISSVLNDILSRLDKVEAEVQIDRLITGRLQCLQTYVTQQLIRAAEIRASANLAATKMSECVLGQSKRVDFCGKGYHLMSFPQSAPHGVVFLHVTYVPAQEKNFTTAPAICHDGKAHFPREGVFVSNGTHWFVTQRNFYEPQIITTDNTFVSGNCDVVIGIVNNTVYDPLQPELDSFKEELDKYFKNHTSPDVDLGDISGINASVVNIQKEIDRLNEVAKNLNESLIDLQELGKYEQYIKGGGSGGGQIYEGKLTAEGLRFGIVASRFNHALVDRLVEGAIDAIVRHGGREEDITLVRVPGSWEIPVAAGELARKEDIDAVIAIGVLIRGATPHFDYIASEVSKGLADLSLELRKPITFGVITADTLEQAIERAGTKHGNKGWEAALSAIEMANLFKSLR

SEQ ID NO: 4345 - protein, 1371 aa, Artificial Sequence
  SARS-CoV-2/Australia/NSW56/2020__EPI_ISL_417408 spike protein (1-1211)(Q965C_S1003C) LumSynth construct
MFVFLVLLPLVSSQCVNLTTRTQLPPAYTNSFTRGVYYPDKVFRSSVLHSTQDLFLPFFSNVTWFHAIHVSGTNGTKRFDNPVLPFNDGVYFASTEKSNIIRGWIFGTTLDSKTQSLLIVNNATNVVIKVCEFQFCNDPFLGVYYHKNNKSWMESEFRVYSSANNCTFEYVSQPFLMDLEGKQGNFKNLREFVFKNIDGYFKIYSKHTPINLVRDLPQGFSALEPLVDLPIGINITRFQTLLALHRSYLTPGDSSSGWTAGAAAYYVGYLQPRTFLLKYNENGTITDAVDCALDPLSETKCTLKSFTVEKGIYQTSNFRVQPTESIVRFPNITNLCPFGEVFNATRFASVYAWNRKRISNCVADYSVLYNSASFSTFKCYGVSPTKLNDLCFTNVYADSFVIRGDEVRQIAPGQTGKIADYNYKLPDDFTGCVIAWNSNNLDSKVGGNYNYLYRLFRKSNLKPFERDISTEIYQAGSTPCNGVEGFNCYFPLQSYGFQPTNGVGYQPYRVVVLSFELLHAPATVCGPKKSTNLVKNKCVNFNFNGLTGTGVLTESNKKFLPFQQFGRDIADTTDAVRDPQTLEILDITPCSFGGVSVITPGTNTSNQVAVLYQDVNCTEVPVAIHADQLTPTWRVYSTGSNVFQTRAGCLIGAEHVNNSYECDIPIGAGICASYQTQTNSPRRARSVASQSIIAYTMSLGAENSVAYSNNSIAIPTNFTISVTTEILPVSMTKTSVDCTMYICGDSTECSNLLLQYGSFCTQLNRALTGIAVEQDKNTQEVFAQVKQIYKTPPIKDFGGFNFSQILPDSSKPSKRSFIEDLLFNKVTLADAGFIKQYGDCLGDIAARDLICAQKFNGLTVLPPLLTDEMIAQYTSALLAGTITSGWTFGAGAALQIPFAMQMAYRFNGIGVTQNVLYENQKLIANQFNSAIGKIQDSLSSTASALGKLQDVVNQNAQALNTLVKCLSSNFGAISSVLNDILSRLDKVEAEVQIDRLITGRLQCLQTYVTQQLIRAAEIRASANLAATKMSECVLGQSKRVDFCGKGYHLMSFPQSAPHGVVFLHVTYVPAQEKNFTTAPAICHDGKAHFPREGVFVSNGTHWFVTQRNFYEPQIITTDNTFVSGNCDVVIGIVNNTVYDPLQPELDSFKEELDKYFKNHTSPDVDLGDISGINASVVNIQKEIDRLNEVAKNLNESLIDLQELGKYEQYIKGGGSGGGQIYEGKLTAEGLRFGIVASRFNHALVDRLVEGAIDAIVRHGGREEDITLVRVPGSWEIPVAAGELARKEDIDAVIAIGVLIRGATPHFDYIASEVSKGLADLSLELRKPITFGVITADTLEQAIERAGTKHGNKGWEAALSAIEMANLFKSLR

SEQ ID NO: 4346 - protein, 1371 aa, Artificial Sequence
  SARS-CoV-2/Iceland/280/2020__EPI_ISL_417608 spike protein (1-1211)(Q965C_S1003C) LumSynth construct
MFVFLVLLPLVSSQCVNLTTRTQLPPAYTNSFTRGVYYPDKVFRSSVLHSTQDLFLPFFSNVTWFHAIHVSGTNGTKRFDNPVLPFNDGVYFASTEKSNIIRGWIFGTTLDSKTQSLLIVNNATNVVIKVCEFQFCNDPFLGVYYHKNNKSWMESEFRVYSSANNCTFEYVSQPFLMDLEGKQGNFKNLREFVFKNIDGYFKIYSKHTPINLVRDLPQGFSALEPLVDLPIGINITRFQTLLALHRSYLTPGDSSSGWTAGAAAYYVGYLQPRTFLLKYNENGTITDAVDCALDPLSETKCTLKSFTVEKGIYQTSNFRVQPTESIVRFPNITNLCPFGEVFNATRFASVYAWNRKRISNCVADYSVLYNSASFSTFKCYGVSPTKLNDLCFTNVYADSFVIRGDEVRQIAPGQTGKIADYNYKLPDDFTGCVIAWNSNNLDSKVGGNYNYLYRLFRKSNLKPFERDISTEIYQAGSTPCNGVEGFNCYFPLQSYGFQPTNGVGYQPYRVVVLSFELLHAPATVCGPKKSTNLVKNKCVNFNFNGLTGTGVLTESNKKFLPFQQFGRDIADTTDAVRDPQTLEILDITPCSFGGVSVITPGTNTSNQVAVLYQGVNCTEVPVAIHADQLTPTWRVYSTGSNVFQTRAGCLIGAEHVNNSYECDIPIGAGICASYHTQTNSPRRARSVASQSIIAYTMSLGAENSVAYSNNSIAIPTNFTISVTTEILPVSMTKTSVDCTMYICGDSTECSNLLLQYGSFCTQLNRALTGIAVEQDKNTQEVFAQVKQIYKTPPIKDFGGFNFSQILPDPSKPSKRSFIEDLLFNKVTLADAGFIKQYGDCLGDIAARDLICAQKFNGLTVLPPLLTDEMIAQYTSALLAGTITSGWTFGAGAALQIPFAMQMAYRFNGIGVTQNVLYENQKLIANQFNSAIGKIQDSLSSTASALGKLQDVVNQNAQALNTLVKCLSSNFGAISSVLNDILSRLDKVEAEVQIDRLITGRLQCLQTYVTQQLIRAAEIRASANLAATKMSECVLGQSKRVDFCGKGYHLMSFPQSAPHGVVFLHVTYVPAQEKNFTTAPAICHDGKAHFPREGVFVSNGTHWFVTQRNFYEPQIITTDNTFVSGNCDVVIGIVNNTVYDPLQPELDSFKEELDKYFKNHTSPDVDLGDISGINASVVNIQKEIDRLNEVAKNLNESLIDLQELGKYEQYIKGGGSGGGQIYEGKLTAEGLRFGIVASRFNHALVDRLVEGAIDAIVRHGGREEDITLVRVPGSWEIPVAAGELARKEDIDAVIAIGVLIRGATPHFDYIASEVSKGLADLSLELRKPITFGVITADTLEQAIERAGTKHGNKGWEAALSAIEMANLFKSLR

SEQ ID NO: 4347 - protein, 1371 aa, Artificial Sequence; identical to SEQ ID NO: 4302
  SARS-CoV-2/Iceland/247/2020__EPI_ISL_417575 spike protein (1-1211)(Q965C_S1003C) LumSynth construct

SEQ ID NO: 4348 - protein, 1371 aa, Artificial Sequence
  SARS-CoV-2/Iceland/238/2020__EPI_ISL_417566 spike protein (1-1211)(Q965C_S1003C) LumSynth construct
MFVFLVLLPLVSSQCVNLTTRTQLPPAYTNSFTRGVYYPDKVFRSSVLHSTQDLFLPFFSNVTWFHAIHVSGTNGTKRFDNPVLPFNDGVYFASTEKSNIIRGWIFGTTLDSKTQSLLIVNNATNVVIKVCEFQFCNDPFLGVYYHKNNKSWMESEFRVYSSANNCTFEYVSQPFLMDLEGKQGNFKNLREFVFKNIDGYFKIYSKHTPINLVRDLPQGFSALEPLVDLPIGINITRFQTLLALHRSYLTPGDSSSGWTAGAAAYYVGYLQPRTFLLKYNENGTITDAVDCALDPLSETKCTLKSFTVEKGIYQTSNFRVQPTESIVRFPNITNLCPFGEVFNATRFASVYAWNRKRISNCVADYSVLYNSASFSTFKCYGVSPTKLNDLCFTNVYADSFVIRGDEVRQIAPGQTGKIADYNYKLPDDFTGCVIAWNSNNLDSKVGGNYNYLYRLFRKSNLKPFERDISTEIYQAGSTPCNGVEGFNCYFPLQSYGFQPTNGVGYQPYRVVVLSFELLHAPATVCGPKKSTNLVKNKCVNFNFNGLTGTGVLTESNKKFLPFQQFGRDIADTTDAVRDPQTLEILDITPCSFGGVSVITPGTNTSNQVAVLYQGVNCTEVPVAIHADQLTPTWRVYSTGSNVFQTRAGCLIGAEHVNNSYECDIPIGAGICASYQTQTNSPRRARSVASQSIIAYTMSLGAENSVAYSNNSIAIPTNFTISVTTEILPVSMTKTSVDCTMYICGDSTECSNLLLQYGSFCTQLNRALTGIAVEQDKNTQEVFAQVKQIYKTPPIKDFGGFNFSQILPDPSKPSKRSFIEDLLFNKVTLADVGFIKQYGDCLGDIAARDLICAQKFNGLTVLPPLLTDEMIAQYTSALLAGTITSGWTFGAGAALQIPFAMQMAYRFNGIGVTQNVLYENQKLIANQFNSAIGKIQDSLSSTASALGKLQDVVNQNAQALNTLVKCLSSNFGAISSVLNDILSRLDKVEAEVQIDRLITGRLQCLQTYVTQQLIRAAEIRASANLAATKMSECVLGQSKRVDFCGKGYHLMSFPQSAPHGVVFLHVTYVPAQEKNFTTAPAICHDGKAHFPREGVFVSNGTHWFVTQRNFYEPQIITTDNTFVSGNCDVVIGIVNNTVYDPLQPELDSFKEELDKYFKNHTSPDVDLGDISGINASVVNIQKEIDRLNEVAKNLNESLIDLQELGKYEQYIKGGGSGGGQIYEGKLTAEGLRFGIVASRFNHALVDRLVEGAIDAIVRHGGREEDITLVRVPGSWEIPVAAGELARKEDIDAVIAIGVLIRGATPHFDYIASEVSKGLADLSLELRKPITFGVITADTLEQAIERAGTKHGNKGWEAALSAIEMANLFKSLR

SEQ ID NO: 4349 - protein, 1371 aa, Artificial Sequence
  SARS-CoV-2/Greece/16/2020__EPI_ISL_418265 spike protein (1-1211)(Q965C_S1003C) LumSynth construct
MFVFLVLLPLVSSQCVNLTTRTQLPPAYTNSFTRGVYYPDKVFRSSVLHSTQDLFLPFFSNVTWFHAIHVSGTNGTKRFDNPVLPFNDGVYFASTEKSNIIRGWIFGTTLDSKTQSLLIVNNATNVVIKVCEFQFCNDPFLGVYYHKNNKSWMESEFRVYSSANNCTFEYVSQPFLMDLEGKQGNFKNLREFVFKNVDGYFKIYSKHTPINLVRDLPQGFSALEPLVDLPIGINITRFQTLLALHRSYLTPGDSSSGWTAGAAAYYVGYLQPRTFLLKYNENGTITDAVDCALDPLSETKCTLKSFTVEKGIYQTSNFRVQPTESIVRFPNITNLCPFGEVFNATRFASVYAWNRKRISNCVADYSVLYNSASFSTFKCYGVSPTKLNDLCFTNVYADSFVIRGDEVRQIAPGQTGKIADYNYKLPDDFTGCVIAWNSNNLDSKVGGNYNYLYRLFRKSNLKPFERDISTEIYQAGSTPCNGVEGFNCYFPLQSYGFQPTNGVGYQPYRVVVLSFELLHAPATVCGPKKSTNLVKNKCVNFNFNGLTGTGVLTESNKKFLPFQQFGRDIADTTDAVRDPQTLEILDITPCSFGGVSVITPGTNTSNQVAVLYQDVNCTEVPVAIHADQLTPTWRVYSTGSNVFQTRAGCLIGAEHVNNSYECDIPIGAGICASYQTQTNSPRRARSVASQSIIAYTMSLGAENSVAYSNNSIAIPTNFTISVTTEILPVSMTKTSVDCTMYICGDSTECSNLLLQYGSFCTQLNRALTGIAVEQDKNTQEVFAQVKQIYKTPPIKDFGGFNFSQILPDPSKPSKRSFIEDLLFNKVTLADAGFIKQYGDCLGDIAARDLICAQKFNGLTVLPPLLTDEMIAQYTSALLAGTITSGWTFGAGAALQIPFAMQMAYRFNGIGVTQNVLYENQKLIANQFNSAIGKIQDSLSSTASALGKLQDVVNQNAQALNTLVKCLSSNFGAISSVLNDILSRLDKVEAEVQIDRLITGRLQCLQTYVTQQLIRAAEIRASANLAATKMSECVLGQSKRVDFCGKGYHLMSFPQSAPHGVVFLHVTYVPAQEKNFTTAPAICHDGKAHFPREGVFVSNGTHWFVTQRNFYEPQIITTDNTFVSGNCDVVIGIVNNTVYDPLQPELDSFKEELDKYFKNHTSPDVDLGDISGINASVVNIQKEIDRLNEVAKNLNESLIDLQELGKYEQYIKGGGSGGGQIYEGKLTAEGLRFGIVASRFNHALVDRLVEGAIDAIVRHGGREEDITLVRVPGSWEIPVAAGELARKEDIDAVIAIGVLIRGATPHFDYIASEVSKGLADLSLELRKPITFGVITADTLEQAIERAGTKHGNKGWEAALSAIEMANLFKSLR

SEQ ID NO: 4350 - protein, 1371 aa, Artificial Sequence
  SARS-CoV-2/Iceland/319/2020__EPI_ISL_417648 spike protein (1-1211)(Q965C_S1003C) LumSynth construct
MFVFLVLLPLVSSQCVNLTTRTQLPPAYTNSFTRGVYYPDKVFRSSVLHSTQDLFLPFFSNVTWFHAIHVSGTNGTKRFDNPVLPFNDGVYFASTEKSNIIRGWIFGTTLDSKTQSLLIVNNATNVVIKVCEFQFCNDPFLGVYYHKNNKSWMESEFRVYSSANNCTFEYVSQPFLIDLEGKQGNFKNLREFVFKNIDGYFKIYSKHTPINLVRDLPQGFSALEPLVDLPIGINITRFQTLLALHRSYLTPGDSSSGWTAGAAAYYVGYLQPRTFLLKYNENGTITDAVDCALDPLSETKCTLKSFTVEKGIYQTSNFRVQPTESIVRFPNITNLCPFGEVFNATRFASVYAWNRKRISNCVADYSVLYNSASFSTFKCYGVSPTKLNDLCFTNVYADSFVIRGDEVRQIAPGQTGKIADYNYKLPDDFTGCVIAWNSNNLDSKVGGNYNYLYRLFRKSNLKPFERDISTEIYQAGSTPCNGVEGFNCYFPLQSYGFQPTNGVGYQPYRVVVLSFELLHAPATVCGPKKSTNLVKNKCVNFNFNGLTGTGVLTESNKKFLPFQQFGRDIADTTDAVRDPQTLEILDITPCSFGGVSVITPGTNTSNQVAVLYQGVNCTEVPVAIHADQLTPTWRVYSTGSNVFQTRAGCLIGAEHVNNSYECDIPIGAGICASYQTQTNSPRRARSVASQSIIAYTMSLGAENSVAYSNNSIAIPTNFTISVTTEILPVSMTKTSVDCTMYICGDSTECSNLLLQYGSFCTQLNRALTGIAVEQDKNTQEVFAQVKQIYKTPPIKDFGGFNFSQILPDPSKPSKRSFIEDLLFNKVTLADAGFIKQYGDCLGDIAARDLICAQKFNGLTVLPPLLTDEMIAQYTSALLAGTITSGWTFGAGAALQIPFAMQMAYRFNGIGVTQNVLYENQKLIANQFNSAIGKIQDSLSSTASALGKLQDVVNQNAQALNTLVKCLSSNFGAISSVLNDILSRLDKVEAEVQIDRLITGRLQCLQTYVTQQLIRAAEIRASANLAATKMSECVLGQSKRVDFCGKGYHLMSFPQSAPHGVVFLHVTYVPAQEKNFTTAPAICHDGKAHFPREGVFVSNGTHWFVTQRNFYEPQIITTDNTFVSGNCDVVIGIVNNTVYDPLQPELDSFKEELDKYFKNHTSPDVDLGDISGINASVVNIQKEIDRLNEVAKNLNESLIDLQELGKYEQYIKGGGSGGGQIYEGKLTAEGLRFGIVASRFNHALVDRLVEGAIDAIVRHGGREEDITLVRVPGSWEIPVAAGELARKEDIDAVIAIGVLIRGATPHFDYIASEVSKGLADLSLELRKPITFGVITADTLEQAIERAGTKHGNKGWEAALSAIEMANLFKSLR

SEQ ID NO: 4351 - protein, 1371 aa, Artificial Sequence
  SARS-CoV-2/Congo/94/2020__EPI_ISL_417947 spike protein (1-1211)(Q965C_S1003C) LumSynth construct
MFVFLVLLPLVSSQCVNLTTRTQLPPAYTNSFTRGVYYPDKVFRSSVLHSTQDLFLPFFSNVTWFHAIHVSGTNGTKRFDNPVLPFNDGVYFASTEKSNIIRGWIFGTTLDSKTQSLLIVNNATNVVIKVCEFQFCNDPFLGVYYHKNNKSWMESEFRVYSSANNCTFEYVSQPFLMDLEGKQGNFKNLREFVFKNIDGYFKIYSKHTPINLVRDLPQGFSALEPLVDLPIGINITRFQTLLALHRSYLTPGDSSSGWTAGAAAYYVGYLQPRTFLLKYNENGTITDAVDCALDPLSETKCTLKSFTVEKGIYQTSNFRVQPTESIVRFPNITNLCPFGEVFNATRFASVYAWNRKRISNCVADYSVLYNSASFSTFKCYGVSPTKLNDLCFTNVYADSFVIRGDEVRQIAPGQTGKIADYNYKLPDDFTGCVIAWNSNNLDSKVGGNYNYLYRLFRKSNLKPFERDISTEIYQAGSTPCNGVEGFNCYFPLQSYGFQPTNGVGYQPYRVVVLSFELLHAPATVCGPKKSTNLVKNKCVNFNFNGLTGTGVLTESNKKFLPFQQFGRDIADTTDAVRDPQTLEILDITPCSFGGVSVITPGTNTSNQVAVLYQGVNCTEVPVAIHADQLTPTWRVYSTGSNVFQTRAGCLIGAEHVNNSYECDIPIGAGICASYQTQTNSPRRARSVASQSIIAYTMSLGAENSVAYSNNSIAIPTNFTISVTTEILPVSMTKTSVDCTMYICGDSTECSNLLLQYGSFCTQLNRALTGIAVEQDKNTQEVFAQVKQIYKTPPIKDFGGFNFSQILPDPSKPSKRSFIEDILFNKVTLADAGFIKQYGDCLGDIAARDLICAQKFNGLTVLPPLLTDEMIAQYTSALLAGTITSGWTFGAGAALQIPFAMQMAYRFNGIGVTQNVLYENQKLIANQFNSAIGKIQDSLSSTASALGKLQDVVNQNAQALNTLVKCLSSNFGAISSVLNDILSRLDKVEAEVQIDRLITGRLQCLQTYVTQQLIRAAEIRASANLAATKMSECVLGQSKRVDFCGKGYHLMSFPQSAPHGVVFLHVTYVPAQEKNFTTAPAICHDGKAHFPREGVFVSNGTHWFVTQRNFYEPQIITTDNTFVSGNCDVVIGIVNNTVYDPLQPELDSFKEELDKYFKNHTSPDVDLGDISGINASVVNIQKEIDRLNEVAKNLNESLIDLQELGKYEQYIKGGGSGGGQIYEGKLTAEGLRFGIVASRFNHALVDRLVEGAIDAIVRHGGREEDITLVRVPGSWEIPVAAGELARKEDIDAVIAIGVLIRGATPHFDYIASEVSKGLADLSLELRKPITFGVITADTLEQAIERAGTKHGNKGWEAALSAIEMANLFKSLR

SEQ ID NO: 4352 - protein, 1371 aa, Artificial Sequence
  SARS-CoV-2/Congo/158/2020__EPI_ISL_417950 spike protein (1-1211)(Q965C_S1003C) LumSynth construct
MFVFLVLLPLVSSQCVNLTTRTQLPPAYTNSFTRGVYYPDKVFRSSVLHSTQDLFLPFFSNVTWFHAIHVSGTNGTKRFDNPVLPFNDGVYFASTEKSNIIRGWIFGTTLDSKTQSLLIVNNATNVVIKVCEFQFCNDPFLGVYYHKNNKSWMESEFRVYSSANNCTFEYVSQPFLMDLEGKQGNFKNLREFVFKNIDGYFKIYSKHTPINLVRDLPQGFSALEPLVDLPIGINITRFQTLLALHRSYLTPGDSSSGWTAGAAAYYVGYLQPRTFLLKYNENGTITDAVDCALDPLSETKCTLKSFTVEKGIYQTSNFRVQPTESIVRFPNITNLCPFGEVFNATRFASVYAWNRKRISNCVADYSVLYNSASFSTFKCYGVSPTKLNDLCFTNVYADSFVIRGDEVRQIAPGQTGKIADYNYKLPDDFTGCVIAWNSNNLDSKVGGNYNYLYRLFRKSNLKPFERDISTEIYQAGSTPCNGVEGFNCYFPLQSYGFQPTNGVGYQPYRVVVLSFELLHAPATVCGPKKSTNLVKNKCVNFNFNGLTGTGVLTESNKKFLPFQQFGRDIADTTDAVRDPQTLEILDITPCSFGGVSVITPGTNTSNQVAVLYQDVNCTEVPVAIHADQLTPTWRVYSTGSNVFQTRAGCLIGAEHVNNSYECDIPIGAGICASYQTQTNSPRRARSVASQSIIAYTMSLGAENSVAYSNNSIAIPTNFTISVTTEILPVSMTKTSVDCTMYICGDSTECSNLLLQYGSFCTQLNRALTGIAVEQDKNTQEVFAQVKQIYKTPPIKDFGGFNFSQILPDPSKPSKRSFIEDLLFNKVTLADAGFIKQYGDCLGDIAARDLICAQKFNGLTVLPPLLTDEMIAQYTSALLAGTITSGWTFGAGAALQIPFAMQMAYRFNGIGVTQNVLYENQKLIANQFNSAIGKIQDSLSSTASALGKLQDVVNQNAQALNTLVKCLSSNFGAISSVLNDILSRLDKVEAEVQIDRLITGRLQCLQTYVTQQLIRAAEIRASANLAATKMSECVLGQSKRVDFCGKGYHLMSFPQSAPHGVVFLHVTYVPAQEKNFTTAPAICHDGKAHFPREGVFVSNGTHWFVTQRNFYEPQIITTDNTFLSGNCDVVIGIVNNTVYDPLQPELDSFKEELDKYFKNHTSPDVDLGDISGINASVVNIQKEIDRLNEVAKNLNESLIDLQELGKYEQYIKGGGSGGGQIYEGKLTAEGLRFGIVASRFNHALVDRLVEGAIDAIVRHGGREEDITLVRVPGSWEIPVAAGELARKEDIDAVIAIGVLIRGATPHFDYIASEVSKGLADLSLELRKPITFGVITADTLEQAIERAGTKHGNKGWEAALSAIEMANLFKSLR

SEQ ID NO: 4353 - protein, 1371 aa, Artificial Sequence
  SARS-CoV-2/USA/UT-00034/2020__EPI_ISL_417977 spike protein (1-1211)(Q965C_S1003C) LumSynth construct
MFVFLVLLPLVSSQCVNLTTRTQLPPAYTNSFTRGVYYPDKVFRSSVLHSTQDLFLPFFSNVTWFHAIHVSGTNGTKRFDNPVLPFNDGVYFASTEKSNIIRGWIFGTTLDSKTQSLLIVNNATNVVIKVCEFQFCNDPFLGVYYYKNNKSWMESEFRVYSSANNCTFEYVSQPFLMDLEGKQGNFKNLREFVFKNIDGYFKIYSKHTPINLVRDLPQGFSALEPLVDLPIGINITRFQTLLALHRSYLTPGDSSSGWTAGAAAYYVGYLQPRTFLLKYNENGTITDAVDCALDPLSETKCTLKSFTVEKGIYQTSNFRVQPTESIVRFPNITNLCPFGEVFNATRFASVYAWNRKRISNCVADYSVLYNSASFSTFKCYGVSPTKLNDLCFTNVYADSFVIRGDEVRQIAPGQTGKIADYNYKLPDDFTGCVIAWNSNNLDSKVGGNYNYLYRLFRKSNLKPFERDISTEIYQAGSTPCNGVEGFNCYFPLQSYGFQPTNGVGYQPYRVVVLSFELLHAPATVCGPKKSTNLVKNKCVNFNFNGLTGTGVLTESNKKFLPFQQFGRDIADTTDAVRDPQTLEILDITPCSFGGVSVITPGTNTSNQVAVLYQGVNCTEVPVAIHADQLTPTWRVYSTGSNVFQTRAGCLIGAEHVNNSYECDIPIGAGICASYQTQTNSPRRARSVASQSIIAYTMSLGAENSVAYSNNSIAIPTNFTISVTTEILPVSMTKTSVDCTMYICGDSTECSNLLLQYGSFCTQLNRALTGIAVEQDKNTQEVFAQVKQIYKTPPIKDFGGFNFSQILPDPSKPSKRSFIEDLLFNKVTLADAGFIKQYGDCLGDIAARDLICAQKFNGLTVLPPLLTDEMIAQYTSALLAGTITSGWTFGAGAALQIPFAMQMAYRFNGIGVTQNVLYENQKLIANQFNSAIGKIQDSLSSTASALGKLQDVVNQNAQALNTLVKCLSSNFGAISSVLNDILSRLDKVEAEVQIDRLITGRLQCLQTYVTQQLIRAAEIRASANLAATKMSECVLGQSKRVDFCGKGYHLMSFPQSAPHGVVFLHVTYVPAQEKNFTTAPAICHDGKAHFPREGVFVSNGTHWFVTQRNFYEPQIITTDNTFVSGNCDVVIGIVNNTVYDPLQPELDSFKEELDKYFKNHTSPDVDLGDISGINASVVNIQKEIDRLNEVAKNLNESLIDLQELGKYEQYIKGGGSGGGQIYEGKLTAEGLRFGIVASRFNHALVDRLVEGAIDAIVRHGGREEDITLVRVPGSWEIPVAAGELARKEDIDAVIAIGVLIRGATPHFDYIASEVSKGLADLSLELRKPITFGVITADTLEQAIERAGTKHGNKGWEAALSAIEMANLFKSLR

SEQ ID NO: 4354 - protein, 1371 aa, Artificial Sequence
  SARS-CoV-2/USA/UT-00033/2020__EPI_ISL_417976 spike protein (1-1211)(Q965C_S1003C) LumSynth construct
MFVFLVLLPLVSSQCVNLTTRTQLPPAYTNSFTRGVYYPDKVFRSSVLHSTQDLFLPFFSNVTWFHAIHVSGTNGTKRFDNPVLPFNDGVYFASTEKSNIIRGWIFGTTLDSKTQSLLIVNNATNVVIKVCEFQFCNDPFLGVYYHKNNKSWMESEFRVYSSANNCTFEYVSQPFLMDLEGKQGNFKNLREFVFKNIDGYFKIYSKHTPINLVRDLPQGFSALEPLVDLPIGINITRFQTLLALHRSYLTPGDSSSGLTAGAAAYYVGYLQPRTFLLKYNENGTITDAVDCALDPLSETKCTLKSFTVEKGIYQTSNFRVQPTESIVRFPNITNLCPFGEVFNATRFASVYAWNRKRISNCVADYSVLYNSASFSTFKCYGVSPTKLNDLCFTNVYADSFVIRGDEVRQIAPGQTGKIADYNYKLPDDFTGCVIAWNSNNLDSKVGGNYNYLYRLFRKSNLKPFERDISTEIYQAGSTPCNGVEGFNCYFPLQSYGFQPTNGVGYQPYRVVVLSFELLHAPATVCGPKKSTNLVKNKCVNFNFNGLTGTGVLTESNKKFLPFQQFGRDIADTTDAVRDPQTLEILDITPCSFGGVSVITPGTNTSNQVAVLYQGVNCTEVPVAIHADQLTPTWRVYSTGSNVFQTRAGCLIGAEHVNNSYECDIPIGAGICASYQTQTNSPRRARSVASQSIIAYTMSLGAENSVAYSNNSIAIPTNFTISVTTEILPVSMTKTSVDCTMYICGDSTECSNLLLQYGSFCTQLNRALTGIAVEQDKNTQEVFAQVKQIYKTPPIKDFGGFNFSQILPDPSKPSKRSFIEDLLFNKVTLADAGFIKQYGDCLGDIAARDLICAQKFNGLTVLPPLLTDEMIAQYTSALLAGTITSGWTFGAGAALQIPFAMQMAYRFNGIGVTQNVLYENQKLIANQFNSAIGKIQDSLSSTASALGKLQDVVNQNAQALNTLVKCLSSNFGAISSVLNDILSRLDKVEAEVQIDRLITGRLQCLQTYVTQQLIRAAEIRASANLAATKMSECVLGQSKRVDFCGKGYHLMSFPQSAPHGVVFLHVTYVPAQEKNFTTAPAICHDGKAHFPREGVFVSNGTHWFVTQRNFYEPQIITTDNTFVSGNCDVVIGIVNNTVYDPLQPELDSFKEELDKYFKNHTSPDVDLGDISGINASVVNIQKEIDRLNEVAKNLNESLIDLQELGKYEQYIKGGGSGGGQIYEGKLTAEGLRFGIVASRFNHALVDRLVEGAIDAIVRHGGREEDITLVRVPGSWEIPVAAGELARKEDIDAVIAIGVLIRGATPHFDYIASEVSKGLADLSLELRKPITFGVITADTLEQAIERAGTKHGNKGWEAALSAIEMANLFKSLR

SEQ ID NO: 4355 - protein, 1371 aa, Artificial Sequence
  SARS-CoV-2/USA/WI-13/2020__EPI_ISL_417516 spike protein (1-1211)(Q965C_S1003C) LumSynth construct
MFVFLVLLPLVSSQCVNLTTRTQLPPAYTNSFTRGVYYPDKVFRSSVLHSTQDLFLPFFSNVTWFHAIHVSGTNGTKRFDNPVLPFNDGVYFASTEKSNIIRGWIFGTTLDSKTQSLLIVNNATNVVIKVCEFQFCNDPFLGVYYHKNNKSWMESEFRVYSSANNCTFEYVSQPFLMDLEGKQGNFKNLREFVFKNIDGYFKIYSKHTPINLVRDLPQGFSALEPLVDLPIGINITRFQTLLALHRSYLTPGDSSSGWTAGAAAYYVGYLQPRTFLLKYNENGTITDAVDCALDPLSETKCTLKSFTVEKGIYQTSNFRVLPTESIVRFPNITNLCPFGEVFNATRFASVYAWNRKRISNCVADYSVLYNSASFSTFKCYGVSPTKLNDLCFTNVYADSFVIRGDEVRQIAPGQTGKIADYNYKLPDDFTGCVIAWNSNNLDSKVGGNYNYLYRLFRKSNLKPFERDISTEIYQAGSTPCNGVEGFNCYFPLQSYGFQPTNGVGYQPYRVVVLSFELLHAPATVCGPKKSTNLVKNKCVNFNFNGLTGTGVLTESNKKFLPFQQFGRDIADTTDAVRDPQTLEILDITPCSFGGVSVITPGTNTSNQVAVLYQGVNCTEVPVAIHADQLTPTWRVYSTGSNVFQTRAGCLIGAEHVNNSYECDIPIGAGICASYQTQTNSPRRARSVASQSIIAYTMSLGAENSVAYSNNSIAIPTNFTISVTTEILPVSMTKTSVDCTMYICGDSTECSNLLLQYGSFCTQLNRALTGIAVEQDKNTQEVFAQVKQIYKTPPIKDFGGFNFSQILPDPSKPSKRSFIEDLLFNKVTLADAGFIKQYGDCLGDIAARDLICAQKFNGLTVLPPLLTDEMIAQYTSALLAGTITSGWTFGAGAALQIPFAMQMAYRFNGIGVTQNVLYENQKLIANQFNSAIGKIQDSLSSTASALGKLQDVVNQNAQALNTLVKCLSSNFGAISSVLNDILSRLDKVEAEVQIDRLITGRLQCLQTYVTQQLIRAAEIRASANLAATKMSECVLGQSKRVDFCGKGYHLMSFPQSAPHGVVFLHVTYVPAQEKNFTTAPAICHDGKAHFPREGVFVSNGTHWFVTQRNFYEPQIITTDNTFVSGNCDVVIGIVNNTVYDPLQPELDSFKEELDKYFKNHTSPDVDLGDISGINASVVNIQKEIDRLNEVAKNLNESLIDLQELGKYEQYIKGGGSGGGQIYEGKLTAEGLRFGIVASRFNHALVDRLVEGAIDAIVRHGGREEDITLVRVPGSWEIPVAAGELARKEDIDAVIAIGVLIRGATPHFDYIASEVSKGLADLSLELRKPITFGVITADTLEQAIERAGTKHGNKGWEAALSAIEMANLFKSLR

SEQ ID NO: 4356 - protein, 1370 aa, Artificial Sequence
  SARS-CoV-2/India/1-27/2020__EPI_ISL_413522 spike protein (1-1210)(Q964C_S1002C) LumSynth construct
MFVFLVLLPLVSSQCVNLTTRTQLPPAYTNSFTRGVYYPDKVFRSSVLHSTQDLFLPFFSNVTWFHAIHVSGTNGTKRFDNPVLPFNDGVYFASTEKSNIIRGWIFGTTLDSKTQSLLIVNNATNVVIKVCEFQFCNDPFLGVYHKNNKSWMESEFRVYSSANNCTFEYVSQPFLMDLEGKQGNFKNLREFVFKNIDGYFKIYSKHTPINLVRDLPQGFSALEPLVDLPIGINITRFQTLLALHRSYLTPGDSSSGWTAGAAAYYVGYLQPRTFLLKYNENGTITDAVDCALDPLSETKCTLKSFTVEKGIYQTSNFRVQPTESIVRFPNITNLCPFGEVFNATRFASVYAWNRKRISNCVADYSVLYNSASFSTFKCYGVSPTKLNDLCFTNVYADSFVIRGDEVIQIAPGQTGKIADYNYKLPDDFTGCVIAWNSNNLDSKVGGNYNYLYRLFRKSNLKPFERDISTEIYQAGSTPCNGVEGFNCYFPLQSYGFQPTNGVGYQPYRVVVLSFELLHAPATVCGPKKSTNLVKNKCVNFNFNGLTGTGVLTESNKKFLPFQQFGRDIADTTDAVRDPQTLEILDITPCSFGGVSVITPGTNTSNQVAVLYQDVNCTEVPVAIHADQLTPTWRVYSTGSNVFQTRAGCLIGAEHVNNSYECDIPIGAGICASYQTQTNSPRRARSVASQSIIAYTMSLGAENSVAYSNNSIAIPTNFTISVTTEILPVSMTKTSVDCTMYICGDSTECSNLLLQYGSFCTQLNRALTGIAVEQDKNTQEVFAQVKQIYKTPPIKDFGGFNFSQILPDPSKPSKRSFIEDLLFNKVTLADAGFIKQYGDCLGDIAARDLICAQKFNGLTVLPPLLTDEMIAQYTSALLAGTITSGWTFGAGAALQIPFAMQMAYRFNGIGVTQNVLYENQKLIANQFNSAIGKIQDSLSSTASALGKLQDVVNQNAQALNTLVKCLSSNFGAISSVLNDILSRLDKVEAEVQIDRLITGRLQCLQTYVTQQLIRAAEIRASANLAATKMSECVLGQSKRVDFCGKGYHLMSFPQSAPHGVVFLHVTYVPAQEKNFTTAPAICHDGKAHFPREGVFVSNGTHWFVTQRNFYEPQIITTDNTFVSGNCDVVIGIVNNTVYDPLQPELDSFKEELDKYFKNHTSPDVDLGDISGINASVVNIQKEIDRLNEVAKNLNESLIDLQELGKYEQYIKGGGSGGGQIYEGKLTAEGLRFGIVASRFNHALVDRLVEGAIDAIVRHGGREEDITLVRVPGSWEIPVAAGELARKEDIDAVIAIGVLIRGATPHFDYIASEVSKGLADLSLELRKPITFGVITADTLEQAIERAGTKHGNKGWEAALSAIEMANLFKSLR

SEQ ID NO: 4357 - protein, 1365 aa, Artificial Sequence
  SARS-CoV-2/pangolin/Guangxi/P4L/2017__EPI_ISL_410538 spike protein (1-1205)(Q959C_S997C) LumSynth construct
MFVFLFVLPLVSSQCVNLTTRTGIPPGYTNSSTRGVYYPDKVFRSSILHLTQDLFLPFFSNVTWFNTINYQGGFKKFDNPVLPFNDGVYFASTEKSNIIRGWIFGTTLDARTQSLLIVNNATNVVIKVCEFQFCTDPFLGVYYHNNNKTWVENEFRVYSSANNCTFEYISQPFLMDLEGKQGNFKNLREFVFKNVDGYFKIYSKHTPIDLVRDLPRGFAALEPLVDLPIGINITRFQTLLALHRSYLTPGNLESGWTTGAAAYYVGYLQQRTFLLSYNQNGTITDAVDCSLDPLSETKCTLKSLTVEKGIYQTSNFRVQPTISIVRFPNITNLCPFGEVFNASKFASVYAWNRKRISNCVADYSVLYNSTSFSTFKCYGVSPTKLNDLCFTNVYADSFVVKGDEVRQIAPGQTGVIADYNYKLPDDFTGCVIAWNSVKQDALTGGNYGYLYRLFRKSKLKPFERDISTEIYQAGSTPCNGQVGLNCYYPLERYGFHPTTGVNYQPFRVVVLSFELLNGPATVCGPKLSTTLVKDKCVNFNFNGLTGTGVLTTSKKQFLPFQQFGRDISDTTDAVRDPQTLEILDITPCSFGGVSVITPGTNTSNQVAVLYQDVNCTEVPMAIHAEQLTPAWRVYSAGANVFQTRAGCLVGAEHVNNSYECDIPVGAGICASYHSMSSLRSVNQRSIIAYTMSLGAENSVAYSNNSIAIPTNFTISVTTEILPVSMTKTSVDCTMYICGDSIECSNLLLQYGSFCTQLNRALTGIAVEQDKNTQEVFAQVKQIYKTPPIKDFGGFNFSQILPDPSKPSKRSFIEDLLFNKVTLADAGFIKQYGDCLGDIAARDLICAQKFNGLTVLPPLLTDEMIAQYTSALLAGTITSGWTFGAGAALQIPFAMQMAYRFNGIGVTQNVLYENQKLIANQFNSAIGKIQDSLSSTASALGKLQDVVNQNAQALNTLVKCLSSNFGAISSVLNDILSRLDKVEAEVQIDRLITGRLQCLQTYVTQQLIRAAEIRASANLAATKMSECVLGQSKRVDFCGKGYHLMSFPQSAPHGVVFLHVTYVPAQEKNFTTAPAICHEGKAHFPREGVFVSNGTHWFITQRNFYEPQIITTDNTFVSGSCDVVIGIVNNTVYDPLQPELDSFKEELDKYFKNHTSPDVDLGDISGINASVVNIQKEIDRLNEVAKNLNESPIDLQELGKYEQYIKGGGSGGGQIYEGKLTAEGLRFGIVASRFNHALVDRLVEGAIDAIVRHGGREEDITLVRVPGSWEIPVAAGELARKEDIDAVIAIGVLIRGATPHFDYIASEVSKGLADLSLELRKPITFGVITADTLEQAIERAGTKHGNKGWEAALSAIEMANLFKSLR

SEQ ID NO: 4358 - protein, 1365 aa, Artificial Sequence
  SARS-CoV-2/pangolin/Guangxi/P5L/2017__EPI_ISL_410540 spike protein (1-1205)(Q959C_S997C) LumSynth construct
MFVFLFVLPLVSSQCVNLTTRTGIPPGYTNSSTRGVYYPDKVFRSSILHLTQDLFLPFFSNVTWFNTINYQGGFKKFDNPVLPFNDGVYFASTEKSNIIRGWIFGTTLDARTQSLLIVNNATNVVIKVCEFQFCTDPFLGVYYHNNNKTWVENEFRVYSSANNCTFEYISQPFLMDLEGKQGNFKNLREFVFKNVDGYFKIYSKHTPIDLVRDLPRGFAALEPLVDLPIGINITRFQTLLALHRSYLTPGKLESGWTTGAAAYYVGYLQQRTFLLSYNQNGTITDAVDCSLDPLSETKCTLKSLTVEKGIYQTSNFRVQPTISIVRFPNITNLCPFGEVFNASKFASVYAWNRKRISNCVADYSVLYNSTSFSTFKCYGVSPTKLNDLCFTNVYADSFVVKGDEVRQIAPGQTGVIADYNYKLPDDFTGCVIAWNSVKQDALTGGNYGYLYRLFRKSKLKPFERDISTEIYQAGSTPCNGQVGLNCYYPLERYGFHPTTGVNYQPFRVVVLSFELLNGPATVCGPKLSTTLVKDKCVNFNFNGLTGTGVLTTSKKQFLPFQQFGRDISDTTDAVRDPQTLEILDITPCSFGGVSVITPGTNTSNQVAVLYQDVNCTEVPMAIHAEQLTPAWRVYSAGANVFQTRAGCLVGAEHVNNSYECDIPVGAGICASYHSMSSFRSVNQRSIIAYTMSLGAENSVAYSNNSIAIPTNFTISVTTEILPVSMTKTSVDCTMYICGDSIECSNLLLQYGSFCTQLNRALTGIAVEQDKNTQEVFAQVKQIYKTPPIKDFGGFNFSQILPDPSKPSKRSFIEDLLFNKVTLADAGFIKQYGDCLGDIAARDLICAQKFNGLTVLPPLLTDEMIAQYTSALLAGTITSGWTFGAGAALQIPFAMQMAYRFNGIGVTQNVLYENQKLIANQFNSAIGKIQDSLSSTASALGKLQDVVNQNAQALNTLVKCLSSNFGAISSVLNDILSRLDKVEAEVQIDRLITGRLQCLQTYVTQQLIRAAEIRASANLAATKMSECVLGQSKRVDFCGKGYHLMSFPQSAPHGVVFLHVTYVPAQEKNFTTAPAICHEGKAHFPREGVFVSNGTHWFITQRNFYEPQIITTDNTFVSGSCDVVIGIVNNTVYDPLQPELDSFKEELDKYFKNHTSPDVDLGDISGINASVVNIQKEIDRLNEVAKNLNESLIDLQELGKYEQYIKGGGSGGGQIYEGKLTAEGLRFGIVASRFNHALVDRLVEGAIDAIVRHGGREEDITLVRVPGSWEIPVAAGELARKEDIDAVIAIGVLIRGATPHFDYIASEVSKGLADLSLELRKPITFGVITADTLEQAIERAGTKHGNKGWEAALSAIEMANLFKSLR

SEQ ID NO: 4359 - protein, 1365 aa, Artificial Sequence
  SARS-CoV-2/pangolin/Guangxi/P5E/2017__EPI_ISL_410541 spike protein (1-1205)(Q959C_S997C) LumSynth construct
MFVFLFVLPLVSSQCVNLTTRTGIPPGYTNSSTRGVYYPDKVFRSSILHLTQDLFLPFFSNVTWFNTITYQGGSKKFDNPVLPFNDGVYFASTEKSNIIRGWIFGTTLDARTQSLLIVNNATNVVIKVCEFQFCTDPFLGVYYHNNNKTWVENEFRVYSSANNCTFEYISQPFLMDLEGKQGNFKNLREFVFKNVDGYFKIYSKHTPIDLVRDLPRGFAALEPLVDLPIGINITRFQTLLALHRSYLTPGKLESGWTTGAAAYYVGYLQQRTFLLSYNQNGTITDAVDCSLDPLSETKCTLKSLTVEKGIYQTSNFRVQPTISIVRFPNITNLCPFGEVFNASKFASVYAWNRKRISNCVADYSVLYNSTSFSTFKCYGVSPTKLNDLCFTNVYADSFVVKGDEVRQIAPGQTGVIADYNYKLPDDFTGCVIAWNSVKQDALTGDNYGYLYRLFRKSKLKPFERDISTEIYQAGSTPCNGQVGLNCYYPLERYGFHPTTGVNYQPFRVVVLSFELLNGPATVCGPKLSTTLVKDKCVNFNFNGLTGTGVLTTSKKQFLPFQQFGRDISDTTDAVRDPQTLEILDITPCSFGGVSVITPGTNTSNQVAVLYQDVNCTEVPMAIHAEQLTPAWRVYSAGANVFQTRAGCLVGAEHVNNSYECDIPVGAGICASYHSMSSFRSVNQRSIIAYTMSLGAENSVAYSNNSIAIPTNFTISVTTEILPVSMTKTSVDCTMYICGDSIECSNLLLQYGSFCTQLNRALTGIAVEQDKNTQEVFAQVKQIYKTPPIKDFGGFNFSQILPDPSKPSKRSFIEDLLFNKVTLADAGFIKQYGDCLGDIAARDLICAQKFNGLTVLPPLLTDEMIAQYTSALLAGTITSGWTFGAGAALQIPFAMQMAYRFNGIGVTQNVLYENQKLIANQFNSAIGKIQDSLSSTASALGKLQDVVNQNAQALNTLVKCLSSNFGAISSVLNDILSRLDKVEAEVQIDRLITGRLQCLQTYVTQQLIRAAEIRASANLAATKMSECVLGQSKRVDFCGKGYHLMSFPQSAPHGVVFLHVTYVPAQEKNFTTAPAICHEGKAHFPREGVFVSNGTHWFITQRNFYEPQIITTDNTFVSGSCDVVIGIVNNTVYDPLQPELDSFKEELDKYFKNHTSPDVDLGDISGINASVVNIQKEIDRLNEVAKNLNESLIDLQELGKYEQYIKGGGSGGGQIYEGKLTAEGLRFGIVASRFNHALVDRLVEGAIDAIVRHGGREEDITLVRVPGSWEIPVAAGELARKEDIDAVIAIGVLIRGATPHFDYIASEVSKGLADLSLELRKPITFGVITADTLEQAIERAGTKHGNKGWEAALSAIEMANLFKSLR

SEQ ID NO: 4360 - protein, 1363 aa, Artificial Sequence
  SARS-CoV-2/pangolin/Guangxi/P1E/2017__EPI_ISL_410539 spike protein (1-1203)(Q957C_S995C) LumSynth construct
MFVFLFVLPLVSSQCVNLTTRTGIQPGYTNSSTRGVYYPDKVFRSSILHLTQDLFLPFFSNVTWFNTINYQGGFKKFDNPVLPFNDGVYFASTEKSNIIRGWIFGTTLDARTQSLLIVNNATNVVIKVCEFQFCTDPFLGVYYHNNNKTWVENEFRVYSSANNCTFEYISQPFLMDLEGKQGNFKNLREFVFKNVDGYFKIYSKHTPIDLVRDLPRGFAALEPLVDLPIGINITRFQTLLALHRSYLTPGKLESGWTTGAAAYYVGYLQQRTFLLSYNQNGTITDAVDCSLDPLSETKCTLKSLTVEKGIYQTSNFRVQPTISIVRFPNITNLCPFGEVFNASKFASVYAWNRKRISNCVADYSVLYNSTSFSTFKCYGVSPTKLNDLCFTNVYADSFVVKGDEVRQIAPGQTGVIADYNYKLPDDFTGCVIAWNSVKQDALTGGNYLYRLFRKSKLKPFERDISTEIYQAGSTPCNGQVGLNCYYPLERYGFHPTTGVNYQPFRVVVLSFELLNGPATVCGPKLSTTLVKDKCVNFNFNGLTGTGVLTTSKKQFLPFQQFGRDISDTTDAVRDPQTLEILDITPCSFGGVSVITPGTNTSNQVAVLYQDVNCTEVPMAIHAEQLTPAWRVYSAGANVFQTRAGCLVGAEHVNNSYECDIPVGAGICASYHSMSSLRSVNQRSIIAYTMSLGAENSVAYSNNSIAIPTNFTISVTTEILPVSMTKTSVDCTMYICGDSIECSNLLLQYGSFCTQLNRALTGIAVEQDKNTQEVFAQVKQIYKTPPIKDFGGFNFSQILPDPSKPSKRSFIEDLLFNKVTLADAGFIKQYGDCLGDIAARDLICAQKFNGLTVLPPLLTDEMIAQYTSALLAGTITSGWTFGAGAALQIPFAMQMAYRFNGIGVTQNVLYENQKLIANQFNSAIGKIQDSLSSTASALGKLQDVVNQNAQALNTLVKCLSSNFGAISSVLNDILSRLDKVEAEVQIDRLITGRLQCLQTYVTQQLIRAAEIRASANLAATKMSECVLGQSKRVDFCGKGYHLMSFPQSAPHGVVFLHVTYVPAQEKNFTTAPAICHEGKAHFPREGVFVSNGTHWFITQRNFYEPQIITTDNTFVSGSCDVVIGIVNNTVYDPLQPELDSFKEELDKYFKNHTSPDVDLGDISGINASVVNIQKEIDRLNEVAKNLNESLIDLQELGKYEQYIKGGGSGGGQIYEGKLTAEGLRFGIVASRFNHALVDRLVEGAIDAIVRHGGREEDITLVRVPGSWEIPVAAGELARKEDIDAVIAIGVLIRGATPHFDYIASEVSKGLADLSLELRKPITFGVITADTLEQAIERAGTKHGNKGWEAALSAIEMANLFKSLR

SEQ ID NO: 4361 - protein, 1371 aa, Artificial Sequence
  SARS-CoV-2/Wuhan/WIV05/2019__EPI_ISL_402128 spike protein (1-1211)(F970C_G999C) LumSynth construct
MFVFLVLLPLVSSQCVNLTTRTQLPPAYTNSFTRGVYYPDKVFRSSVLHSTQDLFLPFFSNVTWFHAIHVSGTNGTKRFDNPVLPFNDGVYFASTEKSNIIRGWIFGTTLDSKTQSLLIVNNATNVVIKVCEFQFCNDPFLGVYYHKNNKSWMESEFRVYSSANNCTFEYVSQPFLMDLEGKQGNFKNLREFVFKNIDGYFKIYSKHTPINLVRDLPQGFSALEPLVDLPIGINITRFQTLLALHRSYLTPGDSSSGWTAGAAAYYVGYLQPRTFLLKYNENGTITDAVDCALDPLSETKCTLKSFTVEKGIYQTSNFRVQPTESIVRFPNITNLCPFGEVFNATRFASVYAWNRKRISNCVADYSVLYNSASFSTFKCYGVSPTKLNDLCFTNVYADSFVIRGDEVRQIAPGQTGKIADYNYKLPDDFTGCVIAWNSNNLDSKVGGNYNYLYRLFRKSNLKPFERDISTEIYQAGSTPCNGVEGFNCYFPLQSYGFQPTNGVGYQPYRVVVLSFELLHAPATVCGPKKSTNLVKNKCVNFNFNGLTGTGVLTESNKKFLPFQQFGRDIADTTDAVRDPQTLEILDITPCSFGGVSVITPGTNTSNQVAVLYQDVNCTEVPVAIHADQLTPTWRVYSTGSNVFQTRAGCLIGAEHVNNSYECDIPIGAGICASYQTQTNSPRRARSVASQSIIAYTMSLGAENSVAYSNNSIAIPTNFTISVTTEILPVSMTKTSVDCTMYICGDSTECSNLLLQYGSFCTQLNRALTGIAVEQDKNTQEVFAQVKQIYKTPPIKDFGGFNFSQILPDPSKPSKRSFIEDLLFNKVTLADAGFIKQYGDCLGDIAARDLICAQKFNGLTVLPPLLTDEMIAQYTSALLAGTITSGWTFGAGAALQIPFAMQMAYRFNGIGVTQNVLYENQKLIANQFNSAIGKIQDSLSSTASALGKLQDVVNQNAQALNTLVKQLSSNCGAISSVLNDILSRLDKVEAEVQIDRLITCRLQSLQTYVTQQLIRAAEIRASANLAATKMSECVLGQSKRVDFCGKGYHLMSFPQSAPHGVVFLHVTYVPAQEKNFTTAPAICHDGKAHFPREGVFVSNGTHWFVTQRNFYEPQIITTDNTFVSGNCDVVIGIVNNTVYDPLQPELDSFKEELDKYFKNHTSPDVDLGDISGINASVVNIQKEIDRLNEVAKNLNESLIDLQELGKYEQYIKGGGSGGGQIYEGKLTAEGLRFGIVASRFNHALVDRLVEGAIDAIVRHGGREEDITLVRVPGSWEIPVAAGELARKEDIDAVIAIGVLIRGATPHFDYIASEVSKGLADLSLELRKPITFGVITADTLEQAIERAGTKHGNKGWEAALSAIEMANLFKSLR

SEQ ID NO: 4362 - protein, 1367 aa, Artificial Sequence
  SARS-CoV-2/bat/Yunnan/RaTG13/2013__EPI_ISL_402131 spike protein (1-1207)(F966C_G995C) LumSynth construct
MFVFLVLLPLVSSQCVNLTTRTQLPPAYTNSSTRGVYYPDKVFRSSVLHLTQDLFLPFFSNVTWFHAIHVSGTNGIKRFDNPVLPFNDGVYFASTEKSNIIRGWIFGTTLDSKTQSLLIVNNATNVVIKVCEFQFCNDPFLGVYYHKNNKSWMESEFRVYSSANNCTFEYVSQPFLMDLEGKQGNFKNLREFVFKNIDGYFKIYSKHTPINLVRDLPPGFSALEPLVDLPIGINITRFQTLLALHRSYLTPGDSSSGWTAGAAAYYVGYLQPRTFLLKYNENGTITDAVDCALDPLSETKCTLKSFTVEKGIYQTSNFRVQPTDSIVRFPNITNLCPFGEVFNATTFASVYAWNRKRISNCVADYSVLYNSTSFSTFKCYGVSPTKLNDLCFTNVYADSFVITGDEVRQIAPGQTGKIADYNYKLPDDFTGCVIAWNSKHIDAKEGGNFNYLYRLFRKANLKPFERDISTEIYQAGSKPCNGQTGLNCYYPLYRYGFYPTDGVGHQPYRVVVLSFELLNAPATVCGPKKSTNLVKNKCVNFNFNGLTGTGVLTESNKKFLPFQQFGRDIADTTDAVRDPQTLEILDITPCSFGGVSVITPGTNASNQVAVLYQDVNCTEVPVAIHADQLTPTWRVYSTGSNVFQTRAGCLIGAEHVNNSYECDIPIGAGICASYQTQTNSRSVASQSIIAYTMSLGAENSVAYSNNSIAIPTNFTISVTTEILPVSMTKTSVDCTMYICGDSTECSNLLLQYGSFCTQLNRALTGIAVEQDKNTQEVFAQVKQIYKTPPIKDFGGFNFSQILPDPSKPSKRSFIEDLLFNKVTLADAGFIKQYGDCLGDIAARDLICAQKFNGLTVLPPLLTDEMIAQYTSALLAGTITSGWTFGAGAALQIPFAMQMAYRFNGIGVTQNVLYENQKLIANQFNSAIGKIQDSLSSTASALGKLQDVVNQNAQALNTLVKQLSSNCGAISSVLNDILSRLDKVEAEVQIDRLITCRLQSLQTYVTQQLIRAAEIRASANLAATKMSECVLGQSKRVDFCGKGYHLMSFPQSAPHGVVFLHVTYVPAQEKNFTTAPAICHDGKAHFPREGVFVSNGTHWFVTQRNFYEPQIITTDNTFVSGSCDVVIGIVNNTVYDPLQPELDSFKEELDKYFKNHTSPDVDLGDISGINASVVNIQKEIDRLNEVAKNLNESLIDLQELGKYEQYIKGGGSGGGQIYEGKLTAEGLRFGIVASRFNHALVDRLVEGAIDAIVRHGGREEDITLVRVPGSWEIPVAAGELARKEDIDAVIAIGVLIRGATPHFDYIASEVSKGLADLSLELRKPITFGVITADTLEQAIERAGTKHGNKGWEAALSAIEMANLFKSLR

SEQ ID NO: 4363 - protein, 1371 aa, Artificial Sequence
  SARS-CoV-2/Wuhan/HBCDC-HB-01/2019__EPI_ISL_402132 spike protein (1-1211)(F970C_G999C) LumSynth construct
MFVFLVLLPLVSSQCVNLTTRTQLPPAYTNSITRGVYYPDKVFRSSVLHSTQDLFLPFFSNVTWFHAIHVSGTNGTKRFDNPVLPFNDGVYFASTEKSNIIRGWIFGTTLDSKTQSLLIVNNATNVVIKVCEFQFCNDPFLGVYYHKNNKSWMESEFRVYSSANNCTFEYVSQPFLMDLEGKQGNFKNLREFVFKNIDGYFKIYSKHTPINLVRDLPQGFSALEPLVDLPIGINITRFQTLLALHRSYLTPGDSSSGWTAGAAAYYVGYLQPRTFLLKYNENGTITDAVDCALDPLSETKCTLKSFTVEKGIYQTSNFRVQPTESIVRFPNITNLCPFGEVFNATRFASVYAWNRKRISNCVADYSVLYNSASFSTFKCYGVSPTKLNDLCFTNVYADSFVIRGDEVRQIAPGQTGKIADYNYKLPDDFTGCVIAWNSNNLDSKVGGNYNYLYRLFRKSNLKPFERDISTEIYQAGSTPCNGVEGFNCYFPLQSYGFQPTNGVGYQPYRVVVLSFELLHAPATVCGPKKSTNLVKNKCVNFNFNGLTGTGVLTESNKKFLPFQQFGRDIADTTDAVRDPQTLEILDITPCSFGGVSVITPGTNTSNQVAVLYQDVNCTEVPVAIHADQLTPTWRVYSTGSNVFQTRAGCLIGAEHVNNSYECDIPIGAGICASYQTQTNSPRRARSVASQSIIAYTMSLGAENSVAYSNNSIAIPTNFTISVTTEILPVSMTKTSVDCTMYICGDSTECSNLLLQYGSFCTQLNRALTGIAVEQDKNTQEVFAQVKQIYKTPPIKDFGGFNFSQILPDPSKPSKRSFIEDLLFNKVTLADAGFIKQYGDCLGDIAARDLICAQKFNGLTVLPPLLTDEMIAQYTSALLAGTITSGWTFGAGAALQIPFAMQMAYRFNGIGVTQNVLYENQKLIANQFNSAIGKIQDSLSSTASALGKLQDVVNQNAQALNTLVKQLSSNCGAISSVLNDILSRLDKVEAEVQIDRLITCRLQSLQTYVTQQLIRAAEIRASANLAATKMSECVLGQSKRVDFCGKGYHLMSFPQSAPHGVVFLHVTYVPAQEKNFTTAPAICHDGKAHFPREGVFVSNGTHWFVTQRNFYEPQIITTDNTFVSGNCDVVIGIVNNTVYDPLQPELDSFKEELDKYFKNHTSPDVDLGDISGINASVVNIQKEIDRLNEVAKNLNESLIDLQELGKYEQYIKGGGSGGGQIYEGKLTAEGLRFGIVASRFNHALVDRLVEGAIDAIVRHGGREEDITLVRVPGSWEIPVAAGELARKEDIDAVIAIGVLIRGATPHFDYIASEVSKGLADLSLELRKPITFGVITADTLEQAIERAGTKHGNKGWEAALSAIEMANLFKSLR

SEQ ID NO: 4364 - protein, 1371 aa, Artificial Sequence
  SARS-CoV-2/Guangdong/20SF028/2020__EPI_ISL_403936 spike protein (1-1211)(F970C_G999C) LumSynth construct
MFVFLVLLPLVSSQCVNLTTRTQLPPAYTNSFTRGVYYPDKVFRSSVLYSTQDLFLPFFSNVTWFHAIHVSGTNGTKRFDNPVLPFNDGVYFASTEKSNIIRGWIFGTTLDSKTQSLLIVNNATNVVIKVCEFQFCNDPFLGVYYHKNNKSWMESEFRVYSSANNCTFEYVSQPFLMDLEGKQGNFKNLREFVFKNIDGYFKIYSKHTPINLVRDLPQGFSALEPLVDLPIGINITRFQTLLALHRSYLTPGDSSSGWTAGAAAYYVGYLQPRTFLLKYNENGTITDAVDCALDPLSETKCTLKSFTVEKGIYQTSNFRVQPTESIVRFPNITNLCPFGEVFNATRFASVYAWNRKRISNCVADYSVLYNSASFSTFKCYGVSPTKLNDLCFTNVYADSFVIRGDEVRQIAPGQTGKIADYNYKLPDDFTGCVIAWNSNNLDSKVGGNYNYLYRLFRKSNLKPFERDISTEIYQAGSTPCNGVEGFNCYFPLQSYGFQPTNGVGYQPYRVVVLSFELLHAPATVCGPKKSTNLVKNKCVNFNFNGLTGTGVLTESNKKFLPFQQFGRDIADTTDAVRDPQTLEILDITPCSFGGVSVITPGTNTSNQVAVLYQDVNCTEVPVAIHADQLTPTWRVYSTGSNVFQTRAGCLIGAEHVNNSYECDIPIGAGICASYQTQTNSPRRARSVASQSIIAYTMSLGAENSVAYSNNSIAIPTNFTISVTTEILPVSMTKTSVDCTMYICGDSTECSNLLLQYGSFCTQLNRALTGIAVEQDKNTQEVFAQVKQIYKTPPIKDFGGFNFSQILPDPSKPSKRSFIEDLLFNKVTLADAGFIKQYGDCLGDIAARDLICAQKFNGLTVLPPLLTDEMIAQYTSALLAGTITSGWTFGAGAALQIPFAMQMAYRFNGIGVTQNVLYENQKLIANQFNSAIGKIQDSLSSTASALGKLQDVVNQNAQALNTLVKQLSSNCGAISSVLNDILSRLDKVEAEVQIDRLITCRLQSLQTYVTQQLIRAAEIRASANLAATKMSECVLGQSKRVDFCGKGYHLMSFPQSAPHGVVFLHVTYVPAQEKNFTTAPAICHDGKAHFPREGVFVSNGTHWFVTQRNFYEPQIITTDNTFVSGNCDVVIGIVNNTVYDPLQPELDSFKEELDKYFKNHTSPDVDLGDISGINASVVNIQKEIDRLNEVAKNLNESLIDLQELGKYEQYIKGGGSGGGQIYEGKLTAEGLRFGIVASRFNHALVDRLVEGAIDAIVRHGGREEDITLVRVPGSWEIPVAAGELARKEDIDAVIAIGVLIRGATPHFDYIASEVSKGLADLSLELRKPITFGVITADTLEQAIERAGTKHGNKGWEAALSAIEMANLFKSLR

SEQ ID NO: 4365 - protein, 1371 aa, Artificial Sequence
  SARS-CoV-2/Shenzhen/SZTH-001/2020__EPI_ISL_406592 spike protein (1-1211)(F970C_G999C) LumSynth construct
MFVFLVLLPLVSSQCVNLTTRTQLPPAYTNSFTRGVYYPDKVFRSSVLHSTQDLFLPFFSNVTWFHAIHVSGTNGTKRFDNPVLPFNDGVYFASTEKSNIIRGWIFGTTLDSKTQSLLIVNNATNVVIKVCEFQFCNDPFLGVYYHKNNKSWMESEFRVYSSANNCTFEYVSQPFLMDLEGKQGNFKNLREFVFKNIDGYFKIYSKHTPINLVRDLPQGFSALEPLVDLPIGINITRFQTLLALHRSYLTPGDSSSGWTAGAAAYYVGYLQPRTFLLKYNENGTITDAVDCALDPLSETKCTLKSFTVEKGIYQTSNFRVQPTESIVRFPNITNLCPFGEVFNATRFASVYAWNRKRISNCVADYSVLYNSASFSTFKCYGVSPTKLNDLCFTNVYADSFVIRGDEVRQIAPGQTGKIADYNYKLPDDFTGCVIAWNSNNLDSKVGGNYNYLYRLFRKSNLKPFERDISTEIYQAGSTPCNGVEGFNCYFPLQSYGFQPTNGVGYQPYRVVVLSFELLHAPATVCGPKKSTNLVKNKCVNFNFNGLTGTGVLTESNKKFLPFQQFGRDIADTTDAVRDPQTLEILDITPCSFGGVSVITPGTNTSNQVAVLYQDVNCTEVPVAIHADQLTPTWRVYSTGSNVFQTRAGCLIGAEHVNNSYECDIPIGAGICASYQTQTNSPRRARSVASQSIIAYTMSLGAENSVAYSNNSIAIPTNFTISVTTEILPVSMTKTSVDCTMYICGDSTECSNLLLQYGSFCTQLNRALTGIAVEQDKNTQEVFAQVKQIYKTPPIKDFGGFNFSQILPDPSKPSKRSFIEDLLFNKVTLADAGFIKQYGDCLGDIAARDLICAQKFNGLTVLPPLLTDEMIAQYTSALLAGTITSGWTFGAGAALQIPFAMQMAYRFNGIGVTQNVLYENQKLIANQFNSAIGKIQDSLSSTASALGKLQDVVNQNAQALNTLVKQLSSNCGAISSVLNDILSRLDKVEAEVQIDRLITCRLQSLQTYVTQQLIRAAEIRASANLAATKMSECVLGQSKRVDFCGKGYHLMSFPQSAPHGVVFLHVTYVPAQEKNFTTAPAICHDGKAHFPREGVFVSNGTHWFVTQRNFYEPQIITTDNTFVSGNCDVLIGIVNNTVYDPLQPELDSFKEELDKYFKNHTSPDVDLGDISGINASVVNIQKEIDRLNEVAKNLNESLIDLQELGKYEQYIKGGGSGGGQIYEGKLTAEGLRFGIVASRFNHALVDRLVEGAIDAIVRHGGREEDITLVRVPGSWEIPVAAGELARKEDIDAVIAIGVLIRGATPHFDYIASEVSKGLADLSLELRKPITFGVITADTLEQAIERAGTKHGNKGWEAALSAIEMANLFKSLR

SEQ ID NO: 4366 - protein, 1371 aa, Artificial Sequence
  SARS-CoV-2/Shenzhen/SZTH-004/2020__EPI_ISL_406595 spike protein (1-1211)(F970C_G999C) LumSynth construct
MFVFLVLLPLVSSQCVNLTTRTQLPPAYTNSFTRGVYYPDKVFRSSVLHSTQDLFLPFFSNVTWFHAIHVSGTNGTKRFDNPVLPFNDGVYFASTEKSNIIRGWIFGTTLDSKTQSLLIVNNATNVVIKVCEFQFCNDPFLGVYYHKNNKSWMESEFRVYSSANNCTFEYVSQPFLMDLEGKQGNFKNLREFVFKNIDGYFKIYSKHTPINLVRDLPQGFSALEPLVDLPIGINITRFQTLLALHRSYLTPGDSSSGWTAGAAAYYVGYLQPRTFLLKYNENGTITDAVDCALDPLSETKCTLKSFTVEKGIYQTSNFRVQPTESIVRFPNITNLCPFGEVFNATRFASVYAWDRKRISNCVAYYSVLYNSASFSTFKCYGVSPTKLNDLCFTNVYADSFVIRGDEVRQIAPGQTGKIADYNYKLPDDFTGCVIAWNSNNLDSKVGGNYNYLYRLFRKSNLKPFERDISTEIYQAGSTPCNGVEGFNCYFPLQSYGFQPTNGVGYQPYRVVVLSFELLHAPATVCGPKKSTNLVKNKCVNFNFNGLTGTGVLTESNKKFLPFQQFGRDIADTTDAVRDPQTLEILDITPCSFGGVSVITPGTNTSNQVAVLYQDVNCTEVPVAIHADQLTPTWRVYSTGSNVFQTRAGCLIGAEHVNNSYECDIPIGAGICASYQTQTNSPRRARSVASQSIIAYTMSLGAENSVAYSNNSIAIPTNFTISVTTEILPVSMTKTSVDCTMYICGDSTECSNLLLQYGSFCTQLNRALTGIAVEQDKNTQEVFAQVKQIYKTPPIKDFGGFNFSQILPDPSKPSKRSFIEDLLFNKVTLADAGFIKQYGDCLGDIAARDLICAQKFNGLTVLPPLLTDEMIAQYTSALLAGTITSGWTFGAGAALQIPFAMQMAYRFNGIGVTQNVLYENQKLIANQFNSAIGKIQDSLSSTASALGKLQDVVNQNAQALNTLVKQLSSNCGAISSVLNDILSRLDKVEAEVQIDRLITCRLQSLQTYVTQQLIRAAEIRASANLAATKMSECVLGQSKRVDFCGKGYHLMSFPQSAPHGVVFLHVTYVPAQEKNFTTAPAICHDGKAHFPREGVFVSNGTHWFVTQRNFYEPQIITTDNTFVSGNCDVVIGIVNNTVYDPLQPELDSFKEELDKYFKNHTSPDVDLGDISGINASVVNIQKEIDRLNEVAKNLNESLIDLQELGKYEQYIKGGGSGGGQIYEGKLTAEGLRFGIVASRFNHALVDRLVEGAIDAIVRHGGREEDITLVRVPGSWEIPVAAGELARKEDIDAVIAIGVLIRGATPHFDYIASEVSKGLADLSLELRKPITFGVITADTLEQAIERAGTKHGNKGWEAALSAIEMANLFKSLR

SEQ ID NO: 4367 - protein, 1371 aa, Artificial Sequence
  SARS-CoV-2/France/IDF0372/2020__EPI_ISL_406596 spike protein (1-1211)(F970C_G999C) LumSynth construct
MFVFLVLLPLVSSQCVNLTTRTQLPPAYTNSFTRGVYYPDKVFRSSVLHSTQDLFLPFFSNVTWFHAIHVSGTNGTKRFDNPVLPFNDGVYFASTEKSNIIRGWIFGTTLDSKTQSLLIVNNATNVVIKVCEFQFCNDPFLGVYYHKNNKSWMESEFRVYSSANNCTFEYVSQPFLMDLEGKQGNFKNLREFVFKNIDGYFKIYSKHTPINLVRDLPQGFSALEPLVDLPIGINITRFQTLLALHRSYLTPGDSSSGWTAGAAAYYVGYLQPRTFLLKYNENGTITDAVDCALDPLSETKCTLKSFTVEKGIYQTSNFRVQPTESIVRFPNITNLCPFGEVFNATRFASVYAWNRKRISNCVADYSFLYNSASFSTFKCYGVSPTKLNDLCFTNVYADSFVIRGDEVRQIAPGQTGKIADYNYKLPDDFTGCVIAWNSNNLDSKVGGNYNYLYRLFRKSNLKPFERDISTEIYQAGSTPCNGVEGFNCYFPLQSYGFQPTNGVGYQPYRVVVLSFELLHAPATVCGPKKSTNLVKNKCVNFNFNGLTGTGVLTESNKKFLPFQQFGRDIADTTDAVRDPQTLEILDITPCSFGGVSVITPGTNTSNQVAVLYQDVNCTEVPVAIHADQLTPTWRVYSTGSNVFQTRAGCLIGAEHVNNSYECDIPIGAGICASYQTQTNSPRRARSVASQSIIAYTMSLGAENSVAYSNNSIAIPTNFTISVTTEILPVSMTKTSVDCTMYICGDSTECSNLLLQYGSFCTQLNRALTGIAVEQDKNTQEVFAQVKQIYKTPPIKDFGGFNFSQILPDPSKPSKRSFIEDLLFNKVTLADAGFIKQYGDCLGDIAARDLICAQKFNGLTVLPPLLTDEMIAQYTSALLAGTITSGWTFGAGAALQIPFAMQMAYRFNGIGVTQNVLYENQKLIANQFNSAIGKIQDSLSSTASALGKLQDVVNQNAQALNTLVKQLSSNCGAISSVLNDILSRLDKVEAEVQIDRLITCRLQSLQTYVTQQLIRAAEIRASANLAATKMSECVLGQSKRVDFCGKGYHLMSFPQSAPHGVVFLHVTYVPAQEKNFTTAPAICHDGKAHFPREGVFVSNGTHWFVTQRNFYEPQIITTDNTFVSGNCDVVIGIVNNTVYDPLQPELDSFKEELDKYFKNHTSPDVDLGDISGINASVVNIQKEIDRLNEVAKNLNESLIDLQELGKYEQYIKGGGSGGGQIYEGKLTAEGLRFGIVASRFNHALVDRLVEGAIDAIVRHGGREEDITLVRVPGSWEIPVAAGELARKEDIDAVIAIGVLIRGATPHFDYIASEVSKGLADLSLELRKPITFGVITADTLEQAIERAGTKHGNKGWEAALSAIEMANLFKSLR

SEQ ID NO: 4368 - protein, 1371 aa, Artificial Sequence
  SARS-CoV-2/Australia/VIC01/2020__EPI_ISL_406844 spike protein (1-1211)(F970C_G999C) LumSynth construct
MFVFLVLLPLVSSQCVNLTTRTQLPPAYTNSFTRGVYYPDKVFRSSVLHSTQDLFLPFFSNVTWFHAIHVSGTNGTKRFDNPVLPFNDGVYFASTEKSNIIRGWIFGTTLDSKTQSLLIVNNATNVVIKVCEFQFCNDPFLGVYYHKNNKSWMESEFRVYSSANNCTFEYVSQPFLMDLEGKQGNFKNLREFVFKNIDGYFKIYSKHTPINLVRDLPQGFSALEPLVDLPIGINITRFQTLLALHRRYLTPGDSSSGWTAGAAAYYVGYLQPRTFLLKYNENGTITDAVDCALDPLSETKCTLKSFTVEKGIYQTSNFRVQPTESIVRFPNITNLCPFGEVFNATRFASVYAWNRKRISNCVADYSVLYNSASFSTFKCYGVSPTKLNDLCFTNVYADSFVIRGDEVRQIAPGQTGKIADYNYKLPDDFTGCVIAWNSNNLDSKVGGNYNYLYRLFRKSNLKPFERDISTEIYQAGSTPCNGVEGFNCYFPLQSYGFQPTNGVGYQPYRVVVLSFELLHAPATVCGPKKSTNLVKNKCVNFNFNGLTGTGVLTESNKKFLPFQQFGRDIADTTDAVRDPQTLEILDITPCSFGGVSVITPGTNTSNQVAVLYQDVNCTEVPVAIHADQLTPTWRVYSTGSNVFQTRAGCLIGAEHVNNSYECDIPIGAGICASYQTQTNSPRRARSVASQSIIAYTMSLGAENSVAYSNNSIAIPTNFTISVTTEILPVSMTKTSVDCTMYICGDSTECSNLLLQYGSFCTQLNRALTGIAVEQDKNTQEVFAQVKQIYKTPPIKDFGGFNFSQILPDPSKPSKRSFIEDLLFNKVTLADAGFIKQYGDCLGDIAARDLICAQKFNGLTVLPPLLTDEMIAQYTSALLAGTITSGWTFGAGAALQIPFAMQMAYRFNGIGVTQNVLYENQKLIANQFNSAIGKIQDSLSSTASALGKLQDVVNQNAQALNTLVKQLSSNCGAISSVLNDILSRLDKVEAEVQIDRLITCRLQSLQTYVTQQLIRAAEIRASANLAATKMSECVLGQSKRVDFCGKGYHLMSFPQSAPHGVVFLHVTYVPAQEKNFTTAPAICHDGKAHFPREGVFVSNGTHWFVTQRNFYEPQIITTDNTFVSGNCDVVIGIVNNTVYDPLQPELDSFKEELDKYFKNHTSPDVDLGDISGINASVVNIQKEIDRLNEVAKNLNESLIDLQELGKYEQYIKGGGSGGGQIYEGKLTAEGLRFGIVASRFNHALVDRLVEGAIDAIVRHGGREEDITLVRVPGSWEIPVAAGELARKEDIDAVIAIGVLIRGATPHFDYIASEVSKGLADLSLELRKPITFGVITADTLEQAIERAGTKHGNKGWEAALSAIEMANLFKSLR

SEQ ID NO: 4369 - protein, 1371 aa, Artificial Sequence
  SARS-CoV-2/Germany/BavPat1/2020__EPI_ISL_406862 spike protein (1-1211)(F970C_G999C) LumSynth construct
MFVFLVLLPLVSSQCVNLTTRTQLPPAYTNSFTRGVYYPDKVFRSSVLHSTQDLFLPFFSNVTWFHAIHVSGTNGTKRFDNPVLPFNDGVYFASTEKSNIIRGWIFGTTLDSKTQSLLIVNNATNVVIKVCEFQFCNDPFLGVYYHKNNKSWMESEFRVYSSANNCTFEYVSQPFLMDLEGKQGNFKNLREFVFKNIDGYFKIYSKHTPINLVRDLPQGFSALEPLVDLPIGINITRFQTLLALHRSYLTPGDSSSGWTAGAAAYYVGYLQPRTFLLKYNENGTITDAVDCALDPLSETKCTLKSFTVEKGIYQTSNFRVQPTESIVRFPNITNLCPFGEVFNATRFASVYAWNRKRISNCVADYSVLYNSASFSTFKCYGVSPTKLNDLCFTNVYADSFVIRGDEVRQIAPGQTGKIADYNYKLPDDFTGCVIAWNSNNLDSKVGGNYNYLYRLFRKSNLKPFERDISTEIYQAGSTPCNGVEGFNCYFPLQSYGFQPTNGVGYQPYRVVVLSFELLHAPATVCGPKKSTNLVKNKCVNFNFNGLTGTGVLTESNKKFLPFQQFGRDIADTTDAVRDPQTLEILDITPCSFGGVSVITPGTNTSNQVAVLYQGVNCTEVPVAIHADQLTPTWRVYSTGSNVFQTRAGCLIGAEHVNNSYECDIPIGAGICASYQTQTNSPRRARSVASQSIIAYTMSLGAENSVAYSNNSIAIPTNFTISVTTEILPVSMTKTSVDCTMYICGDSTECSNLLLQYGSFCTQLNRALTGIAVEQDKNTQEVFAQVKQIYKTPPIKDFGGFNFSQILPDPSKPSKRSFIEDLLFNKVTLADAGFIKQYGDCLGDIAARDLICAQKFNGLTVLPPLLTDEMIAQYTSALLAGTITSGWTFGAGAALQIPFAMQMAYRFNGIGVTQNVLYENQKLIANQFNSAIGKIQDSLSSTASALGKLQDVVNQNAQALNTLVKQLSSNCGAISSVLNDILSRLDKVEAEVQIDRLITCRLQSLQTYVTQQLIRAAEIRASANLAATKMSECVLGQSKRVDFCGKGYHLMSFPQSAPHGVVFLHVTYVPAQEKNFTTAPAICHDGKAHFPREGVFVSNGTHWFVTQRNFYEPQIITTDNTFVSGNCDVVIGIVNNTVYDPLQPELDSFKEELDKYFKNHTSPDVDLGDISGINASVVNIQKEIDRLNEVAKNLNESLIDLQELGKYEQYIKGGGSGGGQIYEGKLTAEGLRFGIVASRFNHALVDRLVEGAIDAIVRHGGREEDITLVRVPGSWEIPVAAGELARKEDIDAVIAIGVLIRGATPHFDYIASEVSKGLADLSLELRKPITFGVITADTLEQAIERAGTKHGNKGWEAALSAIEMANLFKSLR

SEQ ID NO: 4370 - protein, 1371 aa, Artificial Sequence
  SARS-CoV-2/Wuhan/HBCDC-HB-02/2020__EPI_ISL_412978 spike protein (1-1211)(F970C_G999C) LumSynth construct
MFVFLVLLPLVSSQCVNLTTRTQLPPAYTNSFTRGVYYPDKVFRSSVLHSTQDLFLPFFSNVTWFHAIHVSGTNGTKRFDNPVLPFNDGVYFASTEKSNIIRGWIFGTTLDSKTQSLLIVNNATNVVIKVCEFQFCNDPFLGVYYHKNNKSWMESEFRVYSSANNCTFEYVSQPFLMDLEGKQGNFKNLREFVFKNIDGYFKIYSKHTPINLVRDLPQGFSALEPLVDLPIGINITRFQTLLALHRSYLTPGDSSSGWTAGAAAYYVGYLQPRTFLLKYNENGTITDAVDCALDPLSETKCTLKSFTVEKGIYQTSNFRVQPTESIVRFPNITNLCPFGEVFNATRFASVYAWNRKRISNCVADYSVLYNSASFSTFKCYGVSPTKLNDLCFTNVYADSFVIRGDEVRQIAPGQTGKIADYNYKLPDDFTGCVIAWNSNNLDSKVGGNYNYLYRLFRKSNLKPFERDISTEIYQAGSTPCNGVEGFNCYFPLQSYGFQPTNGVGYQPYRVVVLSFELLHAPATVCGPKKSTNLVKNKCVNFNFNGLTGTGVLTESNKKFLPFQQFGRDIADTTDAVRDPQTLEILDITPCSFGGVSVITPGTNTSNQVAVLYQDVNCTEVPVAIHADQLTPTWRVYSTGSNVFQTRAGCLIGAEHVNNSYECDIPIGAGICASYQTQTNSPRRARSVASQSIIAYTMSLGAENSVAYSNNSIAIPTNFTISVTTEILPVSMTKTSVDCTMYICGDSTECSNFLLQYGSFCTQLNRALTGIAVEQDKNTQEVFAQVKQIYKTPPIKDFGGFNFSQILPDPSKPSKRSFIEDLLFNKVTLADAGFIKQYGDCLGDIAARDLICAQKFNGLTVLPPLLTDEMIAQYTSALLAGTITSGWTFGAGAALQIPFAMQMAYRFNGIGVTQNVLYENQKLIANQFNSAIGKIQDSLSSTASALGKLQDVVNQNAQALNTLVKQLSSNCGAISSVLNDILSRLDKVEAEVQIDRLITCRLQSLQTYVTQQLIRAAEIRASANLAATKMSECVLGQSKRVDFCGKGYHLMSFPQSAPHGVVFLHVTYVPAQEKNFTTAPAICHDGKAHFPREGVFVSNGTHWFVTQRNFYEPQIITTDNTFVSGNCDVVIGIVNNTVYDPLQPELDSFKEELDKYFKNHTSPDVDLGDISGINASVVNIQKEIDRLNEVAKNLNESLIDLQELGKYEQYIKGGGSGGGQIYEGKLTAEGLRFGIVASRFNHALVDRLVEGAIDAIVRHGGREEDITLVRVPGSWEIPVAAGELARKEDIDAVIAIGVLIRGATPHFDYIASEVSKGLADLSLELRKPITFGVITADTLEQAIERAGTKHGNKGWEAALSAIEMANLFKSLR

SEQ ID NO: 4371 - protein, 1371 aa, Artificial Sequence
  SARS-CoV-2/Australia/QLD02/2020__EPI_ISL_407896 spike protein (1-1211)(F970C_G999C) LumSynth construct
MFVFLVLLPLVSSQCVNLTTRTQLPPAYTNSFTRGVYYPDKVFRSSVLHSTQDLFLPFFSNVTWFHAIHVSGTNGTKRFDNPVLPFNDGVYFASTEKSNIIRGWIFGTTLDSKTQSLLIVNNATNVVIKVCEFQFCNDPFLGVYYHKNNKSWMESEFRVYSSANNCTFEYVSQPFLMDLEGKQGNFKNLREFVFKNIDGYFKIYSKHTPINLVRDLPQGFSALEPLVDLPIGINITRFQTLLALHRSYLTPGDSSSGWTAGAAAYYVGYLQPRTFLLKYNENGTITDAVDCALDPLSETKCTLKSFTVEKGIYQTSNFRVQPTESIVRFPNITNLCPFGEVFNATRFASVYAWNRKRISNCVADYSVLYNSASFSTFKCYGVSPTKLNDLCFTNVYADSFVIRGDEVRQIAPGQTGKIADYNYKLPDDFTGCVIAWNSNNLDSKVGGNYNYLYRLFRKSNLKPFERDISTEIYQAGSTPCNGVEGFNCYFPLQSYGFQPTNGVGYQPYRVVVLSFELLHAPATVCGPKKSTNLVKNKCVNFNFNGLTGTGVLTESNKKFLPFQQFGRDIADTTDAVRDPQTLEILDITPCSFGGVSVITPGTNTSNQVAVLYQDVNCTEVPVAIHADQLTPTWRVYSTGSNVFQTRAGCLIGAEHVNNSYECDIPIGAGICASYQTQTNSPRRARSVASQSIIAYTMSLGAENSVAYSNNSIAIPTNFTISVTTEILPVSMTKTSVDCTMYICGDSTECSNLLLQYGSFCTQLNRALTGIAVEQDKNTQEVFAQVKQIYKTPPIKDFGGFNFSQILPDPSKPSKRSFIEDLLFNKVTLADAGFIKQYGDCLGDIAARDLICAQKFNGLTVLPPLLTDEMIAQYTSALLAGTITSGWTFGAGAALQIPFAMQMAYRFNGIGVTQNVLYENQKLIANQFNSAIGKIQDSLSSTASALGKLQDVVNQNAQALNTLVKQLSSNCGAISSVLNDILSRLDKVEAEVQIDRLITCRLQSLQTYVTQQLIRAAEIRASANLAATKMSECVLGQSKRVDFCGKGYHLMSFPQSAPHGVVFLHVTYVPAQEKNFTTAPAICHDGKAHFPREGVFVSNGTHWFVTQRNFYEPQIITTDNTFVSGNCDVVIGIVNNTVYDPLQLELDSFKEELDKYFKNHTSPDVDLGDISGINASVVNIQKEIDRLNEVAKNLNESLIDLQELGKYEQYIKGGGSGGGQIYEGKLTAEGLRFGIVASRFNHALVDRLVEGAIDAIVRHGGREEDITLVRVPGSWEIPVAAGELARKEDIDAVIAIGVLIRGATPHFDYIASEVSKGLADLSLELRKPITFGVITADTLEQAIERAGTKHGNKGWEAALSAIEMANLFKSLR

SEQ ID NO: 4372 - protein, 1371 aa, Artificial Sequence
  SARS-CoV-2/India/1-31/2020__EPI_ISL_413523 spike protein (1-1211)(F970C_G999C) LumSynth construct
MFVFLVLLPLVSSQCVNLTTRTQLPPAYTNSFTRGVYYPDKVFRSSVLHSTQDLFLPFFSNVTWFHAIHVSGTNGTKRFDNPVLPFNDGVYFASTEKSNIIRGWIFGTTLDSKTQSLLIVNNATNVVIKVCEFQFCNDPFLGVYYHKNNKSWMESEFRVYSSANNCTFEYVSQPFLMDLEGKQGNFKNLREFVFKNIDGYFKIYSKHTPINLVRDLPQGFSALEPLVDLPIGINITRFQTLLALHRSYLTPGDSSSGWTAGAAAYYVGYLQPRTFLLKYNENGTITDAVDCALDPLSETKCTLKSFTVEKGIYQTSNFRVQPTESIVRFPNITNLCPFGEVFNATRFASVYAWNRKRISNCVADYSVLYNSASFSTFKCYGVSPTKLNDLCFTNVYADSFVIRGDEVRQIAPGQTGKIADYNYKLPDDFTGCVIAWNSNNLDSKVGGNYNYLYRLFRKSNLKPFERDISTEIYQAGSTPCNGVEGFNCYFPLQSYGFQPTNGVGYQPYRVVVLSFELLHAPATVCGPKKSTNLVKNKCVNFNFNGLTGTGVLTESNKKFLPFQQFGRDIADTTDAVRDPQTLEILDITPCSFGGVSVITPGTNTSNQVAVLYQDVNCTEVPVAIHADQLTPTWRVYSTGSNVFQTRAGCLIGAEHVNNSYECDIPIGAGICASYQTQTNSPRRARSVASQSIIAYTMSLGAENSVAYSNNSIAIPTNFTISVTTEILPVSMTKTSVDCTMYICGDSTECSNLLLQYGSFCTQLNRALTGIAVEQDKNTQEVFAQVKQIYKTPPIKDFGGFNFSQILPDPSKPSKRSFIEDLLFNKVTLADAGFIKQYGDCLGDIAARDLICAQKFNGLTVLPPLLTDEMIAQYTSALLAGTITSGWTFGAGAALQIPFAMQMAYRFNGIGVTQNVLYENQKLIANQFNSVIGKIQDSLSSTASALGKLQDVVNQNAQALNTLVKQLSSNCGAISSVLNDILSRLDKVEAEVQIDRLITCRLQSLQTYVTQQLIRAAEIRASANLAATKMSECVLGQSKRVDFCGKGYHLMSFPQSAPHGVVFLHVTYVPAQEKNFTTAPAICHDGKAHFPREGVFVSNGTHWFVTQRNFYEPQIITTDNTFVSGNCDVVIGIVNNTVYDPLQPELDSFKEELDKYFKNHTSPDVDLGDISGINASVVNIQKEIDRLNEVAKNLNESLIDLQELGKYEQYIKGGGSGGGQIYEGKLTAEGLRFGIVASRFNHALVDRLVEGAIDAIVRHGGREEDITLVRVPGSWEIPVAAGELARKEDIDAVIAIGVLIRGATPHFDYIASEVSKGLADLSLELRKPITFGVITADTLEQAIERAGTKHGNKGWEAALSAIEMANLFKSLR

SEQ ID NO: 4373 - protein, 1371 aa, Artificial Sequence
  SARS-CoV-2/Guangdong/GD2020087-P0008/2020__EPI_ISL_413863 spike protein (1-1211)(F970C_G999C) LumSynth construct
MFVFLVLLPLVSSQCVNLTTRTQLPPAYTNSFTRGVYYPDKVFRSSVLHSTQDLFLPFFSNVTWFHAIHVSGTNGTKRFDNPVLPFNDGVYFASTEKSNIIRGWIFGTTLDSKTQSLLIVNNATNVVIKVCEFQFCNDPFLGVYYHKNNKSWMESEFRVYSSANNCTFEYVSQPFLMDLEGKQGNFKNLREFVFKNIDGYFKIYSKHTPINLVRDLPQGFSALEPLVDLPIGINITRFQTLLALHRSYLTPGDSSSGWTAGAAAYYVGYLQPRTFLLKYNENGTITDAVDCALDPLSETKCTLKSFTVEKGIYQTSNFRVQPTESIVRFPNITNLCPFGEVFNATRFASVYAWNRKRISNCVADYSVLYNSASFSTFKCYGVSPTKLNDLCFTNVYADSFVIRGDEVREIAPGQTGKIADYNYKLPDDFTGCVIAWNSNNLDSKVGGNYNYLYRLFRKSNLKPFERDISTEIYQAGSTPCNGVEGFNCYFPLQSYGFQPTNGVGYQPYRVVVLSFELLHAPATVCGPKKSTNLVKNKCVNFNFNGLTGTGVLTESNKKFLPFQQFGRDIADTTDAVRDPQTLEILDITPCSFGGVSVITPGTNTSNQVAVLYQDVNCTEVPVAIHADQLTPTWRVYSTGSNVFQTRAGCLIGAEHVNNSYECDIPIGAGICASYQTQTNSPRRARSVASQSIIAYTMSLGAENSVAYSNNSIAIPTNFTISVTTEILPVSMTKTSVDCTMYICGDSTECSNLLLQYGSFCTQLNRALTGIAVEQDKNTQEVFAQVKQIYKTPPIKDFGGFNFSQILPDPSKPSKRSFIEDLLFNKVTLADAGFIKQYGDCLGDIAARDLICAQKFNGLTVLPPLLTDEMIAQYTSALLAGTITSGWTFGAGAALQIPFAMQMAYRFNGIGVTQNVLYENQKLIANQFNSAIGKIQDSLSSTASALGKLQDVVNQNAQALNTLVKQLSSNCGAISSVLNDILSRLDKVEAEVQIDRLITCRLQSLQTYVTQQLIRAAEIRASANLAATKMSECVLGQSKRVDFCGKGYHLMSFPQSAPHGVVFLHVTYVPAQEKNFTTAPAICHDGKAHFPREGVFVSNGTHWFVTQRNFYEPQIITTDNTFVSGNCDVVIGIVNNTVYDPLQPELDSFKEELDKYFKNHTSPDVDLGDISGINASVVNIQKEIDRLNEVAKNLNESLIDLQELGKYEQYIKGGGSGGGQIYEGKLTAEGLRFGIVASRFNHALVDRLVEGAIDAIVRHGGREEDITLVRVPGSWEIPVAAGELARKEDIDAVIAIGVLIRGATPHFDYIASEVSKGLADLSLELRKPITFGVITADTLEQAIERAGTKHGNKGWEAALSAIEMANLFKSLR

SEQ ID NO: 4374 - protein, 1371 aa, Artificial Sequence
  SARS-CoV-2/Sweden/01/2020__EPI_ISL_411951 spike protein (1-1211)(F970C_G999C) LumSynth construct
MFVFLVLLPLVSSQCVNLTTRTQLPPAYTNSFTRGVYYPDKVFRSSVLHSTQDLFLPFFSNVTWFHAIHVSGTNGTKRFDNPVLPFNDGVYFASTEKSNIIRGWIFGTTLDSKTQSLLIVNNATNVVIKVCEFQFCNDPFLGVYYHKNNKSWMESEFRVYSSANNCTFEYVSQPFLMDLEGKQGNFKNLREFVFKNIDGYFKIYSKHTPINLVRDLPQGFSALEPLVDLPIGINITRFQTLLALHRSYLTPGDSSSGWTAGAAAYYVGYLQPRTFLLKYNENGTITDAVDCALDPLSETKCTLKSFTVEKGIYQTSNFRVQPTESIVRFPNITNLCPFGEVFNATRFASVYAWNRKRISNCVADYSVLYNSASFSTFKCYGVSPTKLNDLCFTNVYADSFVIRGDEVRQIAPGQTGKIADYNYKLPDDFTGCVIAWNSNNLDSKVGGNYNYLYRLFRKSNLKPFERDISTEIYQAGSTPCNGVEGFNCYFPLQSYGFQPTNGVGYQPYRVVVLSFELLHAPATVCGPKKSTNLVKNKCVNFNFNGLTGTGVLTESNKKFLPFQQFGRDIADTTDAVRDPQTLEILDITPCSFGGVSVITPGTNTSNQVAVLYQDVNCTEVPVAIHADQLTPTWRVYSTGSNVFQTRAGCLIGAEHVNNSYECDIPIGAGICASYQTQTNSPRRARSVASQSIIAYTMSLGAENSVAYSNNSIAIPTNFTISVTTEILPVSMTKTSVDCTMYICGDSTECSNLLLQYGSFCTQLNRALTGIAVEQDKNTQEVFAQVKQIYKTPPIKDCGGFNFSQILPDPSKPSKRSFIEDLLFNKVTLADAGFIKQYGDCLGDIAARDLICAQKFNGLTVLPPLLTDEMIAQYTSALLAGTITSGWTFGAGAALQIPFAMQMAYRFNGIGVTQNVLYENQKLIANQFNSAIGKIQDSLSSTASALGKLQDVVNQNAQALNTLVKQLSSNCGAISSVLNDILSRLDKVEAEVQIDRLITCRLQSLQTYVTQQLIRAAEIRASANLAATKMSECVLGQSKRVDFCGKGYHLMSFPQSAPHGVVFLHVTYVPAQEKNFTTAPAICHDGKAHFPREGVFVSNGTHWFVTQRNFYEPQIITTDNTFVSGNCDVVIGIVNNTVYDPLQPELDSFKEELDKYFKNHTSPDVDLGDISGINASVVNIQKEIDRLNEVAKNLNESLIDLQELGKYEQYIKGGGSGGGQIYEGKLTAEGLRFGIVASRFNHALVDRLVEGAIDAIVRHGGREEDITLVRVPGSWEIPVAAGELARKEDIDAVIAIGVLIRGATPHFDYIASEVSKGLADLSLELRKPITFGVITADTLEQAIERAGTKHGNKGWEAALSAIEMANLFKSLR

SEQ ID NO: 4375 - protein, 1371 aa, Artificial Sequence
  SARS-CoV-2/Tianmen/HBCDC-HB-07/2020__EPI_ISL_412983 spike protein (1-1211)(F970C_G999C) LumSynth construct
MFVFLVLLPLVSSQCVNLTTRTQLPPAYTNSFTRGVYYPDKVFRSSVLHSTQDLFLPFFSNVTWFHAIHVSGTNGTKRFDNPVLPFNDGVYFASTEKSNIIRGWIFGTTLDSKTQSLLIVNNATNVVIKVCEFQFCNDPFLGVYYHKNNKSWMESEFRVYSSANNCTFEYVSQPFLMDLEGKQGNFKNLREFVFKNIDGYFKIYSKHTPINLVRDLPQGFSALEPLVDLPIGINITRFQTLLALHRSYLTPGDSSSGWTAGAAAYYVGYLQPRTFLLKYNENGTITDAVDCALDPLSETKCTLKSFTVEKGIYQTSNFRVQPTESIVRFPNITNLCPFGEVFNATRFASVYAWNRKRISNCVADYSVLYNSASFSTFKCYGVSPTKLNDLCFTNVYADSFVIRGDEVRQIAPGQTGKIADYNYKLPDDFTGCVIAWNSNNLDSKVGGNYNYLYRLFRKSNLKPFERDISTEIYQAGSTPCNGVEGFNCYFPLQSYGFQPTNGVGYQPYRVVVLSFELLHAPATVCGPKKSTNLVKNKCVNFNFNGLTGTGVLTESNKKFLPFQQFGRDIADTTDAVRDPQTLEILDITPCSFGGVSVITPGTNTSNQVAVLYQDLNCTEVPVAIHADQLTPTWRVYSTGSNVFQTRAGCLIGAEHVNNSYECDIPIGAGICASYQTQTNSPRRARSVASQSIIAYTMSLGAENSVAYSNNSIAIPTNFTISVTTEILPVSMTKTSVDCTMYICGDSTECSNLLLQYGSFCTQLNRALTGIAVEQDKNTQEVFAQVKQIYKTPPIKDFGGFNFSQILPDPSKPSKRSFIEDLLFNKVTLADAGFIKQYGDCLGDIAARDLICAQKFNGLTVLPPLLTDEMIAQYTSALLAGTITSGWTFGAGAALQIPFAMQMAYRFNGIGVTQNVLYENQKLIANQFNSAIGKIQDSLSSTASALGKLQDVVNQNAQALNTLVKQLSSNCGAISSVLNDILSRLDKVEAEVQIDRLITCRLQSLQTYVTQQLIRAAEIRASANLAATKMSECVLGQSKRVDFCGKGYHLMSFPQSAPHGVVFLHVTYVPAQEKNFTTAPAICHDGKAHFPREGVFVSNGTHWFVTQRNFYEPQIITTDNTFVSGNCDVVIGIVNNTVYDPLQPELDSFKEELDKYFKNHTSPDVDLGDISGINASVVNIQKEIDRLNEVAKNLNESLIDLQELGKYEQYIKGGGSGGGQIYEGKLTAEGLRFGIVASRFNHALVDRLVEGAIDAIVRHGGREEDITLVRVPGSWEIPVAAGELARKEDIDAVIAIGVLIRGATPHFDYIASEVSKGLADLSLELRKPITFGVITADTLEQAIERAGTKHGNKGWEAALSAIEMANLFKSLR

SEQ ID NO: 4376 - protein, 1371 aa, Artificial Sequence
  SARS-CoV-2/Hong Kong/case42_VM20002493/2020__EPI_ISL_414527 spike protein (1-1211)(F970C_G999C) LumSynth construct
MFVFLVLLPLVSSQCVNLTTRTQLPPAYTNSFTRGVYYPDKVFRSSVLHSTQDLFLPFFSNVTWFHAIHVSGTNGTKRFDNPVLPFNDGVYFASTEKSNIIRGWIFGTTLDSKTQSLLIVNNATNVVIKVCEFQFCNDPFLGVYYHKNNKSWMESEFRVYSSANNCTFEYVSQPFLMDLEGKQGNFKNLREFVFKNIDGYFKIYSKHTPINLVRDLPQGFSALEPLVDLPIGINITRFQTLLALHRSYLTPGDSSSGWTAGAAAYYVGYLQPRTFLLKYNENGTITDAVDCALDPLSETKCTLKSFTVEKGIYQTSNFRVQPTESIVRFPNITNLCPFGEVFNATRFASVYAWNRKRISNCVADYSVLYNSASFSTFKCYGVSPTKLNDLCFTNVYADSFVIRGDEVRQIAPGQTGKIADYNYKLPDDFTGCVIAWNSNNLDSKVGGNYNYLYRLFRKSNLKPFERDISTEIYQAGSTPCNGVEGFNCYFPLQSYGFQPTNGVGYQPYRVVVLSFELLHAPATVCGPKKSTNLVKNKCVNFNFNGLTGTGVLTESNKKFLPFQQFGRDIADTTDAVRDPQTLEILDITPCSFGGVSVITPGTNTSNQVAVLYQDVNCTEVPVAIHADQLTPTWRVYSTGSNVFQTRAGCLIGAEHVNNSYECDIPIGAGICASYQTQTNSPRRARSVASQSIIAYTMSLGAENSVAYSNNSIAIPTNFAISVTTEILPVSMTKTSVDCTMYICGDSTECSNLLLQYGSFCTQLNRALTGIAVEQDKNTQEVFAQVKQIYKTPPIKDFGGFNFSQILPDPSKPSKRSFIEDLLFNKVTLADAGFIKQYGDCLGDIAARDLICAQKFNGLTVLPPLLTDEMIAQYTSALLAGTITSGWTFGAGAALQIPFAMQMAYRFNGIGVTQNVLYENQKLIANQFNSAIGKIQDSLSSTASALGKLQDVVNQNAQALNTLVKQLSSNCGAISSVLNDILSRLDKVEAEVQIDRLITCRLQSLQTYVTQQLIRAAEIRASANLAATKMSECVLGQSKRVDFCGKGYHLMSFPQSAPHGVVFLHVTYVPAQEKNFTTAPAICHDGKAHFPREGVFVSNGTHWFVTQRNFYEPQIITTDNTFVSGNCDVVIGIVNNTVYDPLQPELDSFKEELDKYFKNHTSPDVDLGDISGINASVVNIQKEIDRLNEVAKNLNESLIDLQELGKYEQYIKGGGSGGGQIYEGKLTAEGLRFGIVASRFNHALVDRLVEGAIDAIVRHGGREEDITLVRVPGSWEIPVAAGELARKEDIDAVIAIGVLIRGATPHFDYIASEVSKGLADLSLELRKPITFGVITADTLEQAIERAGTKHGNKGWEAALSAIEMANLFKSLR

SEQ ID NO: 4377 - protein, 1371 aa, Artificial Sequence
  SARS-CoV-2/USA/CruiseA-23/2020__EPI_ISL_414482 spike protein (1-1211)(F970C_G999C) LumSynth construct
MFVFLVLLPLVSSQCVNLTTRTQLPPAYTNSFTRGVYYPDKVFRSSVLHSTQDLFLPFFSNVTWFHAIHVSGTNGTKRFDNPVLPFNDGVYFASTEKSNIIRGWIFGTTLDSKTQSLLIVNNATNVVIKVCEFQFCNDPFLGVYYHKNNKSWMESEFRVYSSANNCTFEYVSQPFLMDLEVKQGNFKNLREFVFKNIDGYFKIYSKHTPINLVRDLPQGFSALEPLVDLPIGINITRFQTLLALHRSYLTPGDSSSGWTAGAAAYYVGYLQPRTFLLKYNENGTITDAVDCALDPLSETKCTLKSFTVEKGIYQTSNFRVQPTESIVRFPNITNLCPFGEVFNATRFASVYAWNRKRISNCVADYSVLYNSASFSTFKCYGVSPTKLNDLCFTNVYADSFVIRGDEVRQIAPGQTGKIADYNYKLPDDFTGCVIAWNSNNLDSKVGGNYNYLYRLFRKSNLKPFERDISTEIYQAGSTPCNGVEGFNCYFPLQSYGFQPTNGVGYQPYRVVVLSFELLHAPATVCGPKKSTNLVKNKCVNFNFNGLTGTGVLTESNKKFLPFQQFGRDIADTTDAVRDPQTLEILDITPCSFGGVSVITPGTNTSNQVAVLYQDVNCTEVPVAIHADQLTPTWRVYSTGSNVFQTRAGCLIGAEHVNNSYECDIPIGAGICASYQTQTNSPRRARSVASQSIIAYTMSLGAENSVAYSNNSIAIPTNFTISVTTEILPVSMTKTSVDCTMYICGDSTECSNLLLQYGSFCTQLNRALTGIAVEQDKNTQEVFAQVKQIYKTPPIKDFGGFNFSQILPDPSKPSKRSFIEDLLFNKVTLADAGFIKQYGDCLGDIAARDLICAQKFNGLTVLPPLLTDEMIAQYTSALLAGTITSGWTFGAGAALQIPFAMQMAYRFNGIGVTQNVLYENQKLIANQFNSAIGKIQDSLSSTASALGKLQDVVNQNAQALNTLVKQLSSNCGAISSVLNDILSRLDKVEAEVQIDRLITCRLQSLQTYVTQQLIRAAEIRASANLAATKMSECVLGQSKRVDFCGKGYHLMSFPQSAPHGVVFLHVTYVPAQEKNFTTAPAICHDGKAHFPREGVFVSNGTHWFVTQRNFYEPQIITTDNTFVSGNCDVVIGIVNNTVYDPLQPELDSFKEELDKYFKNHTSPDVDLGDISGINASVVNIQKEIDRLNEVAKNLNESLIDLQELGKYEQYIKGGGSGGGQIYEGKLTAEGLRFGIVASRFNHALVDRLVEGAIDAIVRHGGREEDITLVRVPGSWEIPVAAGELARKEDIDAVIAIGVLIRGATPHFDYIASEVSKGLADLSLELRKPITFGVITADTLEQAIERAGTKHGNKGWEAALSAIEMANLFKSLR

SEQ ID NO: 4378 - protein, 1371 aa, Artificial Sequence
  SARS-CoV-2/Hong Kong/case85_VM20002868/2020__EPI_ISL_414519 spike protein (1-1211)(F970C_G999C) LumSynth construct
MFVFLVLVPLVSSQCVNLTTRTQLPPAYTNSFTRGVYYPDKVFRSSVLHSTQDLFLPFFSNVTWFHAIHVSGTNGTKRFDNPVLPFNDGVYFASTEKSNIIRGWIFGTTLDSKTQSLLIVNNATNVVIKVCEFQFCNDPFLGVYYHKNNKSWMESEFRVYSSANNCTFEYVSQPFLMDLEGKQGNFKNLREFVFKNIDGYFKIYSKHTPINLVRDLPQGFSALEPLVDLPIGINITRFQTLLALHRSYLTPGDSSSGWTAGAAAYYVGYLQPRTFLLKYNENGTITDAVDCALDPLSETKCTLKSFTVEKGIYQTSNFRVQPTESIVRFPNITNLCPFGEVFNATRFASVYAWNRKRISNCVADYSVLYNSASFSTFKCYGVSPTKLNDLCFTNVYADSFVIRGDEVRQIAPGQTGKIADYNYKLPDDFTGCVIAWNSNNLDSKVGGNYNYLYRLFRKSNLKPFERDISTEIYQAGSTPCNGVEGFNCYFPLQSYGFQPTNGVGYQPYRVVVLSFELLHAPATVCGPKKSTNLVKNKCVNFNFNGLTGTGVLTESNKKFLPFQQFGRDIADTTDAVRDPQTLEILDITPCSFGGVSVITPGTNTSNQVAVLYQDVNCTEVPVAIHADQLTPTWRVYSTGSNVFQTRAGCLIGAEHVNNSYECDIPIGAGICASYQTQTNSPRRARSVASQSIIAYTMSLGAENSVAYSNNSIAIPTNFTISVTTEILPVSMTKTSVDCTMYICGDSTECSNLLLQYGSFCTQLNRALTGIAVEQDKNTQEVFAQVKQIYKTPPIKDFGGFNFSQILPDPSKPSKRSFIEDLLFNKVTLADAGFIKQYGDCLGDIAARDLICAQKFNGLTVLPPLLTDEMIAQYTSALLAGTITSGWTFGAGAALQIPFAMQMAYRFNGIGVTQNVLYENQKLIANQFNSAIGKIQDSLSSTASALGKLQDVVNQNAQALNTLVKQLSSNCGAISSVLNDILSRLDKVEAEVQIDRLITCRLQSLQTYVTQQLIRAAEIRASANLAATKMSECVLGQSKRVDFCGKGYHLMSFPQSAPHGVVFLHVTYVPAQEKNFTTAPAICHDGKAHFPREGVFVSNGTHWFVTQRNFYEPQIITTDNTFVSGNCDVVIGIVNNTVYDPLQPELDSFKEELDKYFKNHTSPDVDLGDISGINASVVNIQKEIDRLNEVAKNLNESLIDLQELGKYEQYIKGGGSGGGQIYEGKLTAEGLRFGIVASRFNHALVDRLVEGAIDAIVRHGGREEDITLVRVPGSWEIPVAAGELARKEDIDAVIAIGVLIRGATPHFDYIASEVSKGLADLSLELRKPITFGVITADTLEQAIERAGTKHGNKGWEAALSAIEMANLFKSLR

SEQ ID NO: 4379 - protein, 1371 aa, Artificial Sequence; identical to SEQ ID NO: 4369
  SARS-CoV-2/England/200990660/2020__EPI_ISL_414523 spike protein (1-1211)(F970C_G999C) LumSynth construct

SEQ ID NO: 4380 - protein, 1371 aa, Artificial Sequence
  SARS-CoV-2/Australia/NSW09/2020__EPI_ISL_413595 spike protein (1-1211)(F970C_G999C) LumSynth construct
MFVFLVLLPLVSSQCVNLTTRTQLPPAYTNSFTRGVYYPDKVFRSSVLHSTQDLFLPFFSNVTWFHAIHVSGTNGTKRFDNPVLPFNDGVYFASTEKSNIIRGWIFGTTLDSKTQSLLIVNNATNVVIKVCEFQFCNDPFLGVYYHKNNKSWMESEFRVYSSANNCTFEYVSQPFLMDLEGKQGNFKNLREFVFKNIDGYFKIYSKHTPINLVRDLPQGFSALEPLVDLPIGINITRFQTLLALHRSYLTPGDSSSGWTAGAAAYYVGYLQPRTFLLKYNENGTITDAVDCALDPLSETKCTLKSFTVEKGIYQTSNFRVQPTESIVRFPNITNLCPFGEVFNATRFASVYAWNRKRISNCVADYSVLYNSASFSTFKCYGVSPTKLNDLCFTNVYADSFVIRGDEVRQIAPGQTGKIADYNYKLPDDFTGCVIAWNSNNLDSKVGGNYNYLYRLFRKSNLKPFERDISTEIYQAGSTPCNGVEGFNCYFPLQSYGFQPTNGVGYQPYRVVVLSFELLHAPATVCGPKKSTNLVKNKCVNFNFNGLTGTGVLTESNKKFLPFQQFGRDIADTTDAVRDPQTLEILDITPCSFGGVSVITPGTNTSNQVAVLYQDVNCTEVPVAIHADQLTPTWRVYSTGSNVFQTRAGCLIGAEHVNNSYECDIPIGAGICASYQTQTNSPRRARSVASQSIIAYTMSLGAENSVAYSNNSIAIPTNFTISVTTEILPVSMTKTSVDCTMYICGDSTECSNLLLQYGSFCTQLNRALTGIAVEQDKNTQEVFAQVKQIYKTPPIKDFGGFNFSQILPDPSKPSKRSFIEDLLFNKVTLADAGFIKQYGDCLGDIAARDLICAQKFNGLTVLPPLLTDEMIAQYTSALLAGTITSGWTFGAGAALQIPFAMQMAYRFNGIGVTQNVLYENQKLIANQFNSAIGKIQDSLSFTASALGKLQDVVNQNAQALNTLVKQLSSNCGAISSVLNDILSRLDKVEAEVQIDRLITCRLQSLQTYVTQQLIRAAEIRASANLAATKMSECVLGQSKRVDFCGKGYHLMSFPQSAPHGVVFLHVTYVPAQEKNFTTAPAICHDGKAHFPREGVFVSNGTHWFVTQRNFYEPQIITTDNTFVSGNCDVVIGIVNNTVYDPLQPELDSFKEELDKYFKNHTSPDVDLGDISGINASVVNIQKEIDRLNEVAKNLNESLIDLQELGKYEQYIKGGGSGGGQIYEGKLTAEGLRFGIVASRFNHALVDRLVEGAIDAIVRHGGREEDITLVRVPGSWEIPVAAGELARKEDIDAVIAIGVLIRGATPHFDYIASEVSKGLADLSLELRKPITFGVITADTLEQAIERAGTKHGNKGWEAALSAIEMANLFKSLR

SEQ ID NO: 4381 - protein, 1371 aa, Artificial Sequence; identical to SEQ ID NO: 4361
  SARS-CoV-2/Australia/NSW10/2020__EPI_ISL_413596 spike protein (1-1211)(F970C_G999C) LumSynth construct

SEQ ID NO: 4382 - protein, 1371 aa, Artificial Sequence
  SARS-CoV-2/Switzerland/1000477797/2020__EPI_ISL_413023 spike protein (1-1211)(F970C_G999C) LumSynth construct
MFVFLVLLPLVSSQCVNLTTRTQLPPAYTNSFTRGVYYPDKVFRSSVLHSTQDLFLPFFSNVTWFHAIHVSGTNGTKRFDNPVLPFNDGVYFASTEKSNIIRGWIFGTTLDSKTQSLLIVNNATNVVIKVCEFQFCNDPFLGVYYHKNNKSWMESEFRVYSSANNCTFEYVSQPFLMDLEGKQGNFKNLREFVFKNIDGYFNIYSKHTPINLVRDLPQGFSALEPLVDLPIGINITRFQTLLALHRSYLTPGDSSSGWTAGAAAYYVGYLQPRTFLLKYNENGTITDAVDCALDPLSETKCTLKSFTVEKGIYQTSNFRVQPTESIVRFPNITNLCPFGEVFNATRFASVYAWNRKRISNCVADYSVLYNSASFSTFKCYGVSPTKLNDLCFTNVYADSFVIRGDEVRQIAPGQTGKIADYNYKLPDDFTGCVIAWNSNNLDSKVGGNYNYLYRLFRKSNLKPFERDISTEIYQAGSTPCNGVEGFNCYFPLQSYGFQPTNGVGYQPYRVVVLSFELLHAPATVCGPKKSTNLVKNKCVNFNFNGLTGTGVLTESNKKFLPFQQFGRDIADTTDAVRDPQTLEILDITPCSFGGVSVITPGTNTSNQVAVLYQGVNCTEVPVAIHADQLTPTWRVYSTGSNVFQTRAGCLIGAEHVNNSYECDIPIGAGICASYQTQTNSPRRARSVASQSIIAYTMSLGAENSVAYSNNSIAIPTNFTISVTTEILPVSMTKTSVDCTMYICGDSTECSNLLLQYGSFCTQLNRALTGIAVEQDKNTQEVFAQVKQIYKTPPIKDFGGFNFSQILPDPSKPSKRSFIEDLLFNKVTLADAGFIKQYGDCLGDIAARDLICAQKFNGLTVLPPLLTDEMIAQYTSALLAGTITSGWTFGAGAALQIPFAMQMAYRFNGIGVTQNVLYENQKLIANQFNSAIGKIQDSLSSTASALGKLQDVVNQNAQALNTLVKQLSSNCGAISSVLNDILSRLDKVEAEVQIDRLITCRLQSLQTYVTQQLIRAAEIRASANLAATKMSECVLGQSKRVDFCGKGYHLMSFPQSAPHGVVFLHVTYVPAQEKNFTTAPAICHDGKAHFPREGVFVSNGTHWFVTQRNFYEPQIITTDNTFVSGNCDVVIGIVNNTVYDPLQPELDSFKEELDKYFKNHTSPDVDLGDISGINASVVNIQKEIDRLNEVAKNLNESLIDLQELGKYEQYIKGGGSGGGQIYEGKLTAEGLRFGIVASRFNHALVDRLVEGAIDAIVRHGGREEDITLVRVPGSWEIPVAAGELARKEDIDAVIAIGVLIRGATPHFDYIASEVSKGLADLSLELRKPITFGVITADTLEQAIERAGTKHGNKGWEAALSAIEMANLFKSLR

SEQ ID NO: 4383 - protein, 1371 aa, Artificial Sequence
  SARS-CoV-2/Belgium/BA-02291/2020__EPI_ISL_415159 spike protein (1-1211)(F970C_G999C) LumSynth construct
MFVFLVLLPLVSSQCVNLTTRTQLPPAYTNSFTRGVYYPDKVFRSSVLHSTQDLFLPFFSNVTWFHAIHVSGTNGTKRFDNPVLPFNDGVYFASTEKSNIIRGWIFGTTLDSKTQSLLIVNNATNVVIKVCEFQFCNDPFLGVYYHKNNKSWMESEFRVYSSANNCTFEYVSQPFLMDLEGKQGNFKNLREFVFKNIDGYFKIYSKHTPINLVRDLPQGFSALEPLVDLPIGINITRFQTLLALHRSYLTPGDSSSGWTAGAAAYYVGYLQPRTFLLKYNENGTITDAVDCALDPLSETKCTLKSFTVEKGIYQTSNFRVQPTESIVRFPNITNLCPFGEVFNATRFASVYAWNRKRISNCVADYSVLYNSASFSTFKCYGVSPTKLNDLCFTNVYADSFVIRGDEVRQIAPGQTGKIADYNYKLPDDFTGCVIAWNSNNLDSKVGGNYNYLYRLFRRSNLKPFERDISTEIYQAGSTPCNGVEGFNCYFPLQSYGFQPTNGVGYQPYRVVVLSFELLPAPATVCGPKKSTNLVKNKCVNFNFNGLTGTGVLTESNKKFLPFQQFGRDIADTTDAVRDPQTLEILDITPCSFGGVSVITPGTNTSNQVAVLYQGVNCTEVPVAIHADQLTPTWRVYSTGSNVFQTRAGCLIGAEHVNNSYECDIPIGAGICASYQTQTNSPRRARSVASQSIIAYTMSLGAENSVAYSNNSIAIPTNFTISVTTEILPVSMTKTSVDCTMYICGDSTECSNLLLQYGSFCTQLNRALTGIAVEQDKNTQEVFAQVKQIYKTPPIKDFGGFNFSQILPDPSKPSKRSFIEDLLFNKVTLADAGFIKQYGDCLGDIAARDLICAQKFNGLTVLPPLLTDEMIAQYTSALLAGTITSGWTFGAGAALQIPFAMQMAYRFNGIGVTQNVLYENQKLIANQFNSAIGKIQDSLSSAAPALGKLQDVVNQNAQALNTLVKQLSSNCGAISSVLNDILSRLDKVEAEVQIDRLITCRLQSLQTYVTQQLIRAAEIRASANLAATKMSECVLGQSKRVDFCGKGYHLMSFPQSAPHGVVFLHVTYVPAQEKNFTTAPAICHDGKAHFPREGVFVSNGTHWFVTQRNFYEPQIITTDNTFVSGNCDVVIGIVNNTVYDPLQPELDSFKEELDKYFKNHTSPDVDLGDISGINASVVNIQKEIDRLNEVAKNLNESLIDLQELGKYEQYIKGGGSGGGQIYEGKLTAEGLRFGIVASRFNHALVDRLVEGAIDAIVRHGGREEDITLVRVPGSWEIPVAAGELARKEDIDAVIAIGVLIRGATPHFDYIASEVSKGLADLSLELRKPITFGVITADTLEQAIERAGTKHGNKGWEAALSAIEMANLFKSLR

SEQ ID NO: 4384 - protein, 1371 aa, Artificial Sequence
  SARS-CoV-2/USA/WA8-UW5/2020__EPI_ISL_413486 spike protein (1-1211)(F970C_G999C) LumSynth construct
MFVFLVLLPLVSSQCVNLTTRTQLPPAYTNSFTRGVYYPDKVFRSSVLHSTQDLFLPFFSNVTWFHAIHVSGTNGTKRFDNPVLPFNDGVYFASTEKSNIIRGWIFGTTLDSKTQSLLIVNNATNVVIKVCEFQFCNDPFLGVYYHKNNKSWMESEFRVYSSANNCTFEYVSQPFLMDLEGKQGNFKNLREFVFKNIDGYFKIYSKHTPINLVRDLPQGFSALEPLVDLPIGINITRFQTLLALHRSYLTPGDSSSGWTAGAAAYYVGYLQPRTFLLKYNENGTITDAVDCALDPLSETKCTLKSFTVEKGIYQTSNFRVQPTESIVRFPNITNLCPFGEVFNATRFASVYAWNRKRISNCVADYSVLYNSASFSTFKCYGVSPTKLNDLCFTNVYADSFVIRGDEVRQIAPGQTGKIADYNYKLPDDFTGCVIAWNSNNLDSKVGGNYNYLYRLFRKSNLKPFERDISTEIYQAGSTPCNGVEGFNCYFPLQSYGFQPTNGVGYQPYRVVVLSFELLHAPATVCGPKKSTNLVKNKCVNFNFNGLTGTGVLTESNKKFLPFQQFGRDIADTTDAVRDPQTLEILDITPCSFGGVSVITPGTNTSNQVAVLYQDVNCTEVPVAIHADQLTPTWRVYSTGSNVFQTRAGCLIGAEYVNNSYECDIPIGAGICASYQTQTNSPRRARSVASQSIIAYTMSLGAENSVAYSNNSIAIPTNFTISVTTEILPVSMTKTSVDCTMYICGDSTECSNLLLQYGSFCTQLNRALTGIAVEQDKNTQEVFAQVKQIYKTPPIKDFGGFNFSQILPDPSKPSKRSFIEDLLFNKVTLADAGFIKQYGDCLGDIAARDLICAQKFNGLTVLPPLLTDEMIAQYTSALLAGTITSGWTFGAGAALQIPFAMQMAYRFNGIGVTQNVLYENQKLIANQFNSAIGKIQDSLSSTASALGKLQDVVNQNAQALNTLVKQLSSNCGAISSVLNDILSRLDKVEAEVQIDRLITCRLQSLQTYVTQQLIRAAEIRASANLAATKMSECVLGQSKRVDFCGKGYHLMSFPQSAPHGVVFLHVTYVPAQEKNFTTAPAICHDGKAHFPREGVFVSNGTHWFVTQRNFYEPQIITTDNTFVSGNCDVVIGIVNNTVYDPLQPELDSFKEELDKYFKNHTSPDVDLGDISGINASVVNIQKEIDRLNEVAKNLNESLIDLQELGKYEQYIKGGGSGGGQIYEGKLTAEGLRFGIVASRFNHALVDRLVEGAIDAIVRHGGREEDITLVRVPGSWEIPVAAGELARKEDIDAVIAIGVLIRGATPHFDYIASEVSKGLADLSLELRKPITFGVITADTLEQAIERAGTKHGNKGWEAALSAIEMANLFKSLR

SEQ ID NO: 4385 - protein, 1371 aa, Artificial Sequence
  SARS-CoV-2/England/20102000506/2020__EPI_ISL_415147 spike protein (1-1211)(F970C_G999C) LumSynth construct
MFVFLVLLPLVSSQCVNLTTRTQLPPAYTNSFTRGVYYPDKVFRSSVLHSTQDLFLPFFSNVTWFHAIHVSGTNGTKRFDNPVLPFNDGVYFASTEKSNIIRGWIFGTTLDSKTQSLLIVNNATNVVIKVCEFQFCNDPFLGVYYHKNNKSWMESEFRVYSSANNCTFEYVSQPFLMDLEGKQGNFKNLREFVFKNIDGYFKIYSKHTPINLVRDLPQGFSALEPLVDLPIGINITRFQTLLALHRSYLTPGDSSSGWTAGAAAYYVGYLQPRTFLLKYNENGTITDAVDCALDPLSETKCTLKSFTVEKGIYQTSNFRVQPTESIVRFPNITNLCPFGEVFNATRFASVYAWNRKRISNCVADYSVLYNSASFSTFKCYGVSPTKLNDLCFTNVYADSFVIRGDEVRQIAPGQTGKIADYNYKLPDDFTGCVIAWNSNNLDSKVGGNYNYLYRLFRKSNLKPFERDISTEIYQAGSTPCNGVEGFNCYFPLQSYGFQPTNGVGYQPYRVVVLSFELLHAPATVCGPKKSTNLVKNKCVNFNFNGLTGTGVLTESNKKFLPFQQFGRDIADTTDAVRDPQTLEILDITPCSFGGVSVITPGTNTSNQVAVLYQGVNCTEVPVAIHADQLTPTWRVYSTGSNVFQTRAGCLIGAEHVNNSYECDIPIGAGICASYQTQTNSPRRARSVASQSIIAYTMSLGAENSVAYSNNSIAIPTNFTISVTTEILPVSMTKTSVDCTMYICGDSTECSNLLLQYGSFCTQLNRALTGIAVEQDKNTQEVFAQVKQIYKTPPIKDFGGFNFSQILPDPSKPSKRSFIEDLLFNKVTLADAGFIKQYGYCLGDIAARDLICAQKFNGLTVLPPLLTDEMIAQYTSALLAGTITSGWTFGAGAALQIPFAMQMAYRFNGIGVTQNVLYENQKLIANQFNSAIGKIQDSLSSTASALGKLQDVVNQNAQALNTLVKQLSSNCGAISSVLNDILSRLDKVEAEVQIDRLITCRLQSLQTYVTQQLIRAAEIRASANLAATKMSECVLGQSKRVDFCGKGYHLMSFPQSAPHGVVFLHVTYVPAQEKNFTTAPAICHDGKAHFPREGVFVSNGTHWFVTQRNFYEPQIITTDNTFVSGNCDVVIGIVNNTVYDPLQPELDSFKEELDKYFKNHTSPDVDLGDISGINASVVNIQKEIDRLNEVAKNLNESLIDLQELGKYEQYIKGGGSGGGQIYEGKLTAEGLRFGIVASRFNHALVDRLVEGAIDAIVRHGGREEDITLVRVPGSWEIPVAAGELARKEDIDAVIAIGVLIRGATPHFDYIASEVSKGLADLSLELRKPITFGVITADTLEQAIERAGTKHGNKGWEAALSAIEMANLFKSLR

SEQ ID NO: 4386 - protein, 1371 aa, Artificial Sequence
  SARS-CoV-2/Belgium/VAG-03013/2020__EPI_ISL_415155 spike protein (1-1211)(F970C_G999C) LumSynth construct
MFVFLVLLPLVSSQCVNLTTRTQLPPAYTNSFTRGVYYPDKVFRSSVLHSTQDLFLPFFSNVTWFHAIHVSGTNGTKRFDNPVLPFNDGVYFASTEKSNIIRGWIFGTTLDSKTQSLLIVNNATNVVIKVCEFQFCNDPFLGVYYHKNNKSWMESEFRVYSSANNCTFEYVSQPFLMDLEGKQGNFKNLREFVFKNIDGYFKIYSKHTPINLVRDLPQGFSALEPLVDLPIGINITRFQTLLALHRSYLTPGDSSSGWTAGAAAYYVGYLQPRTFLLKYNENGTITDAVDCALDPLSETKCTLKSFTVEKGIYQTSNFRVQPTESIVRFPNITNLCPFGEVFNATRFASVYAWNRKRISNCVADYSVLYNSASFSTFKCYGVSPTKLNDLCFTNVYADSFVIRGDEVRQIAPGQTGKIADYNYKLPDDFTGCVIAWNSNNLDSKVGGNYNYLYRLFRKSNLKPFERDISTEIYQAGSTPCNGVEGFNCYFPLQSYGFQPTNGVGYQPYRVVVLSFELLHAPATVCGPKKSTNLVKNKCVNFNFNGLTGTGVLTESNKKFLPFQQFGRDIADTTDAVRDPQTLEILDITPCSFGGVSVITPGTNTSNQVAVLYQGVNCTEVPVAIHADQLTPTWRVYSTGSNVFQTRAGCLIGAEHVNNSYECDIPIGAGICASYQTQTNSPRRARSVASQSIIAYTMSLGAENSVAYSNNSIAIPTNFTISVTTEILPVSMTKTSVDCTMYICGDSTECSNLLLQYGSFCTQLNRALTGIAVEQDKNTQEVFAQVKQIYKTPPIKDFGGFNFSQILPDPSKPSKRSFIEDLLFNKVTLADAGFIKQYGDCLGDIAARDLICAQKFNGLTVLPPLLTDEMIAQYTSALLAGTITSGWTFGAGAALQIPFAMQMAYRFNGIGVTQNVLYENQKLIANQFNSAIGKIQDSLSSTATALGKLQDVVNQNAQALNTLVKQLSSNCGAISSVLNDILSRLDKVEAEVQIDRLITCRLQSLQTYVTQQLIRAAEIRASANLAATKMSECVLGQSKRVDFCGKGYHLMSFPQSAPHGVVFLHVTYVPAQEKNFTTAPAICHDGKAHFPREGVFVSNGTHWFVTQRNFYEPQIITTDNTFVSGNCDVVIGIVNNTVYDPLQPELDSFKEELDKYFKNHTSPDVDLGDISGINASVVNIQKEIDRLNEVAKNLNESLIDLQELGKYEQYIKGGGSGGGQIYEGKLTAEGLRFGIVASRFNHALVDRLVEGAIDAIVRHGGREEDITLVRVPGSWEIPVAAGELARKEDIDAVIAIGVLIRGATPHFDYIASEVSKGLADLSLELRKPITFGVITADTLEQAIERAGTKHGNKGWEAALSAIEMANLFKSLR

SEQ ID NO: 4387 - protein, 1371 aa, Artificial Sequence
  SARS-CoV-2/Belgium/BC-03016/2020__EPI_ISL_415157 spike protein (1-1211)(F970C_G999C) LumSynth construct
MFVFLVLLPLVSSQCVNLTTRTQLPPAYTNSFTRGVYYPDKVFRSSVLHSTQDLFLPFFSNVTWFHAIHVSGTNGTKRFDNPVLPFNDGVYFASTEKSNIIRGWIFGTTLDSKTQSLLIVNNATNVVIKVCEFQFCNDPFLGVYYHKNNKSWMESEFRVYSSANNCTFEYVSQPFLMDLEGKQGNFKNLREFVFKNIDGYFKIYSKHTPINLVRDLPQGFSALEPLVDLPIGINITRFQTLLALHRSYLTPGDSSSGWTAGAAAYYVGYLQPRTFLLKYNENGTITDAVDCALDPLSETKCTLKSFTVEKGIYQTSNFRVQPTESIVRFPNITNLCPFGEVFNATRFASVYAWNRKRISNCVADYSVLYNSASFSTFKCYGVSPTKLNDLCFTNVYADSFVIRGDEVRQIAPGQTGKIADYNYKLPDDFTGCVIAWNSNNLDSKVGGNYNYLYRLFRKSNLKPFERDISTEIYQAGSTPCNGVEGFNCYFPLQSYGFQPTNGVGYQPYRVVVLSFELLHAPATVCGPKKSTNLVKNKCVNFNFNGLTGTGVLTESNKKFLPFQQFGRDIADTTDAVRDPQTLEILDITPCSFGGVSVITPGTNTSNQVAVLYQGVNCTEVPVAIHADQLTPTWRVYSTGSNVFQTRAGCLIGAEHVNNSYECDIPIGAGICASYQTQTNSPRRARSVASQSIIAYTMSLGAENSVAYSNNSIAIPTNFTISVTTEILPVSMTKTSVDCTMYICGDSTECSNLLLQYGSFCTQLNRALTGIAVEQDKNTQEVFAQVKQIYKTPPIKDFGGFNFSQILPDPSKPSKRSFIEDLLFNKVTLADAGFIKQYGDCLGDIAARDLICAQKFNGLTVLPPLLTDEMIAQYTSALLAGTITSGWTFGAGAALQIPFAMQMAYRFNGIGVTQNVLYENQKLIANQFNSAIGKIQDSLSSTAPALGKLQDVVNQNAQALNTLVKQLSSNCGAISSVLNDILSRLDKVEAEVQIDRLITCRLQSLQTYVTQQLIRAAEIRASANLAATKMSECVLGQSKRVDFCGKGYHLMSFPQSAPHGVVFLHVTYVPAQEKNFTTAPAICHDGKAHFPREGVFVSNGTHWFVTQRNFYEPQIITTDNTFVSGNCDVVIGIVNNTVYDPLQPELDSFKEELDKYFKNHTSPDVDLGDISGINASVVNIQKEIDRLNEVAKNLNESLIDLQELGKYEQYIKGGGSGGGQIYEGKLTAEGLRFGIVASRFNHALVDRLVEGAIDAIVRHGGREEDITLVRVPGSWEIPVAAGELARKEDIDAVIAIGVLIRGATPHFDYIASEVSKGLADLSLELRKPITFGVITADTLEQAIERAGTKHGNKGWEAALSAIEMANLFKSLR

SEQ ID NO: 4388 - protein, 1371 aa, Artificial Sequence
  SARS-CoV-2/Germany/BavPat3/2020__EPI_ISL_414521 spike protein (1-1211)(F970C_G999C) LumSynth construct
MFVFLVLLPLVSSQCVNLTTRTQLPPAYTNSFTRGVYYPDKVFRSSVLHSTQDLFLPFFSNVTWFHAIHVSGTNGTKRFDNPVLPFNDGVYFASTEKSNIIRGWIFGTTLDSKTQSLLIVNNATNVVIKVCEFQFCNDPFLGVYYHKNNKSWMESEFRVYSSANNCTFEYVSQPFLMDLEGKQGNFKNLREFVFKNIDGYFKIYSKHTPINLVRDLPQGFSALEPLVDLPIGINITRFQTLLALHRSYLTPGDSSSGWTAGAAAYYVGYLQPRTFLLKYNENGTITDAVDCALDPLSETKCTLKSFTVEKGIYQTSNFRVQPTESIVRFPNITNLCPFGEVFNATRFASVYAWNRKRISNCVADYSVLYNSASFSTFKCYGVSPTKLNDLCFTNVYADSFVIRGDEVRQIAPGQTGKIADYNYKLPDDFTGCVIAWNSNNLDSKVGGNYNYLYRLFRKSNLKPFERDISTEIYQAGSTPCNGVEGFNCYFPLQSYGFQPTNGVGYQPYRVVVLSFELLHAPATVCGPKKSTNLVKNKCVNFNFNGLTGTGVLTESNKKFLPFQQFGRDIADTTDAVRDPQTLEILDITPCSFGGVSVITPGTNTSNQVAVLYQDVNCTEVPVAIHADQLTPTWRVYSTGSNVFQTRAGCLIGAEHVNNSYECDIPIGAGICASYQTQTNSPRRARSVASQSIIAYTMSLGAENSVAYSNNSIAIPTNFTISVTTEILPVSMTKTSVDCTMYICGDSTECSNLLLQYGSFCTQLNRALTGIAVEQDKNTQQVFAQVKQIYKTPPIKDFGGFNFSQILPDPSKPSKRSFIEDLLFNKVTLADAGFIKQYGDCLGDIAARDLICAQKFNGLTVLPPLLTDEMIAQYTSALLAGTITSGWTFGAGAALQIPFAMQMAYRFNGIGVTQNVLYENQKLIANQFNSAIGKIQDSLSSTASALGKLQDVVNQNAQALNTLVKQLSSNCGAISSVLNDILSRLDKVEAEVQIDRLITCRLQSLQTYVTQQLIRAAEIRASANLAATKMSECVLGQSKRVDFCGKGYHLMSFPQSAPHGVVFLHVTYVPAQEKNFTTAPAICHDGKAHFPREGVFVSNGTHWFVTQRNFYEPQIITTDNTFVSGNCDVVIGIVNNTVYDPLQPELDSFKEELDKYFKNHTSPDVDLGDISGINASVVNIQKEIDRLNEVAKNLNESLIDLQELGKYEQYIKGGGSGGGQIYEGKLTAEGLRFGIVASRFNHALVDRLVEGAIDAIVRHGGREEDITLVRVPGSWEIPVAAGELARKEDIDAVIAIGVLIRGATPHFDYIASEVSKGLADLSLELRKPITFGVITADTLEQAIERAGTKHGNKGWEAALSAIEMANLFKSLR

SEQ ID NO: 4389 - protein, 1371 aa, Artificial Sequence
  SARS-CoV-2/France/HF1805/2020__EPI_ISL_414628 spike protein (1-1211)(F970C_G999C) LumSynth construct
MFVFLVLLPLVSSQCVNLTTRTQLPPAYTNSFTRGVYYPDKVFRSSVLHSTQDLFLPFFSNVTWFHAIHVSGTNGTKRFDNPVLPFNDGVYFASTEKSNIIRGWIFGTTLDSKTQSLLIVNNATNVVIKVCEFQFCNDPFLGVYYHKNNKSWMESEFRVYSSANNCTFEYVSQPFLMDLEGKQGNFKNLREFVFKNIDGYFKIYSKHTPINLVRDLPQGFSALEPLVDLPIGINITRFQTLLALHRSYLTPGDSSSGWTAGAAAYYVGYLQPRTFLLKYNENGTITDAVDCALDPLSETKCTLKSFTVEKGIYQTSNFRVQPTESIVRFPNITNLCPFGEVFNATRFASVYAWNRKRISNCVADYSVLYNSASFSTFKCYGVSPTKLNDLCFTNVYADSFVIRGDEVRQIAPGQTGKIADYNYKLPDDFTGCVIAWNSNNLDSKVGGNYNYLYRLFRKSNLKPFERDISTEIYQAGSTPCNGVEGFNCYFPLQSYGFQPTNGVGYQPYRVVVLSFELLHAPATVCGPKKSTNLVKNKCVNFNFNGLTGTGVLTESNKKFLPFQQFGRDIADTTDAVRDPQTLEILDITPCSFGGVSVITPGTNTSNQVAVLYQGVNCTEVPVAIHADQLTPTWRVYSTGSNVFQTRAGCLIGAEHVNNSYECDIPIGAGICASYQTQTNSPRRARSVASQSIIAYTMSLGAENSVAYSNNSIAIPTNFTISVTTEILPVSMTKTSVDCTMYICGDSTECSNLLLQYGSFCTQLNRALTGIAVEQDKNTQEVFAQVKQIYKTPPIKDFGGFNFSQILPDPSKPSKRSFIEDLLFNKVTLADAGFIKQYGDCLGDIAARDLICAQKFNGLTVLPPLLTDEMIAQYTSALLAGTITSGWTFGAGAALQIPFAMQMAYRFNGIGVTQNVLYENQKLIANQFNSAIGKIQDSLSSTASALGKLQDVVNQNAQALNTLVKQLSSNCGAISSVLNDILSRLDKVEAEVQIDRLITCRLQSLQTYVTQQLIRAAEIRASANLAATKMSECVLGQSKRVDFCGKGYHLMSFPQSAPHGVVFLHVTYVPAQEKNFTTAPAICHDGKAHFPREGVFVSNGTHWFVTQRNFYEPQIITTDNTFVSGNCDVVIGVVNNTVYDPLQPELDSFKEELDKYFKNHTSPDVDLGDISGINASVVNIQKEIDRLNEVAKNLNESLIDLQELGKYEQYIKGGGSGGGQIYEGKLTAEGLRFGIVASRFNHALVDRLVEGAIDAIVRHGGREEDITLVRVPGSWEIPVAAGELARKEDIDAVIAIGVLIRGATPHFDYIASEVSKGLADLSLELRKPITFGVITADTLEQAIERAGTKHGNKGWEAALSAIEMANLFKSLR

SEQ ID NO: 4390 - protein, 1371 aa, Artificial Sequence
  SARS-CoV-2/Netherlands/ZuidHolland_9/2020__EPI_ISL_414445 spike protein (1-1211)(F970C_G999C) LumSynth construct
MFVFLVLLPLVSSQCVNLTTRTQLPPAYTNSFTRGVYYPDKVFRSSVLHSTQDLFLPFFSNVTWFHAIHVSGTNGTKRFDNPVLPFNDGVYFASTEKSNIIRGWIFGTTLDSKTQSLLIVNNATNVVIKVCEFQFCNDPFLGVYYHKNNKSWMESEFRVYSSANNCTFEYVSQPFLMDLEGKQGNFKNLREFVFKNIDGYFKIYSKHTPINLVRDLPQGFSALEPLVDLPIGINITRFQTLLALHRSYLTPGDSSSGWTAGAAAYYVGYLQPRTFLLKYNENGTITDAVDCALDPLSETKCTLKSFTVEKGIYQTSNFRVQPTESIVRFPNITNLCPFGEVFNATRFASVYAWNRKRISNCVADYSVLYNSASFSTFKCYGVSPTKLNDLCFTNVYADSFVIRGDEVRQIAPGQTGKIADYNYKLPDDFTGCVIAWNSNNLDSKVGGNYNYLYRLFRKSNLKPFERDISTEIYQAGSTPCNGVEGFNCYFPLQSYGFQPTNGVGYQPYRVVVLSFELLHAPATVCGPKKSTNLVKNKCVNFNFNGLTGTGVLTESNKKFLPFQQFGRDIADTTDAVRDPQTLEILDITPCSFGGVSVITPGTNTSNQVAVLYQGVNCTEVPVAIHADQLTPTWRVYSTGSNVFQTRAGCLIGAEHVNNSYECDIPIGAGICASYQTQTNSPRRARSVASQSIIAYTMSLGAENSVAYSNNSIAIPTNFTISVTTEILPVSMTKTSVDCTMYICGDSTECSNLLLQYGSFCTQLNRALTGIAVEQDKNTQEVFAQVKQIYKTPPIKDFGGFNFSQILPDPSKPSKRSFIEDLLFNKVTLADAGFIKQYGDCLGDIAARDLICVQKFNGLTVLPPLLTDEMIAQYTSALLAGTITSGWTFGAGAALQIPFAMQMAYRFNGIGVTQNVLYENQKLIANQFNSAIGKIQDSLSSTASALGKLQDVVNQNAQALNTLVKQLSSNCGAISSVLNDILSRLDKVEAEVQIDRLITCRLQSLQTYVTQQLIRAAEIRASANLAATKMSECVLGQSKRVDFCGKGYHLMSFPQSAPHGVVFLHVTYVPAQEKNFTTAPAICHDGKAHFPREGVFVSNGTHWFVTQRNFYEPQIITTDNTFVSGNCDVVIGIVNNTVYDPLQPELDSFKEELDKYFKNHTSPDVDLGDISGINASVVNIQKEIDRLNEVAKNLNESLIDLQELGKYEQYIKGGGSGGGQIYEGKLTAEGLRFGIVASRFNHALVDRLVEGAIDAIVRHGGREEDITLVRVPGSWEIPVAAGELARKEDIDAVIAIGVLIRGATPHFDYIASEVSKGLADLSLELRKPITFGVITADTLEQAIERAGTKHGNKGWEAALSAIEMANLFKSLR

SEQ ID NO: 4391 - protein, 1371 aa, Artificial Sequence
  SARS-CoV-2/Finland/FIN03032020A/2020__EPI_ISL_413602 spike protein (1-1211)(F970C_G999C) LumSynth construct
MFVFLVLLPLVSSQCVNLTTRTQLPPAYTNSFTRGVYYPDKVFRSSVLHSTQDLFLPFFSNVTWFHAIHVSGTNGTKRFDNPVLPFNDGVYFASTEKSNIIRGWIFGTTLDSKTQSLLIVNNATNVVIKVCEFQFCNDPFLGVYYHKNNKSWMESEFRVYSSANNCTFEYVSQPFLMDLEGKQGNFKNLREFVFKNIDGYFKIYSKHTPINLVRDLPQGFSALEPLVDLPIGINITRFQTLLALHRSYLTPGDSSSGWTAGAAAYYVGYLQPRTFLLKYNENGTITDAVDCALDPLSETKCTLKSFTVEKGIYQTSNFRVQPTESIVRFPNITNLCPFGEVFNATRFASVYAWNRKRISNCVADYSVLYNSASFSTFKCYGVSPTKLNDLCFTNVYADSFVIRGDEVRQIAPGQTGKIADYNYKLPDDFTGCVISWNSNNLDSKVGGNYNYLYRLFRKSNLKPFERDISTEIYQAGSTPCNGVEGFNCYFPLQSYGFQPTNGVGYQPYRVVVLSFELLHAPATVCGPKKSTNLVKNKCVNFNFNGLTGTGVLTESNKKFLPFQQFGRDIADTTDAVRDPQTLEILDITPCSFGGVSVITPGTNTSNQVAVLYQGVNCTEVPVAIHADQLTPTWRVYSTGSNVFQTRAGCLIGAEHVNNSYECDIPIGAGICASYQTQTNSPRRARSVASQSIIAYTMSLGAENSVAYSNNSIAIPTNFTISVTTEILPVSMTKTSVDCTMYICGDSTECSNLLLQYGSFCTQLNRALTGIAVEQDKNTQEVFAQVKQIYKTPPIKDFGGFNFSQILPDPSKPSKRSFIEDLLFNKVTLADAGFIKQYGDCLGDIAARDLICAQKFNGLTVLPPLLTDEMIAQYTSALLAGTITSGWTFGAGAALQIPFAMQMAYRFNGIGVTQNVLYENQKLIANQFNSAIGKIQDSLSSTASALGKLQDVVNQNAQALNTLVKQLSSNCGAISSVLNDILSRLDKVEAEVQIDRLITCRLQSLQTYVTQQLIRAAEIRASANLAATKMSECVLGQSKRVDFCGKGYHLMSFPQSAPHGVVFLHVTYVPAQEKNFTTAPAICHDGKAHFPREGVFVSNGTHWFVTQRNFYEPQIITTDNTFVSGNCDVVIGIVNNTVYDPLQPELDSFKEELDKYFKNHTSPDVDLGDISGINASVVNIQKEIDRLNEVAKNLNESLIDLQELGKYEQYIKGGGSGGGQIYEGKLTAEGLRFGIVASRFNHALVDRLVEGAIDAIVRHGGREEDITLVRVPGSWEIPVAAGELARKEDIDAVIAIGVLIRGATPHFDYIASEVSKGLADLSLELRKPITFGVITADTLEQAIERAGTKHGNKGWEAALSAIEMANLFKSLR

SEQ ID NO: 4392 - protein, 1371 aa, Artificial Sequence
  SARS-CoV-2/France/GE1977/2020__EPI_ISL_414632 spike protein (1-1211)(F970C_G999C) LumSynth construct
MFVFLVLLPLVSSQCVNLTTRTQLPPAYTNSFTRGVYYPDKVFRSSVLHSTQDLFLPFFSNVTWFHAIHVSGTNGTKRFDNPVLPFNDGVYFASTEKSNIIRGWIFGTTLDSKTQSLLIVNNATNVVIKVCEFQFCNDPFLGVYYHKNNKSWMESEFRVYSSANNCTFEYVSQPFLMDLEGKQGNFKNLREFVFKNIDGYFKIYSKHTPINLVRDLPQGFSALEPLVDLPIGINITRFQTLLALHRSYLTPGDSSSGWTAGAAAYYVGYLQPRTFLLKYNENGTITDAVDCALDPLSETKCTLKSFTVEKGIYQTSNFRVQPTESIVRFPNITNLCPFGEVFNATRFASVYAWNRKRISNCVADYSVLYNSASFSTFKCYGVSPTKLNDLCFTNVYADSFVIRGDEVRQIAPGQTGKIADYNYKLPDDFTGCVIAWNSNNLDSKVGGNYNYLYRLFRKSNLKPFERDISTEIYQAGSTPCNGVEGFNCYFPLQSYGFQPTNGVGYQPYRVVVLSFELLHAPATVCGPKKSTNLVKNKCVNFNFNGLTGTGVLTESNKKFLPFQQFGRDIADTTDAVRDPQTLEILDITPCSFGGVSVITPGTNTSNQVAVLYQGVNCTEVPVAIHADQLTPTWRVYSTGSNVFQTRAGCLIGAEHVNNSYECDIPIGAGICASYQTQTNSPRRARSVASQSIIAYTMSLGAENSVAYSNNSIAIPTNFTISVTTEILPVSMTKTSVDCTMYICGDSTECSNLLLQYGSFCTQLNRALTGIAVEQDKNTQEVFAQVKQIYKTPPIKDFGGFNFSQILPDPSKPSKRSFIEDLLFNKVTLADAGFIKQYGDCLGDIAARDLICAQKFNGLTVLPPLLTDEMIAQYTSALLAGTITSGWTFGAGAALQIPFAMQMAYRFNGIGVTQNVLYENQKLIANQFNSAIGKIQDSLFSTASALGKLQDVVNQNAQALNTLVKQLSSNCGAISSVLNDILSRLDKVEAEVQIDRLITCRLQSLQTYVTQQLIRAAEIRASANLAATKMSECVLGQSKRVDFCGKGYHLMSFPQSAPHGVVFLHVTYVPAQEKNFTTAPAICHDGKAHFPREGVFVSNGTHWFVTQRNFYEPQIITTDNTFVSGNCDVVIGIVNNTVYDPLQPELDSFKEELDKYFKNHTSPDVDLGDISGINASVVNIQKEIDRLNEVAKNLNESLIDLQELGKYEQYIKGGGSGGGQIYEGKLTAEGLRFGIVASRFNHALVDRLVEGAIDAIVRHGGREEDITLVRVPGSWEIPVAAGELARKEDIDAVIAIGVLIRGATPHFDYIASEVSKGLADLSLELRKPITFGVITADTLEQAIERAGTKHGNKGWEAALSAIEMANLFKSLR

SEQ ID NO: 4393 - protein, 1371 aa, Artificial Sequence
  SARS-CoV-2/Finland/FIN-313/2020__EPI_ISL_414641 spike protein (1-1211)(F970C_G999C) LumSynth construct
MFVFLVLLPLVSSQCVNLTTRTQLPPAYTNSFTRGVYYPDKVFRSSVLHSTQDLFLPFFSNVTWFHAIHVSGTNGTKRFDNPVLPFNDGVYFASTEKSNIIRGWIFGTTLDSKTQSLLIVNNATNVVIKVCEFQFCNDPFLGVYYHKNNKSWMESEFRVYSSANNCTFEYVSQPFLMDLEGKQGNFKNLREFVFKNIDGYFKIYSKHTPINLVRDLPQGFSALEPLVDLPIGINITRFKTLLALHRSYLTPGDSSSGWTAGAAAYYVGYLQPRTFLLKYNENGTITDAVDCALDPLSETKCTLKSFTVEKGIYQTSNFRVQPTESIVRFPNITNLCPFGEVFNATRFASVYAWNRKRISNCVADYSVLYNSASFSTFKCYGVSPTKLNDLCFTNVYADSFVIRGDEVRQIAPGQTGKIADYNYKLPDDFTGCVIAWNSNNLDSKVGGNYNYLYRLFRKSNLKPFERDISTEIYQAGSTPCNGVEGFNCYFPLQSYGFQPTNGVGYQPYRVVVLSFELLHAPATVCGPKKSTNLVKNKCVNFNFNGLTGTGVLTESNKKFLPFQQFGRDIADTTDAVRDPQTLEILDITPCSFGGVSVITPGTNTSNQVAVLYQGVNCTEVPVAIHADQLTPTWRVYSTGSNVFQTRAGCLIGAEHVNNSYECDIPIGAGICASYQTQTNSPRRARSVASQSIIAYTMSLGAENSVAYSNNSIAIPTNFTISVTTEILPVSMTKTSVDCTMYICGDSTECSNLLLQYGSFCTQLNRALTGIAVEQDKNTQEVFAQVKQIYKTPPIKDFGGFNFSQILPDPSKPSKRSFIEDLLFNKVTLADAGFIKQYGDCLGDIAARDLICAQKFNGLTVLPPLLTDEMIAQYTSALLAGTITSGWTFGAGAALQIPFAMQMAYRFNGIGVTQNVLYENQKLIANQFNSAIGKIQDSLSSTASALGKLQDVVNQNAQALNTLVKQLSSNCGAISSVLNDILSRLDKVEAEVQIDRLITCRLQSLQTYVTQQLIRAAEIRASANLAATKMSECVLGQSKRVDFCGKGYHLMSFPQSAPHGVVFLHVTYVPAQEKNFTTAPAICHDGKAHFPREGVFVSNGTHWFVTQRNFYEPQIITTDNTFVSGNCDVVIGIVNNTVYDPLQPELDSFKEELDKYFKNHTSPDVDLGDISGINASVVNIQKEIDRLNEVAKNLNESLIDLQELGKYEQYIKGGGSGGGQIYEGKLTAEGLRFGIVASRFNHALVDRLVEGAIDAIVRHGGREEDITLVRVPGSWEIPVAAGELARKEDIDAVIAIGVLIRGATPHFDYIASEVSKGLADLSLELRKPITFGVITADTLEQAIERAGTKHGNKGWEAALSAIEMANLFKSLR

SEQ ID NO: 4394 - protein, 1371 aa, Artificial Sequence
  SARS-CoV-2/Netherlands/ZuidHolland_2/2020__EPI_ISL_414556 spike protein (1-1211)(F970C_G999C) LumSynth construct
MFVFLVLLPLVSSQCVNLTTRTQLPPAYTNSFTRGVYYPDKVFRSSVLHSTQDLFLPFFSNVTWFHAIHVSGTNGTKRFDNPVLPFNDGVYFASTEKSNIIRGWIFGTTLDSKTQSLLIVNNATNVVIKVCEFQFCNDPFLGVYYHKNNKSWMESEFRVYSSANNCTFEYVSQPFLMDLEGKQGNFKNLREFVFKNIDGYFKIYSKHTPINLVRDLPQGFSALEPLVDLPIGINITRFQTLLALHRSYLTPGDSSSGWTAGAAAYYVGYLQPRTFLLKYNENGTITDAVDCALDPLSETKCTLKSFTVEKGIYQTSNFRVQPTESIVRFPNITNLCPFGEVFNATRFASVYAWNRKRISNCVADYSVLYNSASFSTFKCYGVSPTKLNDLCFTNVYADSFVIRGDEVRQIAPGQTGKIADYNYKLPDDFTGCVIAWNSNNLDSKVGGNYNYLYRLFRKSNLKPFERDISTEIYQAGSTPCNGVEGFNCYFPLQSYGFQPTNGVGYQPYRVVVLSFELLHAPATVCGPKKSTNLVKNKCVNFNFNGLTGTGVLTESNKKFLPFQQFGRDIADTTDAVRDPQTLEILDITPCSFGGVSVITPGTNTSNQVAVLYQGVNCTEVPVAIHADQLTPTWRVYSTGSNVFQTRAGCLIGAEHVNNSYECDIPIGAGICASYQTQTNSPRRARSVASQSIIAYTMSLGAENSVAYSNNSIAIPTNFTISVTTEILPVSMTKTSVDCTMYICGDSTECSNLLLQYGSFCTQLNRALTGIALEQDKNTQEVFAQVKQIYKTPPIKDFGGFNFSQILPDPSKPSKRSFIEDLLFNKVTLADAGFIKQYGDCLGDIAARDLICAQKFNGLTVLPPLLTDEMIAQYTSALLAGTITSGWTFGAGAALQIPFAMQMAYRFNGIGVTQNVLYENQKLIANQFNSAIGKIQDSLSSTASALGKLQDVVNQNAQALNTLVKQLSSNCGAISSVLNDILSRLDKVEAEVQIDRLITCRLQSLQTYVTQQLIRAAEIRASANLAATKMSECVLGQSKRVDFCGKGYHLMSFPQSAPHGVVFLHVTYVPAQEKNFTTAPAICHDGKAHFPREGVFVSNGTHWFVTQRNFYEPQIITTDNTFVSGNCDVVIGIVNNTVYDPLQPELDSFKEELDKYFKNHTSPDVDLGDISGINASVVNIQKEIDRLNEVAKNLNESLIDLQELGKYEQYIKGGGSGGGQIYEGKLTAEGLRFGIVASRFNHALVDRLVEGAIDAIVRHGGREEDITLVRVPGSWEIPVAAGELARKEDIDAVIAIGVLIRGATPHFDYIASEVSKGLADLSLELRKPITFGVITADTLEQAIERAGTKHGNKGWEAALSAIEMANLFKSLR

SEQ ID NO: 4395 - protein, 1371 aa, Artificial Sequence
  SARS-CoV-2/USA/WA-UW31/2020__EPI_ISL_414618 spike protein (1-1211)(F970C_G999C) LumSynth construct
MFVFLVLLPLVSSQCVNLTTRTQLPPAYTNSFTRGVYYPDKVFRSSVLHSTQDLFLPFFSNVTWFHAIHVSGTNGTKRFDNPVLPFNDGVYFASTEKSNIIRGWIFGTTLDSKTQSLLIVNNATNVVIKVCEFQFCNDPFLGVYYHKNNKSWMESEFRVYSSANNCTFEYVSQPFLMDLEGKQGNFKNLREFVFKNIDGYFKIYSKHTPINLVRDLPQGFSALEPLVDLPIGINITRFQTLLALHRSYLTPGDSSSGWTAGAAAYYVGYLQPRTFLLKYNENGTITDAVDCALDPLSETKCTLKSFTVEKGIYQTSNFRVQPTESIVRFPNITNLCPFGEVFNATRFASVYAWNRKRISNCVADYSVLYNSASFSTFKCYGVSPTKLNDLCFTNVYADSFVIRGDEVRQIAPGQTGKIADYNYKLPDDFTGCVIAWNSNNLDSKVGGNYNYLYRLFRKSNLKPFERDISTEIYQAGSTPCNGAEGFNCYFPLQSYGFQPTNGVGYQPYRVVVLSFELLHAPATVCGPKKSTNLVKNKCVNFNFNGLTGTGVLTESNKKFLPFQQFGRDIADTTDAVRDPQTLEILDITPCSFGGVSVITPGTNTSNQVAVLYQDVNCTEVPVAIHADQLTPTWRVYSTGSNVFQTRAGCLIGAEHVNNSYECDIPIGAGICASYQTQTNSPRRARSVASQSIIAYTMSLGAENSVAYSNNSIAIPTNFTISVTTEILPVSMTKTSVDCTMYICGDSTECSNLLLQYGSFCTQLNRALTGIAVEQDKNTQEVFAQVKQIYKTPPIKDFGGFNFSQILPDPSKPSKRSFIEDLLFNKVTLADAGFIKQYGDCLGDIAARDLICAQKFNGLTVLPPLLTDEMIAQYTSALLAGTITSGWTFGAGAALQIPFAMQMAYRFNGIGVTQNVLYENQKLIANQFNSAIGKIQDSLSSTASALGKLQDVVNQNAQALNTLVKQLSSNCGAISSVLNDILSRLDKVEAEVQIDRLITCRLQSLQTYVTQQLIRAAEIRASANLAATKMSECVLGQSKRVDFCGKGYHLMSFPQSAPHGVVFLHVTYVPAQEKNFTTAPAICHDGKAHFPREGVFVSNGTHWFVTQRNFYEPQIITTDNTFVSGNCDVVIGIVNNTVYDPLQPELDSFKEELDKYFKNHTSPDVDLGDISGINASVVNIQKEIDRLNEVAKNLNESLIDLQELGKYEQYIKGGGSGGGQIYEGKLTAEGLRFGIVASRFNHALVDRLVEGAIDAIVRHGGREEDITLVRVPGSWEIPVAAGELARKEDIDAVIAIGVLIRGATPHFDYIASEVSKGLADLSLELRKPITFGVITADTLEQAIERAGTKHGNKGWEAALSAIEMANLFKSLR

SEQ ID NO: 4396 - protein, 1371 aa, Artificial Sequence
  SARS-CoV-2/South Korea/SNU01/2020__EPI_ISL_411929 spike protein (1-1211)(F970C_G999C) LumSynth construct
MFVFLVLLPLVSSQCVNLTTRTQLPPAYTNSFTRGVYYPDKVFRSSVLHSTQDLFLPFFSNVTWFHAIHVSGTNGTKRFDNPVLPFNDGVYFASTEKSNIIRGWIFGTTLDSKTQSLLIVNNATNVVIKVCEFQFCNDPFLGVYYHKNNKSWMESEFRVYSSANNCTFEYVSQPFLMDLEGKQGNFKNLREFVFKNIDGYFKIYSKHTPINLVRDLPQGFWALEPLVDLPIGINITRFQTLLALHRSYLTPGDSSSGWTAGAAAYYVGYLQPRTFLLKYNENGTITDAVDCALDPLSETKCTLKSFTVEKGIYQTSNFRVQPTESIVRFPNITNLCPFGEVFNATRFASVYAWNRKRISNCVADYSVLYNSASFSTFKCYGVSPTKLNDLCFTNVYADSFVIRGDEVRQIAPGQTGKIADYNYKLPDDFTGCVIAWNSNNLDSKVGGNYNYLYRLFRKSNLKPFERDISTEIYQAGSTPCNGVEGFNCYFPLQSYGFQPTNGVGYQPYRVVVLSFELLHAPATVCGPKKSTNLVKNKCVNFNFNGLTGTGVLTESNKKFLPFQQFGRDIADTTDAVRDPQTLEILDITPCSFGGVSVITPGTNTSNQVAVLYQDVNCTEVPVAIHADQLTPTWRVYSTGSNVFQTRAGCLIGAEHVNNSYECDIPIGAGICASYQTQTNSPRRARSVASQSIIAYTMSLGAENSVAYSNNSIAIPTNFTISVTTEILPVSMTKTSVDCTMYICGDSTECSNLLLQYGSFCTQLNRALTGIAVEQDKNTQEVFAQVKQIYKTPPIKDFGGFNFSQILPDPSKPSKRSFIEDLLFNKVTLADAGFIKQYGDCLGDIAARDLICAQKFNGLTVLPPLLTDEMIAQYTSALLAGTITSGWTFGAGAALQIPFAMQMAYRFNGIGVTQNVLYENQKLIANQFNSAIGKIQDSLSSTASALGKLQDVVNQNAQALNTLVKQLSSNCGAISSVLNDILSRLDKVEAEVQIDRLITCRLQSLQTYVTQQLIRAAEIRASANLAATKMSECVLGQSKRVDFCGKGYHLMSFPQSAPHGVVFLHVTYVPAQEKNFTTAPAICHDGKAHFPREGVFVSNGTHWFVTQRNFYEPQIITTDNTFVSGNCDVVIGIVNNTVYDPLQPELDSFKEELDKYFKNHTSPDVDLGDISGINASVVNIQKEIDRLNEVAKNLNESLIDLQELGKYEQYIKGGGSGGGQIYEGKLTAEGLRFGIVASRFNHALVDRLVEGAIDAIVRHGGREEDITLVRVPGSWEIPVAAGELARKEDIDAVIAIGVLIRGATPHFDYIASEVSKGLADLSLELRKPITFGVITADTLEQAIERAGTKHGNKGWEAALSAIEMANLFKSLR

SEQ ID NO: 4397 - protein, 1371 aa, Artificial Sequence
  SARS-CoV-2/China/WF0004/2020__EPI_ISL_413694 spike protein (1-1211)(F970C_G999C) LumSynth construct
MFVFLVLLPLVSSQCVNLTTRTQLPPAYTNSFTRGVYYPDKVFRSSVLHSTQDLFLPFFSNVTWFHAIHVSGTNGTKRFDNPVLPFNDGVYFASTEKSNIIRGWIFGTTLDSKTQSLLIVNNATNVVIKVCEFQFCNDPFLGVYYHKNNKSWTESEFRVYSSANNCTFEYVSQPFLMDLEGKQGNFKNLREFVFKNIDGYFKIYSKHTPINLVRDLPQGFSALEPLVDLPIGINITRFQTLLALHRSYLTPGDSSSGWTAGAAAYYVGYLQPRTFLLKYNENGTITDAVDCALDPLSETKCTLKSFTVEKGIYQTSNFRVQPTESIVRFPNITNLCPFGEVFNATRFASVYAWNRKRISNCVADYSVLYNSASFSTFKCYGVSPTKLNDLCFTNVYADSFVIRGDEVRQIAPGQTGKIADYNYKLPDDFTGCVIAWNSNNLDSKVGGNYNYLYRLFRKSNLKPFERDISTEIYQAGSTPCNGVEGFNCYFPLQSYGFQPTNGVGYQPYRVVVLSFELLHAPATVCGPKKSTNLVKNKCVNFNFNGLTGTGVLTESNKKFLPFQQFGRDIADTTDAVRDPQTLEILDITPCSFGGVSVITPGTNTSNQVAVLYQDVNCTEVPVAIHADQLTPTWRVYSTGSNVFQTRAGCLIGAEHVNNSYECDIPIGAGICASYQTQTNSPRRARSVASQSIIAYTMSLGAENSVAYSNNSIAIPTNFTISVTTEILPVSMTKTSVDCTMYICGDSTECSNLLLQYGSFCTQLNRALTGIAVEQDKNTQEVFAQVKQIYKTPPIKDFGGFNFSQILPDPSKPSKRSFIEDLLFNKVTLADAGFIKQYGDCLGDIAARDLICAQKFNGLTVLPPLLTDEMIAQYTSALLAGTITSGWTFGAGAALQIPFAMQMAYRFNGIGVTQNVLYENQKLIANQFNSAIGKIQDSLSSTASALGKLQDVVNQNAQALNTLVKQLSSNCGAISSVLNDILSRLDKVEAEVQIDRLITCRLQSLQTYVTQQLIRAAEIRASANLAATKMSECVLGQSKRFDFCGKGYHLMSFPQSAPHGVVFLHVTYVPAQEKNFTTAPAICHDGKAHFPREGVFVSNGTHWFVTQRNFYEPQIITTDNTFVSGNCDVVIGIVNNTVYDPLQPELDSFKEELDKYFKNHTSPDVDLGDISGINASVVNIQKEIDRLNEVAKNLNESLIDLQELGKYEQYIKGGGSGGGQIYEGKLTAEGLRFGIVASRFNHALVDRLVEGAIDAIVRHGGREEDITLVRVPGSWEIPVAAGELARKEDIDAVIAIGVLIRGATPHFDYIASEVSKGLADLSLELRKPITFGVITADTLEQAIERAGTKHGNKGWEAALSAIEMANLFKSLR

SEQ ID NO: 4398 - protein, 1371 aa, Artificial Sequence
  SARS-CoV-2/China/WF0028/2020__EPI_ISL_413791 spike protein (1-1211)(F970C_G999C) LumSynth construct
MFVFLVLLPLVSSQCVNLTTRTQLPPAYTNSFTRGVYYPDKVFRSSVLHSTQDLFLPFFSNVTWFHAIHVSGTNGTKRFDNPVLPFNDGVYFASTEKSNIIRGWIFGTTLDSKTQSLLIVNNATNVVIKVCEFQFCNDPFLGVYYHKNNKSWMESEFRVYSSANNCTFEYVSQPFLMDLEGKQGNFKNLREFVFKNIDGYFKIYSKHTPINLVRDLPQGFSALEPLVDLPIGINITRFQTLLALHRSYLTPGDSSSGWTAGAAAYYVGYLQPRTFLLKYNENGTITDAVDCALDPLSETKCTLKSFTVEKGIYQTSNFRVQPTESIVRFPNITNLCPFGEVFNATRFASVYAWNRKRISNCVADYSVLYNSASFSTFKCYGVSPTKLNDLCFTNVYADSFVIRGDEVRQIAPGQTGKIADYNYKLPDDFTGCVIAWNSNNLDSKVGGNYNYLYRLFRKSNLKPFERDISTEIYQAGSTPCNGVEGFNCYFPLQSYGFQPTNGVGYQPYRVVVLSFELLHAPATVCGPKKSTNLVKNKCVNFNFNGLTGTGVLTESNKKFLPFQQFGRDIADTTDAVRDPQTLEILDITPCSFGGVSVITPGTNTSNQVAVLYQDVNCTEVPVAIHADQLTPTWRVYSTGSNVFQTRAGCLIGAEHVNNSYECDIPIGAGICASYQTQTNSPRRARSVASQSIIAYTMSLGAENSVAYSNNSIAIPTNFTISVTTEILPVSMTKTSVDCTMYICGDSTECSNLLLQYGSFCTQLNRALTGIAVEQDKNTQEVFAQVKQIYKTPPIKDFGGFNFSQILPDPSKPSKRSFIEDLLFNKVTLADAGFIKQYGDCLGDIAARDLICAQKFNGLTVLPPLLTDEMIAQYTSALLAGTITSGWTFGAGAALQIPFAMQMAYRFNGIGVTQNVLYENQKLIANQFNSAIGKIQDSLSSTASALGKLQDVVNQNAQALNTLVKQLSSNCGAISSVLNDILSRLDKVEAEVQIDRLITCRLQSLQTYVTQQLIRAAEIRASANLAATKMSECVLGQSKRVDFCGKGYHLMSFPQSAPHGVVFLHVTYVPAQEKNFTTAPAICHDGKAHFPREGVFVSNGTHWFVTQRNFYEPQIITTDNTFVSGNCDVVIGIVNNTVYDPLQPELESFKEELDKYFKNHTSPDVDLGDISGINASVVNIQKEIDRLNEVAKNLNESLIDLQELGKYEQYIKGGGSGGGQIYEGKLTAEGLRFGIVASRFNHALVDRLVEGAIDAIVRHGGREEDITLVRVPGSWEIPVAAGELARKEDIDAVIAIGVLIRGATPHFDYIASEVSKGLADLSLELRKPITFGVITADTLEQAIERAGTKHGNKGWEAALSAIEMANLFKSLR

SEQ ID NO: 4399 - protein, 1371 aa, Artificial Sequence
  SARS-CoV-2/2019-nCoV/USA-CruiseA-18/2020__MT159716.1 spike protein (1-1211)(F970C_G999C) LumSynth construct
MFVFLVLLPLVSSQCVNLTTRTQLPPAYTNSFTRGVYYPDKVFRSSVLHSTQDLFLPFFSNVTWFHAIHVSGTNGTKRFDNPVLPFNDGVYFASTEKSNIIRGWIFGTTLDSKTQSLLIVNNATNVVIKVCEFQFCNDPFLGVYYHKNNKSWMESELRVYSSANNCTFEYVSQPFLMDLEGKQGNFKNLREFVFKNIDGYFKIYSKHTPINLVRDLPQGFSALEPLVDLPIGINITRFQTLLALHRSYLTPGDSSSGWTAGAAAYYVGYLQPRTFLLKYNENGTITDAVDCALDPLSETKCTLKSFTVEKGIYQTSNFRVQPTESIVRFPNITNLCPFGEVFNATRFASVYAWNRKRISNCVADYSVLYNSASFSTFKCYGVSPTKLNDLCFTNVYADSFVIRGDEVRQIAPGQTGKIADYNYKLPDDFTGCVIAWNSNNLDSKVGGNYNYLYRLFRKSNLKPFERDISTEIYQAGSTPCNGVEGFNCYFPLQSYGFQPTNGVGYQPYRVVVLSFELLHAPATVCGPKKSTNLVKNKCVNFNFNGLTGTGVLTESNKKFLPFQQFGRDIADTTDAVRDPQTLEILDITPCSFGGVSVITPGTNTSNQVAVLYQDVNCTEVPVAIHADQLTPTWRVYSTGSNVFQTRAGCLIGAEHVNNSYECDIPIGAGICASYQTQTNSPRRARSVASQSIIAYTMSLGAENSVAYSNNSIAIPTNFTISVTTEILPVSMTKTSVDCTMYICGDSTECSNLLLQYGSFCTQLNRALTGIAVEQDKNTQEVFAQVKQIYKTPPIKDFGGFNFSQILPDPSKPSKRSFIEDLLFNKVTLADAGFIKQYGDCLGDIAARDLICAQKFNGLTVLPPLLTDEMIAQYTSALLAGTITSGWTFGAGAALQIPFAMQMAYRFNGIGVTQNVLYENQKLIANQFNSAIGKIQDSLSSTASALGKLQDVVNQNAQALNTLVKQLSSNCGAISSVLNDILSRLDKVEAEVQIDRLITCRLQSLQTYVTQQLIRAAEIRASANLAATKMSECVLGQSKRVDFCGKGYHLMSFPQSAPHGVVFLHVTYVPAQEKNFTTAPAICHDGKAHFPREGVFVSNGTHWFVTQRNFYEPQIITTDNTFVSGNCDVVIGIVNNTVYDPLQPELDSFKEELDKYFKNHTSPDVDLGDISGINASVVNIQKEIDRLNEVAKNLNESLIDLQELGKYEQYIKGGGSGGGQIYEGKLTAEGLRFGIVASRFNHALVDRLVEGAIDAIVRHGGREEDITLVRVPGSWEIPVAAGELARKEDIDAVIAIGVLIRGATPHFDYIASEVSKGLADLSLELRKPITFGVITADTLEQAIERAGTKHGNKGWEAALSAIEMANLFKSLR

SEQ ID NO: 4400 - protein, 1371 aa, Artificial Sequence
  SARS-CoV-2/SARS-CoV-2/Yunnan-01/human/2020/CHN__MT049951.1 spike protein (1-1211)(F970C_G999C) LumSynth construct
MFVFLVLLPLVSSQCVNLTTRTQLPPANTNSFTRGVYYPDKVFRSSVLHSTQDLFLPFFSNVTWFHAIHVSGTNGTKRFDNPVLPFNDGVYFASTEKSNIIRGWIFGTTLDSKTQSLLIVNNATNVVIKVCEFQFCNDPFLGVYYHKNNKSWMESEFRVYSSANNCTFEYVSQPFLMDLEGKQGNFKNLREFVFKNIDGYFKIYSKHTPINLVRDLPQGFSALEPLVDLPIGINITRFQTLLALHRSYLTPGDSSSGWTAGAAAYYVGYLQPRTFLLKYNENGTITDAVDCALDPLSETKCTLKSFTVEKGIYQTSNFRVQPTESIVRFPNITNLCPFGEVFNATRFASVYAWNRKRISNCVADYSVLYNSASFSTFKCYGVSPTKLNDLCFTNVYADSFVIRGDEVRQIAPGQTGKIADYNYKLPDDFTGCVIAWNSNNLDSKVGGNYNYLYRLFRKSNLKPFERDISTEIYQAGSTPCNGVEGFNCYFPLQSYGFQPTNGVGYQPYRVVVLSFELLHAPATVCGPKKSTNLVKNKCVNFNFNGLTGTGVLTESNKKFLPFQQFGRDIADTTDAVRDPQTLEILDITPCSFGGVSVITPGTNTSNQVAVLYQDVNCTEVPVAIHADQLTPTWRVYSTGSNVFQTRAGCLIGAEHVNNSYECDIPIGAGICASYQTQTNSPRRARSVASQSIIAYTMSLGAENSVAYSNNSIAIPTNFTISVTTEILPVSMTKTSVDCTMYICGDSTECSNLLLQYGSFCTQLNRALTGIAVEQDKNTQEVFAQVKQIYKTPPIKDFGGFNFSQILPDPSKPSKRSFIEDLLFNKVTLADAGFIKQYGDCLGDIAARDLICAQKFNGLTVLPPLLTDEMIAQYTSALLAGTITSGWTFGAGAALQIPFAMQMAYRFNGIGVTQNVLYENQKLIANQFNSAIGKIQDSLSSTASALGKLQDVVNQNAQALNTLVKQLSSNCGAISSVLNDILSRLDKVEAEVQIDRLITCRLQSLQTYVTQQLIRAAEIRASANLAATKMSECVLGQSKRVDFCGKGYHLMSFPQSAPHGVVFLHVTYVPAQEKNFTTAPAICHDGKAHFPREGVFVSNGTHWFVTQRNFYEPQIITTDNTFVSGNCDVVIGIVNNTVYDPLQPELDSFKEELDKYFKNHTSPDVDLGDISGINASVVNIQKEIDRLNEVAKNLNESLIDLQELGKYEQYIKGGGSGGGQIYEGKLTAEGLRFGIVASRFNHALVDRLVEGAIDAIVRHGGREEDITLVRVPGSWEIPVAAGELARKEDIDAVIAIGVLIRGATPHFDYIASEVSKGLADLSLELRKPITFGVITADTLEQAIERAGTKHGNKGWEAALSAIEMANLFKSLR

SEQ ID NO: 4401 - protein, 1371 aa, Artificial Sequence
  SARS-CoV-2/USA/WA-UW292/2020__EPI_ISL_418077 spike protein (1-1211)(F970C_G999C) LumSynth construct
MFVFLVLLPLVSSQCVNLTTRTQLPPAYTNSFTRGVYYPDKVFRSSVLHSTQDLFLPFFSNVTWFHAIHVSGTNGTKRFDNPVLPFNDGVYFASTEKSNIIRGWIFGTTLDSKTQSLLIVNNATNVVIKVCEFQFCNDPFLGVYYHKNNKSWMESEFRVYSSANNCTFEYVSQPFLMDLEGKQGNFKNLREFVFKNIDGYFKIYSKHTPINLVRDLPQGFSALEPLVDLPIGINITRFQTLLALHRSYLTPGDSSSGWTAGAAAYYVGYLQPRTFLLKYNENGTITDAVDCALDPLSETKCTLKSFTVEKGIYQTSNFRVQPTESIVRFPNITNLCPFGEVFNATRFASVYAWNRKRISNCVADYSVLYNSASFSTFKCYGVSPTKLNDLCFTNVYADSFVIRGDEVRQIAPGQTGKIADYNYKLPDDFTGCVIAWNSNNLDSKVGGNYNYLYRLFRKSNLKPFERDISTEIYQASSTPCNGVEGFNCYFPLQSYGFQPTNGVGYQPYRVVVLSFELLHAPATVCGPKKSTNLVKNKCVNFNFNGLTGTGVLTESNKKFLPFQQFGRDIADTTDAVRDPQTLEILDITPCSFGGVSVITPGTNTSNQVAVLYQDVNCTEVPVAIHADQLTPTWRVYSTGSNVFQTRAGCLIGAEHVNNSYECDIPIGAGICASYQTQTNSPRRARSVASQSIIAYTMSLGAENSVAYSNNSIAIPTNFTISVTTEILPVSMTKTSVDCTMYICGDSTECSNLLLQYGSFCTQLNRALTGIAVEQDKNTQEVFAQVKQIYKTPPIKDFGGFNFSQILPDPSKPSKRSFIEDLLFNKVTLADAGFIKQYGDCLGDIAARDLICAQKFNGLTVLPPLLTDEMIAQYTSALLAGTITSGWTFGAGAALQIPFAMQMAYRFNGIGVTQNVLYENQKLIANQFNSAIGKIQDSLSSTASALGKLQDVVNQNAQALNTLVKQLSSNCGAISSVLNDILSRLDKVEAEVQIDRLITCRLQSLQTYVTQQLIRAAEIRASANLAATKMSECVLGQSKRVDFCGKGYHLMSFPQSAPHGVVFLHVTYVPAQEKNFTTAPAICHDGKAHFPREGVFVSNGTHWFVTQRNFYEPQIITTDNTFVSGNCDVVIGIVNNTVYDPLQPELDSFKEELDKYFKNHTSPDVDLGDISGINASVVNIQKEIDRLNEVAKNLNESLIDLQELGKYEQYIKGGGSGGGQIYEGKLTAEGLRFGIVASRFNHALVDRLVEGAIDAIVRHGGREEDITLVRVPGSWEIPVAAGELARKEDIDAVIAIGVLIRGATPHFDYIASEVSKGLADLSLELRKPITFGVITADTLEQAIERAGTKHGNKGWEAALSAIEMANLFKSLR

SEQ ID NO: 4402 - protein, 1371 aa, Artificial Sequence
  SARS-CoV-2/Iceland/192/2020__EPI_ISL_417819 spike protein (1-1211)(F970C_G999C) LumSynth construct
MFVFFVLLPLVSSQCVNLTTRTQLPPAYTNSFTRGVYYPDKVFRSSVLHSTQDLFLPFFSNVTWFHAIHVSGTNGTKRFDNPVLPFNDGVYFASTEKSNIIRGWIFGTTLDSKTQSLLIVNNATNVVIKVCEFQFCNDPFLGVYYHKNNKSWMESEFRVYSSANNCTFEYVSQPFLMDLEGKQGNFKNLREFVFKNIDGYFKIYSKHTPINLVRDLPQGFSALEPLVDLPIGINITRFQTLLALHRSYLTPGDSSSGWTAGAAAYYVGYLQPRTFLLKYNENGTITDAVDCALDPLSETKCTLKSFTVEKGIYQTSNFRVQPTESIVRFPNITNLCPFGEVFNATRFASVYAWNRKRISNCVADYSVLYNSASFSTFKCYGVSPTKLNDLCFTNVYADSFVIRGDEVRQIAPGQTGKIADYNYKLPDDFTGCVIAWNSNNLDSKVGGNYNYLYRLFRKSNLKPFERDISTEIYQAGSTPCNGVEGFNCYFPLQSYGFQPTNGVGYQPYRVVVLSFELLHAPATVCGPKKSTNLVKNKCVNFNFNGLTGTGVLTESNKKFLPFQQFGRDIADTTDAVRDPQTLEILDITPCSFGGVSVITPGTNTSNQVAVLYQGVNCTEVPVAIHADQLTPTWRVYSTGSNVFQTRAGCLIGAEHVNNSYECDIPIGAGICASYQTQTNSPRRARSVASQSIIAYTMSLGAENSVAYSNNSIAIPTNFTISVTTEILPVSMTKTSVDCTMYICGDSTECSNLLLQYGSFCTQLNRALTGIAVEQDKNTQEVFAQVKQIYKTPPIKDFGGFNFSQILPDPSKPSKRSFIEDLLFNKVTLADAGFIKQYGDCLGDIAARDLICAQKFNGLTVLPPLLTDEMIAQYTSALLAGTITSGWTFGAGAALQIPFAMQMAYRFNGIGVTQNVLYENQKLIANQFNSAIGKIQDSLSSTASALGKLQDVVNQNAQALNTLVKQLSSNCGAISSVLNDILSRLDKVEAEVQIDRLITCRLQSLQTYVTQQLIRAAEIRASANLAATKMSECVLGQSKRVDFCGKGYHLMSFPQSAPHGVVFLHVTYVPAQEKNFTTAPAICHDGKAHFPREGVFVSNGTHWFVTQRNFYEPQIITTDNTFVSGNCDVVIGIVNNTVYDPLQPELDSFKEELDKYFKNHTSPDVDLGDISGINASVVNIQKEIDRLNEVAKNLNESLIDLQELGKYEQYIKGGGSGGGQIYEGKLTAEGLRFGIVASRFNHALVDRLVEGAIDAIVRHGGREEDITLVRVPGSWEIPVAAGELARKEDIDAVIAIGVLIRGATPHFDYIASEVSKGLADLSLELRKPITFGVITADTLEQAIERAGTKHGNKGWEAALSAIEMANLFKSLR

SEQ ID NO: 4403 - protein, 1371 aa, Artificial Sequence
  SARS-CoV-2/Belgium/ULG-6939/2020__EPI_ISL_417020 spike protein (1-1211)(F970C_G999C) LumSynth construct
MFVFLVLLPLVSSQCVNLTTRTQLPPAYTNSFTRGVYYPDKVFRSSVLHSTQDLFLPFFSNVTWFHAIHVSGTNGTKRFDNPVLPFNDGVYFASTEKSNIIRGWIFGTTLDSKTQSLLIVNNATNVVIKVCEFQFCNDPFLGVYYHKNNKSWMESEFRVYSSANNCTFEYVSQPFLMDLEGKQGNFKNLREFVFKNIDGYFKIYSKHTPINLVRDLPQGFSALEPLVDLPIGINITRFQTLLALHRSYLTPGDSSSGWTAGAAAYYVGYLQPRTFLLKYNENGTITDAVDCALDPLSETKCTLKSFTVEKGIYQTSNFRVQPTESIVRFPNITNLCPFGEVFNATRFASVYAWNRKRISNCVADYSVLYNSASFSTFKCYGVSPTKLNDLCFTNVYADSFVIRGDEVRQIAPGQTGKIADYNYKLPDDFTGCVIAWNSNNLDSKVGGNYNYLYRLFRKSNLKPFERDISTEIYQAGSTPCNGVEGFNCYFPLQSYGFQPTNGVGYQPYRVVVLSFELLHAPATVCGPKKSTNLVKNKCVNFNFNGLTGTGVLTESNKKFLPFQQFGRDIADTTDAVRDPQTLEILDITPCSFGGVSVITPGTNTSNQVAVLYQGVNCTEVPVAIHADQLTPTWRVYSTGSNVFQTRAGCLIGAEHVNNSYECDIPIGAGICASYQTQTNSPRRARSVASQSIIAYTMSLGAENSVVYSNNSIAIPTNFTISVTTEILPVSMTKTSVDCTMYICGDSTECSNLLLQYGSFCTQLNRALTGIAVEQDKNTQEVFAQVKQIYKTPPIKDFGGFNFSQILPDPSKPSKRSFIEDLLFNKVTLADAGFIKQYGDCLGDIAARDLICAQKFNGLTVLPPLLTDEMIAQYTSALLAGTITSGWTFGAGAALQIPFAMQMAYRFNGIGVTQNVLYENQKLIANQFNSAIGKIQDSLSSTASALGKLQDVVNQNAQALNTLVKQLSSNCGAISSVLNDILSRLDKVEAEVQIDRLITCRLQSLQTYVTQQLIRAAEIRASANLAATKMSECVLGQSKRVDFCGKGYHLMSFPQSAPHGVVFLHVTYVPAQEKNFTTAPAICHDGKAHFPREGVFVSNGTHWFVTQRNFYEPQIITTDNTFVSGNCDVVIGIVNNTVYDPLQPELDSFKEELDKYFKNHTSPDVDLGDISGINASVVNIQKEIDRLNEVAKNLNESLIDLQELGKYEQYIKGGGSGGGQIYEGKLTAEGLRFGIVASRFNHALVDRLVEGAIDAIVRHGGREEDITLVRVPGSWEIPVAAGELARKEDIDAVIAIGVLIRGATPHFDYIASEVSKGLADLSLELRKPITFGVITADTLEQAIERAGTKHGNKGWEAALSAIEMANLFKSLR

SEQ ID NO: 4404 - protein, 1371 aa, Artificial Sequence
  SARS-CoV-2/France/HF2496/2020__EPI_ISL_418231 spike protein (1-1211)(F970C_G999C) LumSynth construct
MFVFLVLLPLVSSQCVNLTTRTQLPPAYTNSFTRGVYYPDKVFRSSVLHSTQDLFLPFFSNVTWFHAIHVSGTNGTKRFDNPVLPFNDGVYFASTEKSNIIRGWIFGTTLDSKTQSLLIVNNATNVVIKVCEFQFCNDPFLGVYYHKNNKSWMESEFRVYSSANNCTFEYVSQPFLMDLEGKQGNFKNLREFVFKNIDGYFKIYSKHTPINLVRDLPQGFSALEPLVDLPIGINITRFQTLLALHRSYLTPGDSSSGWTAGAAAYYVGYLQPRTFLLKYNENGTITDAVDCALDPLSETKCTLKSFTVEKGIYQTSNFRVQPTESIVRFPNITNLCPFGEVFNATRFASVYAWNRKRISNCVADYSVLYNSASFSTFKCYGVSPTKLNDLCFTNVYADSFVIRGDEVRQIAPGQTGKIADYNYKLPDDFTGCVIAWNSNNLDSKVGGNYNYLYRLFRKSNLKPFERDISTEIYQAGSTPCNGVEGFNCYFPLQSYGFQPTNGVGYQPYRVVVLSFELLHAPATVCGPKKSTNLVKNKCVNFNFNGLTGTGVLTESNKKFLPFQQFGRDIADTTDAVRDPQTLEILDITPCSFGGVSVITPGTNTSNQVAVLYQGVNCTEVPVAIHADQLTPTWRVYSTGSNVFQTRAGCLIGAEHVNNSYECDIPIGAGICASYQTQTNSPRRARSVASQSIIAYTMSLGAENSVAYSNNSIAIPTNFTISVTTEILPVSMTKTSVDCTMYICGDSTECSNLLLQYGSFCTQLNRALTGIAVEQDKNTQEVFAQVKQIYKTPPIKDFGGFNFSQILPDPSKPSKRSFIEDLLFNKVTLADAGFIKQYGDCLGDIVARDLICAQKFNGLTVLPPLLTDEMIAQYTSALLAGTITSGWTFGAGAALQIPFAMQMAYRFNGIGVTQNVLYENQKLIANQFNSAIGKIQDSLSSTASALGKLQDVVNQNAQALNTLVKQLSSNCGAISSVLNDILSRLDKVEAEVQIDRLITCRLQSLQTYVTQQLIRAAEIRASANLAATKMSECVLGQSKRVDFCGKGYHLMSFPQSAPHGVVFLHVTYVPAQEKNFTTAPAICHDGKAHFPREGVFVSNGTHWFVTQRNFYEPQIITTDNTFVSGNCDVVIGIVNNTVYDPLQPELDSFKEELDKYFKNHTSPDVDLGDISGINASVVNIQKEIDRLNEVAKNLNESLIDLQELGKYEQYIKGGGSGGGQIYEGKLTAEGLRFGIVASRFNHALVDRLVEGAIDAIVRHGGREEDITLVRVPGSWEIPVAAGELARKEDIDAVIAIGVLIRGATPHFDYIASEVSKGLADLSLELRKPITFGVITADTLEQAIERAGTKHGNKGWEAALSAIEMANLFKSLR

SEQ ID NO: 4405 - protein, 1371 aa, Artificial Sequence
  SARS-CoV-2/USA/WA-UW291/2020__EPI_ISL_418076 spike protein (1-1211)(F970C_G999C) LumSynth construct
MFVFLVLLPLVSSQCVNLTTRTQLPPAYTNSFTRGVYYPDKVFRSSVLHSTQDLFLPFFSNVTWFHAIHVSGTNGTKRFDNPVLPFNDGVYFASTEKSNIIRGWIFGTTLDSKTQSLLIVNNATNVVIKVCEFQFCNDPFLGVYYHKNNKSWMESEFRVYSSANNCTFEYVSQPFLMDLEGKQGNFKNLREFVFKNIDGYFKIYSKHTPINLVRDLPQGFSALEPLVDLPIGINITRFQTLLALHRSYLTPGDSSSGWTAGAAAYYVGYLQPRTFLLKYNENGTITDAVDCALDPLSETKCTLKSFTVEKGIYQTSNFRVQPTESIVRFPNITNLCPFGEVFNATRFASVYAWNRKRISNCVADYSVLYNSASFSTFKCYGVSPTKLNDLCFTNVYADSFVIRGDEVRQIAPGQTGKIADYNYKLPDDFTGCVIAWNSNNLDSKVGGNYNYLYRLFRKSNLKPFERDISTEIYQAGSTPCNGVEGFNCYFPLQSYGFQPTNGVGYQPYRVVVLSFELLHAPATVCGPKKSTNLVKNKCVNFNFNGLTGTGVLTESNKKFLPFQQFGRDIADTTDAVRDPQTLEILDITPCSFGGVSVITPGTNTSNQVAVLYQGVNCTEVPVAIHADQLTPTWRVYSTGSNVFQTRAGCLIGAEHVNNSYECDIPIGAGICASYQTQTNSPRRARSVASQSIIAYTMSLGAENSVAYSNNSIAIPTNFTISVTTEILPVSMTKTSVDCTMYICGDSTECSNLLLQYGSFCTQLNRALTGIAVEQDKNTQEVFAQVKQIYKTPPIKDFGGFNFSQILPDPSKPSKRSFIEDLLFNKVTLADAGFIKQYGDCLGDIAARDLICAQKFNGLTVLPPLLTDEMIAQYTSALLAGTITSGWTFGAGAALQIPFAMQMAYRFNGIGVTQNVLYENQKLIANQFNSAIGKIQYSLSSTASALGKLQDVVNQNAQALNTLVKQLSSNCGAISSVLNDILSRLDKVEAEVQIDRLITCRLQSLQTYVTQQLIRAAEIRASANLAATKMSECVLGQSKRVDFCGKGYHLMSFPQSAPHGVVFLHVTYVPAQEKNFTTAPAICHDGKAHFPREGVFVSNGTHWFVTQRNFYEPQIITTDNTFVSGNCDVVIGIVNNTVYDPLQPELDSFKEELDKYFKNHTSPDVDLGDISGINASVVNIQKEIDRLNEVAKNLNESLIDLQELGKYEQYIKGGGSGGGQIYEGKLTAEGLRFGIVASRFNHALVDRLVEGAIDAIVRHGGREEDITLVRVPGSWEIPVAAGELARKEDIDAVIAIGVLIRGATPHFDYIASEVSKGLADLSLELRKPITFGVITADTLEQAIERAGTKHGNKGWEAALSAIEMANLFKSLR

SEQ ID NO: 4406 - protein, 1371 aa, Artificial Sequence; identical to SEQ ID NO: 4369
  SARS-CoV-2/Portugal/PT0034/2020__EPI_ISL_418019 spike protein (1-1211)(F970C_G999C) LumSynth construct

SEQ ID NO: 4407 - protein, 1371 aa, Artificial Sequence
  SARS-CoV-2/Iceland/202/2020__EPI_ISL_417750 spike protein (1-1211)(F970C_G999C) LumSynth construct
MFVFLVLLPLVSSQCVNLTTRTQLPPAYTNSFTRGVYYPDKVFRSSVLHSTQDLFLPFFSNVTWFHAIHVSGTNGTKRFDNPVLPFNDGVYFASTEKSNIIRGWIFGTTLDSKTQSLLIVNNATNVVIKVCEFQFCNDPFLGVYYHKNNKSWMESEFRVYSSANNCTFEYVSQPFLMDLEGKQGNFKNLREFVFKNIDGYFKIYSKHTPINLVRDLPQGFSALEPLVDLPIGINITRFQTLLALHRSYLTPGDSSSGWTAGAAAYYVGYLQPRTFLLKYNENGTITDAVDCALDPLSETKCTLKSFTVEKGIYQTSNFRVQPTESIVRFPNITNLCPFGEVFNATRFASVYAWNRKRISNCVADYSVLYNSASFSTFKCYGVSPTKLNDLCFTNVYADSFVIRGDEVRQIAPGQTGKIADYNYKLPDDFTGCVIAWNSNNLDSKVGGNYNYLYRLFRKSNLKPFERDISTEIYQAGSTPCNGVEGFNCYFPLQSYGFQPTNGVGYQPYRVVVLSFELLHAPATVCGPKKSTNLVKNKCVNFNFNGLTGTGVLTESNKKFLPFQQFGRDIADTTDAVRDPQTLEILDITPCSFGGVSVITPGTNTSNQVAVLYQDVNCTEVPVAIHADQLTPTWRVYSTGSNVFQTRAGCLIGAEHVNNSYECDIPIGAGICASYQTQTNSPRRARSVASQSIIAYTMSLGAENSVAYSNNSIAIPTNFTISVTTEILPVSMTKTSVDCTMYICGDSTECSNLLLQYGSFCTQLNRALTGIAVEQDKNTQEVFAQVKQIYKTPPIKDFGGFNFSQILPDPSKPSKRSFIEDLLFNKVTLADAGFIKQYGDCLGDIAARDLICAQKFNGLTVLPPLLTDEMIAQYTSALLAGTITSGWTFGAGAALQIPFAMQMAYRFNGIGVTQNVLYENQKLIANQFNSAIGKIQDSLSSTASALGKLQDVVNQNAQALNTLVKQLSSNCGAISSVLNDILSRLDKVEAEVQIDRLITCRLQSLQTYVTQQLIRAAEIRASANLAATKMSECVLGQSKRVDFCGKGYHLMSFPQSAPHGVVFLHVTYVPAQEKNFTTAPAICHDGKAHFPREGVFVSNGTHWFVTQRNFYEPQIITTDNTFVSGNCDVVIGIVNNTVYDPLQPELDSFKEELDKYFKNHTSPDVDLGDIPGINASVVNIQKEIDRLNEVAKNLNESLIDLQELGKYEQYIKGGGSGGGQIYEGKLTAEGLRFGIVASRFNHALVDRLVEGAIDAIVRHGGREEDITLVRVPGSWEIPVAAGELARKEDIDAVIAIGVLIRGATPHFDYIASEVSKGLADLSLELRKPITFGVITADTLEQAIERAGTKHGNKGWEAALSAIEMANLFKSLR

SEQ ID NO: 4408 - protein, 1371 aa, Artificial Sequence
  SARS-CoV-2/USA/WA-UW261/2020__EPI_ISL_418046 spike protein (1-1211)(F970C_G999C) LumSynth construct
MFVFLVLLPLVSSQCVNLTTRTQLPPAYTNSFTRGVYYPDKVFRSSVLHSTQDLFLPFFSNVTWFHAIHVSGTNGTKRFDNPVLPFNDGVYFASTEKSNIIRGWIFGTTLDSKTQSLLIVNNATNVVIKVCEFQFCNDPFLGVYYHKNNKSWMESEFRVYSSANNCTFEYVSQPFLMDLEGKQGNFKNLREFVFKNIDGYFKIYSKHTPINLVRDLPQGFSALEPLVDLPIGINITRFQTLLALHRSYLTPGDSSSGWTAGAAAYYVGYLQPRTFLLKYNENGTITDAVDCALDPLSETKCTLKSFTVEKGIYQTSNFRVQPTESIVRFPNITNLCPFGEVFNATRFTSVYAWNRKRISNCVADYSVLYNSASFSTFKCYGVSPTKLNDLCFTNVYADSFVIRGDEVRQIAPGQTGKIADYNYKLPDDFTGCVIAWNSNNLDSKVGGNYNYLYRLFRKSNLKPFERDISTEIYQAGSTPCNGVEGFNCYFPLQSYGFQPTNGVGYQPYRVVVLSFELLHAPATVCGPKKSTNLVKNKCVNFNFNGLTGTGVLTESNKKFLPFQQFGRDIADTTDAVRDPQTLEILDITPCSFGGVSVITPGTNTSNQVAVLYQDVNCTEVPVAIHADQLTPTWRVYSTGSNVFQTRAGCLIGAEHVNNSYECDIPIGAGICASYQTQTNSPRRARSVASQSIIAYTMSLGAENSVAYSNNSIAIPTNFTISVTTEILPVSMTKTSVDCTMYICGDSTECSNLLLQYGSFCTQLNRALTGIAVEQDKNTQEVFAQVKQIYKTPPIKDFGGFNFSQILPDPSKPSKRSFIEDLLFNKVTLADAGFIKQYGDCLGDIAARDLICAQKFNGLTVLPPLLTDEMIAQYTSALLAGTITSGWTFGAGAALQIPFAMQMAYRFNGIGVTQNVLYENQKLIANQFNSAIGKIQDSLSSTASALGKLQDVVNQNAQALNTLVKQLSSNCGAISSVLNDILSRLDKVEAEVQIDRLITCRLQSLQTYVTQQLIRAAEIRASANLAATKMSECVLGQSKRVDFCGKGYHLMSFPQSAPHGVVFLHVTYVPAQEKNFTTAPAICHDGKAHFPREGVFVSNGTHWFVTQRNFYEPQIITTDNTFVSGNCDVVIGIVNNTVYDPLQPELDSFKEELDKYFKNHTSPDVDLGDISGINASVVNIQKEIDRLNEVAKNLNESLIDLQELGKYEQYIKGGGSGGGQIYEGKLTAEGLRFGIVASRFNHALVDRLVEGAIDAIVRHGGREEDITLVRVPGSWEIPVAAGELARKEDIDAVIAIGVLIRGATPHFDYIASEVSKGLADLSLELRKPITFGVITADTLEQAIERAGTKHGNKGWEAALSAIEMANLFKSLR

SEQ ID NO: 4409 - protein, 1371 aa, Artificial Sequence
  SARS-CoV-2/Portugal/PT0035/2020__EPI_ISL_418020 spike protein (1-1211)(F970C_G999C) LumSynth construct
MFVFLVLLPLVSSQCVNLTTRTQLPPAYTNSFTRGVYYPDKVFRSSVLHSTQDLFLPFFSNVTWFHAIHVSGTNGTKRFDNPVLPFNDGVYFASTEKSNIIRGWIFGTTLDSKTQSLLIVNNATNVVIKVCEFQFCNDPFLGVYYHKNNKSWMESEFRVYSSANNCTFEYVSQPFLMDLEGKQGNFKNLREFVFKNIDGYFKIYSKHTPINLVRDLPQGFSALEPLVDLPIGINITRFQTLLALHRSYLTPGDSSSGWTAGAAAYYVGYLQPRTFLLKYNENGTITDAVDCALDPLSETKCTLKSFTVEKGIYQTSNFRVQPTESIVRFPNITNLCPFGEVFNATRFASVYAWNRKRISNCVADYSVLYNSASFSTFKCYGVSPTKLNDLCFTNVYADSFVIRGDEVRQIAPGQTGKIADYNYKLPDDFTGCVIAWNSNNLDSKVGGNYNYLYRLFRKSNLKPFERDISTEIYQAGSTPCNGVEGFNCYFPLQSYGFQPTNGVGYQPYRVVVLSFELLHAPATVCGPKKSTNLVKNKCVNFNFNGLTGTGVLTESNKKFLPFQQFGRDIADTTDAVRDPQTLEILDITPCSFGGVSVITPGTNTSNQVAVLYQDVNCTEVPVAIHADQLTPTWRVYSTGSNVFQTRAGCLIGAEHVNNSYECDIPIGAGICASYQTQTNSPRRARSVASQSIIAYTMSLGAENSVAYSNNSIAIPTNFTISVTTEILPVSMTKTSVDCTMYICGDSTECSNLLLQYGSFCTQLNRALTGIAVEQDKNTQEVFAQVKQIYKTPPIKDFGGFNFSQILPDPSKPSKRSFIEDLLFNKVTLADAGFIKQYGDCLGDISARDLICAQKFNGLTVLPPLLTDEMIAQYTSALLAGTITSGWTFGAGAALQIPFAMQMAYRFNGIGVTQNVLYENQKLIANQFNSAIGKIQDSLSSTASALGKLQDVVNQNAQALNTLVKQLSSNCGAISSVLNDILSRLDKVEAEVQIDRLITCRLQSLQTYVTQQLIRAAEIRASANLAATKMSECVLGQSKRVDFCGKGYHLMSFPQSAPHGVVFLHVTYVPAQEKNFTTAPAICHDGKAHFPREGVFVSNGTHWFVTQRNFYEPQIITTDNTFVSGNCDVVIGIVNNTVYDPLQPELDSFKEELDKYFKNHTSPDVDLGDISGINASVVNIQKEIDRLNEVAKNLNESLIDLQELGKYEQYIKGGGSGGGQIYEGKLTAEGLRFGIVASRFNHALVDRLVEGAIDAIVRHGGREEDITLVRVPGSWEIPVAAGELARKEDIDAVIAIGVLIRGATPHFDYIASEVSKGLADLSLELRKPITFGVITADTLEQAIERAGTKHGNKGWEAALSAIEMANLFKSLR

SEQ ID NO: 4410 - protein, 1371 aa, Artificial Sequence
  SARS-CoV-2/USA/NY-NYUMC7/2020__EPI_ISL_418192 spike protein (1-1211)(F970C_G999C) LumSynth construct
MFVFLVLLPLVSSQCVNLTTRTQLPPAYTNSFTRGVYYPDKVFRSSVLHSTQDLFLPFFSNVTWFHAIHVSGTNGTKRFDNPVLPFNDGVYFASTEKSNIIRGWIFGTTLDSKTQSLLIVNNATNVVIKVCEFQFCNDPFLGVYHHKNNKSWMESEFRVYSSANNCTFEYVSQPFLMDLEGKQGNFKNLREFVFKNIDGYFKIYSKHTPINLVRDLPQGFSALEPLVDLPIGINITRFQTLLALHRSYLTPGDSSSGWTAGAAAYYVGYLQPRTFLLKYNENGTITDAVDCALDPLSETKCTLKSFTVEKGIYQTSNFRVQPTESIVRFPNITNLCPFGEVFNATRFASVYAWNRKRISNCVADYSVLYNSASFSTFKCYGVSPTKLNDLCFTNVYADSFVIRGDEVRQIAPGQTGKIADYNYKLPDDFTGCVIAWNSNNLDSKVGGNYNYLYRLFRKSNLKPFERDISTEIYQAGSTPCNGVEGFNCYFPLQSYGFQPTNGVGYQPYRVVVLSFELLHAPATVCGPKKSTNLVKNKCVNFNFNGLTGTGVLTESNKKFLPFQQFGRDIADTTDAVRDPQTLEILDITPCSFGGVSVITPGTNTSNQVAVLYQGVNCTEVPVAIHADQLTPTWRVYSTGSNVFQTRAGCLIGAEHVNNSYECDIPIGAGICASYQTQTNSPRRARSVASQSIIAYTMSLGAENSVAYSNNSIAIPTNFTISVTTEILPVSMTKTSVDCTMYICGDSTECSNLLLQYGSFCTQLNRALTGIAVEQDKNTQEVFAQVKQIYKTPPIKDFGGFNFSQILPDPSKPSKRSFIEDLLFNKVTLADAGFIKQYGDCLGDIAARDLICAQKFNGLTVLPPLLTDEMIAQYTSALLAGTITSGWTFGAGAALQIPFAMQMAYRFNGIGVTQNVLYENQKLIANQFNSAIGKIQDSLSSTASALGKLQDVVNQNAQALNTLVKQLSSNCGAISSVLNDILSRLDKVEAEVQIDRLITCRLQSLQTYVTQQLIRAAEIRASANLAATKMSECVLGQSKRVDFCGKGYHLMSFPQSAPHGVVFLHVTYVPAQEKNFTTAPAICHDGKAHFPREGVFVSNGTHWFVTQRNFYEPQIITTDNTFVSGNCDVVIGIVNNTVYDPLQPELDSFKEELDKYFKNHTSPDVDLGDISGINASVVNIQKEIDRLNEVAKNLNESLIDLQELGKYEQYIKGGGSGGGQIYEGKLTAEGLRFGIVASRFNHALVDRLVEGAIDAIVRHGGREEDITLVRVPGSWEIPVAAGELARKEDIDAVIAIGVLIRGATPHFDYIASEVSKGLADLSLELRKPITFGVITADTLEQAIERAGTKHGNKGWEAALSAIEMANLFKSLR

SEQ ID NO: 4411 - protein, 1371 aa, Artificial Sequence
  SARS-CoV-2/Iceland/189/2020__EPI_ISL_417709 spike protein (1-1211)(F970C_G999C) LumSynth construct
MFVFLVLLPLVSSQCVNLTTRTQLPPAYTNSFTRGVYYPDKVFRSSVLHSTQDLFLPFFSNVTWFHAIHVSGTNGTKRFDNPVLPFNDGVYFASTEKSNIIRGWIFGTTLDSKTQSLLIVNNATNVVIKVCEFQFCNDPFLGVYYHKNNKSWMESEFRVYSSANNCTFEYVSQPFLMDLEGKQGNFKNLREFVFKNIDGYFKIYSKHTPINLVRDLPQGFSALEPLVDLPIGINITRFQTLLALHRSYLTPGDSSSGWTAGAAAYYVGYLQPRTFLLKYNENGTITDAVDCALDPLSETKCTLKSFTVEKGIYQTSNFRVQPTESIVRFPNITNLCPFGEVFNATRFASVYAWNRKRISNCVADYSVLYNSASFSTFKCYGVSPTKLNDLCFTNVYADSFVIRGDEVRQIAPGQTGKIADYNYKLPDDFTGCVIAWNSNNLDSKVGGNYNYLYRLFRKSNLKPFERDISTEIYQAGSTPCNGVEGFNCYFPLQSYGFQPTNGVGYQPYRVVVLSFELLHAPATVCGPKKSTNLVKNKCVNFNFNGLTGTGVLTESNKKFLPFQQFGRDIADTTDAVRDPQTLEILDITPCSFGGVSVITPGTNTSNQVAVLYQGVNCTEVPVAIHADQLTPTWRVYSTGSNVFQTRAGCLIGAEHVNNSYECDIPIGAGICASYQTQTNSPRRARSVASQSIIAYTMSLGAENSVAYSNNSIAIPTNFTISVTTEILPVSMTKTSVDCTMYICGDSTECSNLLLQYGSFCTQLNRALTGIAVEQDKNTQEVFAQVKQIYKTPPIKDFGGFNFSQILPDPSKPSKRSFIEDLLFNKVTLADAGFTKQYGDCLGDIAARDLICAQKFNGLTVLPPLLTDEMIAQYTSALLAGTITSGWTFGAGAALQIPFAMQMAYRFNGIGVTQNVLYENQKLIANQFNSAIGKIQDSLSSTASALGKLQDVVNQNAQALNTLVKQLSSNCGAISSVLNDILSRLDKVEAEVQIDRLITCRLQSLQTYVTQQLIRAAEIRASANLAATKMSECVLGQSKRVDFCGKGYHLMSFPQSAPHGVVFLHVTYVPAQEKNFTTAPAICHDGKAHFPREGVFVSNGTHWFVTQRNFYEPQIITTDNTFVSGNCDVVIGIVNNTVYDPLQPELDSFKEELDKYFKNHTSPDVDLGDISGINASVVNIQKEIDRLNEVAKNLNESLIDLQELGKYEQYIKGGGSGGGQIYEGKLTAEGLRFGIVASRFNHALVDRLVEGAIDAIVRHGGREEDITLVRVPGSWEIPVAAGELARKEDIDAVIAIGVLIRGATPHFDYIASEVSKGLADLSLELRKPITFGVITADTLEQAIERAGTKHGNKGWEAALSAIEMANLFKSLR

SEQ ID NO: 4412 - protein, 1371 aa, Artificial Sequence
  SARS-CoV-2/Australia/NSW56/2020__EPI_ISL_417408 spike protein (1-1211)(F970C_G999C) LumSynth construct
MFVFLVLLPLVSSQCVNLTTRTQLPPAYTNSFTRGVYYPDKVFRSSVLHSTQDLFLPFFSNVTWFHAIHVSGTNGTKRFDNPVLPFNDGVYFASTEKSNIIRGWIFGTTLDSKTQSLLIVNNATNVVIKVCEFQFCNDPFLGVYYHKNNKSWMESEFRVYSSANNCTFEYVSQPFLMDLEGKQGNFKNLREFVFKNIDGYFKIYSKHTPINLVRDLPQGFSALEPLVDLPIGINITRFQTLLALHRSYLTPGDSSSGWTAGAAAYYVGYLQPRTFLLKYNENGTITDAVDCALDPLSETKCTLKSFTVEKGIYQTSNFRVQPTESIVRFPNITNLCPFGEVFNATRFASVYAWNRKRISNCVADYSVLYNSASFSTFKCYGVSPTKLNDLCFTNVYADSFVIRGDEVRQIAPGQTGKIADYNYKLPDDFTGCVIAWNSNNLDSKVGGNYNYLYRLFRKSNLKPFERDISTEIYQAGSTPCNGVEGFNCYFPLQSYGFQPTNGVGYQPYRVVVLSFELLHAPATVCGPKKSTNLVKNKCVNFNFNGLTGTGVLTESNKKFLPFQQFGRDIADTTDAVRDPQTLEILDITPCSFGGVSVITPGTNTSNQVAVLYQDVNCTEVPVAIHADQLTPTWRVYSTGSNVFQTRAGCLIGAEHVNNSYECDIPIGAGICASYQTQTNSPRRARSVASQSIIAYTMSLGAENSVAYSNNSIAIPTNFTISVTTEILPVSMTKTSVDCTMYICGDSTECSNLLLQYGSFCTQLNRALTGIAVEQDKNTQEVFAQVKQIYKTPPIKDFGGFNFSQILPDSSKPSKRSFIEDLLFNKVTLADAGFIKQYGDCLGDIAARDLICAQKFNGLTVLPPLLTDEMIAQYTSALLAGTITSGWTFGAGAALQIPFAMQMAYRFNGIGVTQNVLYENQKLIANQFNSAIGKIQDSLSSTASALGKLQDVVNQNAQALNTLVKQLSSNCGAISSVLNDILSRLDKVEAEVQIDRLITCRLQSLQTYVTQQLIRAAEIRASANLAATKMSECVLGQSKRVDFCGKGYHLMSFPQSAPHGVVFLHVTYVPAQEKNFTTAPAICHDGKAHFPREGVFVSNGTHWFVTQRNFYEPQIITTDNTFVSGNCDVVIGIVNNTVYDPLQPELDSFKEELDKYFKNHTSPDVDLGDISGINASVVNIQKEIDRLNEVAKNLNESLIDLQELGKYEQYIKGGGSGGGQIYEGKLTAEGLRFGIVASRFNHALVDRLVEGAIDAIVRHGGREEDITLVRVPGSWEIPVAAGELARKEDIDAVIAIGVLIRGATPHFDYIASEVSKGLADLSLELRKPITFGVITADTLEQAIERAGTKHGNKGWEAALSAIEMANLFKSLR

SEQ ID NO: 4413 - protein, 1371 aa, Artificial Sequence
  SARS-CoV-2/Iceland/280/2020__EPI_ISL_417608 spike protein (1-1211)(F970C_G999C) LumSynth construct
MFVFLVLLPLVSSQCVNLTTRTQLPPAYTNSFTRGVYYPDKVFRSSVLHSTQDLFLPFFSNVTWFHAIHVSGTNGTKRFDNPVLPFNDGVYFASTEKSNIIRGWIFGTTLDSKTQSLLIVNNATNVVIKVCEFQFCNDPFLGVYYHKNNKSWMESEFRVYSSANNCTFEYVSQPFLMDLEGKQGNFKNLREFVFKNIDGYFKIYSKHTPINLVRDLPQGFSALEPLVDLPIGINITRFQTLLALHRSYLTPGDSSSGWTAGAAAYYVGYLQPRTFLLKYNENGTITDAVDCALDPLSETKCTLKSFTVEKGIYQTSNFRVQPTESIVRFPNITNLCPFGEVFNATRFASVYAWNRKRISNCVADYSVLYNSASFSTFKCYGVSPTKLNDLCFTNVYADSFVIRGDEVRQIAPGQTGKIADYNYKLPDDFTGCVIAWNSNNLDSKVGGNYNYLYRLFRKSNLKPFERDISTEIYQAGSTPCNGVEGFNCYFPLQSYGFQPTNGVGYQPYRVVVLSFELLHAPATVCGPKKSTNLVKNKCVNFNFNGLTGTGVLTESNKKFLPFQQFGRDIADTTDAVRDPQTLEILDITPCSFGGVSVITPGTNTSNQVAVLYQGVNCTEVPVAIHADQLTPTWRVYSTGSNVFQTRAGCLIGAEHVNNSYECDIPIGAGICASYHTQTNSPRRARSVASQSIIAYTMSLGAENSVAYSNNSIAIPTNFTISVTTEILPVSMTKTSVDCTMYICGDSTECSNLLLQYGSFCTQLNRALTGIAVEQDKNTQEVFAQVKQIYKTPPIKDFGGFNFSQILPDPSKPSKRSFIEDLLFNKVTLADAGFIKQYGDCLGDIAARDLICAQKFNGLTVLPPLLTDEMIAQYTSALLAGTITSGWTFGAGAALQIPFAMQMAYRFNGIGVTQNVLYENQKLIANQFNSAIGKIQDSLSSTASALGKLQDVVNQNAQALNTLVKQLSSNCGAISSVLNDILSRLDKVEAEVQIDRLITCRLQSLQTYVTQQLIRAAEIRASANLAATKMSECVLGQSKRVDFCGKGYHLMSFPQSAPHGVVFLHVTYVPAQEKNFTTAPAICHDGKAHFPREGVFVSNGTHWFVTQRNFYEPQIITTDNTFVSGNCDVVIGIVNNTVYDPLQPELDSFKEELDKYFKNHTSPDVDLGDISGINASVVNIQKEIDRLNEVAKNLNESLIDLQELGKYEQYIKGGGSGGGQIYEGKLTAEGLRFGIVASRFNHALVDRLVEGAIDAIVRHGGREEDITLVRVPGSWEIPVAAGELARKEDIDAVIAIGVLIRGATPHFDYIASEVSKGLADLSLELRKPITFGVITADTLEQAIERAGTKHGNKGWEAALSAIEMANLFKSLR

SEQ ID NO: 4414 - protein, 1371 aa, Artificial Sequence; identical to SEQ ID NO: 4369
  SARS-CoV-2/Iceland/247/2020__EPI_ISL_417575 spike protein (1-1211)(F970C_G999C) LumSynth construct

SEQ ID NO: 4415 - protein, 1371 aa, Artificial Sequence
  SARS-CoV-2/Iceland/238/2020__EPI_ISL_417566 spike protein (1-1211)(F970C_G999C) LumSynth construct
MFVFLVLLPLVSSQCVNLTTRTQLPPAYTNSFTRGVYYPDKVFRSSVLHSTQDLFLPFFSNVTWFHAIHVSGTNGTKRFDNPVLPFNDGVYFASTEKSNIIRGWIFGTTLDSKTQSLLIVNNATNVVIKVCEFQFCNDPFLGVYYHKNNKSWMESEFRVYSSANNCTFEYVSQPFLMDLEGKQGNFKNLREFVFKNIDGYFKIYSKHTPINLVRDLPQGFSALEPLVDLPIGINITRFQTLLALHRSYLTPGDSSSGWTAGAAAYYVGYLQPRTFLLKYNENGTITDAVDCALDPLSETKCTLKSFTVEKGIYQTSNFRVQPTESIVRFPNITNLCPFGEVFNATRFASVYAWNRKRISNCVADYSVLYNSASFSTFKCYGVSPTKLNDLCFTNVYADSFVIRGDEVRQIAPGQTGKIADYNYKLPDDFTGCVIAWNSNNLDSKVGGNYNYLYRLFRKSNLKPFERDISTEIYQAGSTPCNGVEGFNCYFPLQSYGFQPTNGVGYQPYRVVVLSFELLHAPATVCGPKKSTNLVKNKCVNFNFNGLTGTGVLTESNKKFLPFQQFGRDIADTTDAVRDPQTLEILDITPCSFGGVSVITPGTNTSNQVAVLYQGVNCTEVPVAIHADQLTPTWRVYSTGSNVFQTRAGCLIGAEHVNNSYECDIPIGAGICASYQTQTNSPRRARSVASQSIIAYTMSLGAENSVAYSNNSIAIPTNFTISVTTEILPVSMTKTSVDCTMYICGDSTECSNLLLQYGSFCTQLNRALTGIAVEQDKNTQEVFAQVKQIYKTPPIKDFGGFNFSQILPDPSKPSKRSFIEDLLFNKVTLADVGFIKQYGDCLGDIAARDLICAQKFNGLTVLPPLLTDEMIAQYTSALLAGTITSGWTFGAGAALQIPFAMQMAYRFNGIGVTQNVLYENQKLIANQFNSAIGKIQDSLSSTASALGKLQDVVNQNAQALNTLVKQLSSNCGAISSVLNDILSRLDKVEAEVQIDRLITCRLQSLQTYVTQQLIRAAEIRASANLAATKMSECVLGQSKRVDFCGKGYHLMSFPQSAPHGVVFLHVTYVPAQEKNFTTAPAICHDGKAHFPREGVFVSNGTHWFVTQRNFYEPQIITTDNTFVSGNCDVVIGIVNNTVYDPLQPELDSFKEELDKYFKNHTSPDVDLGDISGINASVVNIQKEIDRLNEVAKNLNESLIDLQELGKYEQYIKGGGSGGGQIYEGKLTAEGLRFGIVASRFNHALVDRLVEGAIDAIVRHGGREEDITLVRVPGSWEIPVAAGELARKEDIDAVIAIGVLIRGATPHFDYIASEVSKGLADLSLELRKPITFGVITADTLEQAIERAGTKHGNKGWEAALSAIEMANLFKSLR

SEQ ID NO: 4416 - protein, 1371 aa, Artificial Sequence
  SARS-CoV-2/Greece/16/2020__EPI_ISL_418265 spike protein (1-1211)(F970C_G999C) LumSynth construct
MFVFLVLLPLVSSQCVNLTTRTQLPPAYTNSFTRGVYYPDKVFRSSVLHSTQDLFLPFFSNVTWFHAIHVSGTNGTKRFDNPVLPFNDGVYFASTEKSNIIRGWIFGTTLDSKTQSLLIVNNATNVVIKVCEFQFCNDPFLGVYYHKNNKSWMESEFRVYSSANNCTFEYVSQPFLMDLEGKQGNFKNLREFVFKNVDGYFKIYSKHTPINLVRDLPQGFSALEPLVDLPIGINITRFQTLLALHRSYLTPGDSSSGWTAGAAAYYVGYLQPRTFLLKYNENGTITDAVDCALDPLSETKCTLKSFTVEKGIYQTSNFRVQPTESIVRFPNITNLCPFGEVFNATRFASVYAWNRKRISNCVADYSVLYNSASFSTFKCYGVSPTKLNDLCFTNVYADSFVIRGDEVRQIAPGQTGKIADYNYKLPDDFTGCVIAWNSNNLDSKVGGNYNYLYRLFRKSNLKPFERDISTEIYQAGSTPCNGVEGFNCYFPLQSYGFQPTNGVGYQPYRVVVLSFELLHAPATVCGPKKSTNLVKNKCVNFNFNGLTGTGVLTESNKKFLPFQQFGRDIADTTDAVRDPQTLEILDITPCSFGGVSVITPGTNTSNQVAVLYQDVNCTEVPVAIHADQLTPTWRVYSTGSNVFQTRAGCLIGAEHVNNSYECDIPIGAGICASYQTQTNSPRRARSVASQSIIAYTMSLGAENSVAYSNNSIAIPTNFTISVTTEILPVSMTKTSVDCTMYICGDSTECSNLLLQYGSFCTQLNRALTGIAVEQDKNTQEVFAQVKQIYKTPPIKDFGGFNFSQILPDPSKPSKRSFIEDLLFNKVTLADAGFIKQYGDCLGDIAARDLICAQKFNGLTVLPPLLTDEMIAQYTSALLAGTITSGWTFGAGAALQIPFAMQMAYRFNGIGVTQNVLYENQKLIANQFNSAIGKIQDSLSSTASALGKLQDVVNQNAQALNTLVKQLSSNCGAISSVLNDILSRLDKVEAEVQIDRLITCRLQSLQTYVTQQLIRAAEIRASANLAATKMSECVLGQSKRVDFCGKGYHLMSFPQSAPHGVVFLHVTYVPAQEKNFTTAPAICHDGKAHFPREGVFVSNGTHWFVTQRNFYEPQIITTDNTFVSGNCDVVIGIVNNTVYDPLQPELDSFKEELDKYFKNHTSPDVDLGDISGINASVVNIQKEIDRLNEVAKNLNESLIDLQELGKYEQYIKGGGSGGGQIYEGKLTAEGLRFGIVASRFNHALVDRLVEGAIDAIVRHGGREEDITLVRVPGSWEIPVAAGELARKEDIDAVIAIGVLIRGATPHFDYIASEVSKGLADLSLELRKPITFGVITADTLEQAIERAGTKHGNKGWEAALSAIEMANLFKSLR

SEQ ID NO: 4417 - protein, 1371 aa, Artificial Sequence
  SARS-CoV-2/Iceland/319/2020__EPI_ISL_417648 spike protein (1-1211)(F970C_G999C) LumSynth construct
MFVFLVLLPLVSSQCVNLTTRTQLPPAYTNSFTRGVYYPDKVFRSSVLHSTQDLFLPFFSNVTWFHAIHVSGTNGTKRFDNPVLPFNDGVYFASTEKSNIIRGWIFGTTLDSKTQSLLIVNNATNVVIKVCEFQFCNDPFLGVYYHKNNKSWMESEFRVYSSANNCTFEYVSQPFLIDLEGKQGNFKNLREFVFKNIDGYFKIYSKHTPINLVRDLPQGFSALEPLVDLPIGINITRFQTLLALHRSYLTPGDSSSGWTAGAAAYYVGYLQPRTFLLKYNENGTITDAVDCALDPLSETKCTLKSFTVEKGIYQTSNFRVQPTESIVRFPNITNLCPFGEVFNATRFASVYAWNRKRISNCVADYSVLYNSASFSTFKCYGVSPTKLNDLCFTNVYADSFVIRGDEVRQIAPGQTGKIADYNYKLPDDFTGCVIAWNSNNLDSKVGGNYNYLYRLFRKSNLKPFERDISTEIYQAGSTPCNGVEGFNCYFPLQSYGFQPTNGVGYQPYRVVVLSFELLHAPATVCGPKKSTNLVKNKCVNFNFNGLTGTGVLTESNKKFLPFQQFGRDIADTTDAVRDPQTLEILDITPCSFGGVSVITPGTNTSNQVAVLYQGVNCTEVPVAIHADQLTPTWRVYSTGSNVFQTRAGCLIGAEHVNNSYECDIPIGAGICASYQTQTNSPRRARSVASQSIIAYTMSLGAENSVAYSNNSIAIPTNFTISVTTEILPVSMTKTSVDCTMYICGDSTECSNLLLQYGSFCTQLNRALTGIAVEQDKNTQEVFAQVKQIYKTPPIKDFGGFNFSQILPDPSKPSKRSFIEDLLFNKVTLADAGFIKQYGDCLGDIAARDLICAQKFNGLTVLPPLLTDEMIAQYTSALLAGTITSGWTFGAGAALQIPFAMQMAYRFNGIGVTQNVLYENQKLIANQFNSAIGKIQDSLSSTASALGKLQDVVNQNAQALNTLVKQLSSNCGAISSVLNDILSRLDKVEAEVQIDRLITCRLQSLQTYVTQQLIRAAEIRASANLAATKMSECVLGQSKRVDFCGKGYHLMSFPQSAPHGVVFLHVTYVPAQEKNFTTAPAICHDGKAHFPREGVFVSNGTHWFVTQRNFYEPQIITTDNTFVSGNCDVVIGIVNNTVYDPLQPELDSFKEELDKYFKNHTSPDVDLGDISGINASVVNIQKEIDRLNEVAKNLNESLIDLQELGKYEQYIKGGGSGGGQIYEGKLTAEGLRFGIVASRFNHALVDRLVEGAIDAIVRHGGREEDITLVRVPGSWEIPVAAGELARKEDIDAVIAIGVLIRGATPHFDYIASEVSKGLADLSLELRKPITFGVITADTLEQAIERAGTKHGNKGWEAALSAIEMANLFKSLR

SEQ ID NO: 4418 - protein, 1371 aa, Artificial Sequence
  SARS-CoV-2/Congo/94/2020__EPI_ISL_417947 spike protein (1-1211)(F970C_G999C) LumSynth construct
MFVFLVLLPLVSSQCVNLTTRTQLPPAYTNSFTRGVYYPDKVFRSSVLHSTQDLFLPFFSNVTWFHAIHVSGTNGTKRFDNPVLPFNDGVYFASTEKSNIIRGWIFGTTLDSKTQSLLIVNNATNVVIKVCEFQFCNDPFLGVYYHKNNKSWMESEFRVYSSANNCTFEYVSQPFLMDLEGKQGNFKNLREFVFKNIDGYFKIYSKHTPINLVRDLPQGFSALEPLVDLPIGINITRFQTLLALHRSYLTPGDSSSGWTAGAAAYYVGYLQPRTFLLKYNENGTITDAVDCALDPLSETKCTLKSFTVEKGIYQTSNFRVQPTESIVRFPNITNLCPFGEVFNATRFASVYAWNRKRISNCVADYSVLYNSASFSTFKCYGVSPTKLNDLCFTNVYADSFVIRGDEVRQIAPGQTGKIADYNYKLPDDFTGCVIAWNSNNLDSKVGGNYNYLYRLFRKSNLKPFERDISTEIYQAGSTPCNGVEGFNCYFPLQSYGFQPTNGVGYQPYRVVVLSFELLHAPATVCGPKKSTNLVKNKCVNFNFNGLTGTGVLTESNKKFLPFQQFGRDIADTTDAVRDPQTLEILDITPCSFGGVSVITPGTNTSNQVAVLYQGVNCTEVPVAIHADQLTPTWRVYSTGSNVFQTRAGCLIGAEHVNNSYECDIPIGAGICASYQTQTNSPRRARSVASQSIIAYTMSLGAENSVAYSNNSIAIPTNFTISVTTEILPVSMTKTSVDCTMYICGDSTECSNLLLQYGSFCTQLNRALTGIAVEQDKNTQEVFAQVKQIYKTPPIKDFGGFNFSQILPDPSKPSKRSFIEDILFNKVTLADAGFIKQYGDCLGDIAARDLICAQKFNGLTVLPPLLTDEMIAQYTSALLAGTITSGWTFGAGAALQIPFAMQMAYRFNGIGVTQNVLYENQKLIANQFNSAIGKIQDSLSSTASALGKLQDVVNQNAQALNTLVKQLSSNCGAISSVLNDILSRLDKVEAEVQIDRLITCRLQSLQTYVTQQLIRAAEIRASANLAATKMSECVLGQSKRVDFCGKGYHLMSFPQSAPHGVVFLHVTYVPAQEKNFTTAPAICHDGKAHFPREGVFVSNGTHWFVTQRNFYEPQIITTDNTFVSGNCDVVIGIVNNTVYDPLQPELDSFKEELDKYFKNHTSPDVDLGDISGINASVVNIQKEIDRLNEVAKNLNESLIDLQELGKYEQYIKGGGSGGGQIYEGKLTAEGLRFGIVASRFNHALVDRLVEGAIDAIVRHGGREEDITLVRVPGSWEIPVAAGELARKEDIDAVIAIGVLIRGATPHFDYIASEVSKGLADLSLELRKPITFGVITADTLEQAIERAGTKHGNKGWEAALSAIEMANLFKSLR

SEQ ID NO: 4419 - protein, 1371 aa, Artificial Sequence
  SARS-CoV-2/Congo/158/2020__EPI_ISL_417950 spike protein (1-1211)(F970C_G999C) LumSynth construct
MFVFLVLLPLVSSQCVNLTTRTQLPPAYTNSFTRGVYYPDKVFRSSVLHSTQDLFLPFFSNVTWFHAIHVSGTNGTKRFDNPVLPFNDGVYFASTEKSNIIRGWIFGTTLDSKTQSLLIVNNATNVVIKVCEFQFCNDPFLGVYYHKNNKSWMESEFRVYSSANNCTFEYVSQPFLMDLEGKQGNFKNLREFVFKNIDGYFKIYSKHTPINLVRDLPQGFSALEPLVDLPIGINITRFQTLLALHRSYLTPGDSSSGWTAGAAAYYVGYLQPRTFLLKYNENGTITDAVDCALDPLSETKCTLKSFTVEKGIYQTSNFRVQPTESIVRFPNITNLCPFGEVFNATRFASVYAWNRKRISNCVADYSVLYNSASFSTFKCYGVSPTKLNDLCFTNVYADSFVIRGDEVRQIAPGQTGKIADYNYKLPDDFTGCVIAWNSNNLDSKVGGNYNYLYRLFRKSNLKPFERDISTEIYQAGSTPCNGVEGFNCYFPLQSYGFQPTNGVGYQPYRVVVLSFELLHAPATVCGPKKSTNLVKNKCVNFNFNGLTGTGVLTESNKKFLPFQQFGRDIADTTDAVRDPQTLEILDITPCSFGGVSVITPGTNTSNQVAVLYQDVNCTEVPVAIHADQLTPTWRVYSTGSNVFQTRAGCLIGAEHVNNSYECDIPIGAGICASYQTQTNSPRRARSVASQSIIAYTMSLGAENSVAYSNNSIAIPTNFTISVTTEILPVSMTKTSVDCTMYICGDSTECSNLLLQYGSFCTQLNRALTGIAVEQDKNTQEVFAQVKQIYKTPPIKDFGGFNFSQILPDPSKPSKRSFIEDLLFNKVTLADAGFIKQYGDCLGDIAARDLICAQKFNGLTVLPPLLTDEMIAQYTSALLAGTITSGWTFGAGAALQIPFAMQMAYRFNGIGVTQNVLYENQKLIANQFNSAIGKIQDSLSSTASALGKLQDVVNQNAQALNTLVKQLSSNCGAISSVLNDILSRLDKVEAEVQIDRLITCRLQSLQTYVTQQLIRAAEIRASANLAATKMSECVLGQSKRVDFCGKGYHLMSFPQSAPHGVVFLHVTYVPAQEKNFTTAPAICHDGKAHFPREGVFVSNGTHWFVTQRNFYEPQIITTDNTFLSGNCDVVIGIVNNTVYDPLQPELDSFKEELDKYFKNHTSPDVDLGDISGINASVVNIQKEIDRLNEVAKNLNESLIDLQELGKYEQYIKGGGSGGGQIYEGKLTAEGLRFGIVASRFNHALVDRLVEGAIDAIVRHGGREEDITLVRVPGSWEIPVAAGELARKEDIDAVIAIGVLIRGATPHFDYIASEVSKGLADLSLELRKPITFGVITADTLEQAIERAGTKHGNKGWEAALSAIEMANLFKSLR

SEQ ID NO: 4420 - protein, 1371 aa, Artificial Sequence
  SARS-CoV-2/USA/UT-00034/2020__EPI_ISL_417977 spike protein (1-1211)(F970C_G999C) LumSynth construct
MFVFLVLLPLVSSQCVNLTTRTQLPPAYTNSFTRGVYYPDKVFRSSVLHSTQDLFLPFFSNVTWFHAIHVSGTNGTKRFDNPVLPFNDGVYFASTEKSNIIRGWIFGTTLDSKTQSLLIVNNATNVVIKVCEFQFCNDPFLGVYYYKNNKSWMESEFRVYSSANNCTFEYVSQPFLMDLEGKQGNFKNLREFVFKNIDGYFKIYSKHTPINLVRDLPQGFSALEPLVDLPIGINITRFQTLLALHRSYLTPGDSSSGWTAGAAAYYVGYLQPRTFLLKYNENGTITDAVDCALDPLSETKCTLKSFTVEKGIYQTSNFRVQPTESIVRFPNITNLCPFGEVFNATRFASVYAWNRKRISNCVADYSVLYNSASFSTFKCYGVSPTKLNDLCFTNVYADSFVIRGDEVRQIAPGQTGKIADYNYKLPDDFTGCVIAWNSNNLDSKVGGNYNYLYRLFRKSNLKPFERDISTEIYQAGSTPCNGVEGFNCYFPLQSYGFQPTNGVGYQPYRVVVLSFELLHAPATVCGPKKSTNLVKNKCVNFNFNGLTGTGVLTESNKKFLPFQQFGRDIADTTDAVRDPQTLEILDITPCSFGGVSVITPGTNTSNQVAVLYQGVNCTEVPVAIHADQLTPTWRVYSTGSNVFQTRAGCLIGAEHVNNSYECDIPIGAGICASYQTQTNSPRRARSVASQSIIAYTMSLGAENSVAYSNNSIAIPTNFTISVTTEILPVSMTKTSVDCTMYICGDSTECSNLLLQYGSFCTQLNRALTGIAVEQDKNTQEVFAQVKQIYKTPPIKDFGGFNFSQILPDPSKPSKRSFIEDLLFNKVTLADAGFIKQYGDCLGDIAARDLICAQKFNGLTVLPPLLTDEMIAQYTSALLAGTITSGWTFGAGAALQIPFAMQMAYRFNGIGVTQNVLYENQKLIANQFNSAIGKIQDSLSSTASALGKLQDVVNQNAQALNTLVKQLSSNCGAISSVLNDILSRLDKVEAEVQIDRLITCRLQSLQTYVTQQLIRAAEIRASANLAATKMSECVLGQSKRVDFCGKGYHLMSFPQSAPHGVVFLHVTYVPAQEKNFTTAPAICHDGKAHFPREGVFVSNGTHWFVTQRNFYEPQIITTDNTFVSGNCDVVIGIVNNTVYDPLQPELDSFKEELDKYFKNHTSPDVDLGDISGINASVVNIQKEIDRLNEVAKNLNESLIDLQELGKYEQYIKGGGSGGGQIYEGKLTAEGLRFGIVASRFNHALVDRLVEGAIDAIVRHGGREEDITLVRVPGSWEIPVAAGELARKEDIDAVIAIGVLIRGATPHFDYIASEVSKGLADLSLELRKPITFGVITADTLEQAIERAGTKHGNKGWEAALSAIEMANLFKSLR

SEQ ID NO: 4421 - protein, 1371 aa, Artificial Sequence
  SARS-CoV-2/USA/UT-00033/2020__EPI_ISL_417976 spike protein (1-1211)(F970C_G999C) LumSynth construct
MFVFLVLLPLVSSQCVNLTTRTQLPPAYTNSFTRGVYYPDKVFRSSVLHSTQDLFLPFFSNVTWFHAIHVSGTNGTKRFDNPVLPFNDGVYFASTEKSNIIRGWIFGTTLDSKTQSLLIVNNATNVVIKVCEFQFCNDPFLGVYYHKNNKSWMESEFRVYSSANNCTFEYVSQPFLMDLEGKQGNFKNLREFVFKNIDGYFKIYSKHTPINLVRDLPQGFSALEPLVDLPIGINITRFQTLLALHRSYLTPGDSSSGLTAGAAAYYVGYLQPRTFLLKYNENGTITDAVDCALDPLSETKCTLKSFTVEKGIYQTSNFRVQPTESIVRFPNITNLCPFGEVFNATRFASVYAWNRKRISNCVADYSVLYNSASFSTFKCYGVSPTKLNDLCFTNVYADSFVIRGDEVRQIAPGQTGKIADYNYKLPDDFTGCVIAWNSNNLDSKVGGNYNYLYRLFRKSNLKPFERDISTEIYQAGSTPCNGVEGFNCYFPLQSYGFQPTNGVGYQPYRVVVLSFELLHAPATVCGPKKSTNLVKNKCVNFNFNGLTGTGVLTESNKKFLPFQQFGRDIADTTDAVRDPQTLEILDITPCSFGGVSVITPGTNTSNQVAVLYQGVNCTEVPVAIHADQLTPTWRVYSTGSNVFQTRAGCLIGAEHVNNSYECDIPIGAGICASYQTQTNSPRRARSVASQSIIAYTMSLGAENSVAYSNNSIAIPTNFTISVTTEILPVSMTKTSVDCTMYICGDSTECSNLLLQYGSFCTQLNRALTGIAVEQDKNTQEVFAQVKQIYKTPPIKDFGGFNFSQILPDPSKPSKRSFIEDLLFNKVTLADAGFIKQYGDCLGDIAARDLICAQKFNGLTVLPPLLTDEMIAQYTSALLAGTITSGWTFGAGAALQIPFAMQMAYRFNGIGVTQNVLYENQKLIANQFNSAIGKIQDSLSSTASALGKLQDVVNQNAQALNTLVKQLSSNCGAISSVLNDILSRLDKVEAEVQIDRLITCRLQSLQTYVTQQLIRAAEIRASANLAATKMSECVLGQSKRVDFCGKGYHLMSFPQSAPHGVVFLHVTYVPAQEKNFTTAPAICHDGKAHFPREGVFVSNGTHWFVTQRNFYEPQIITTDNTFVSGNCDVVIGIVNNTVYDPLQPELDSFKEELDKYFKNHTSPDVDLGDISGINASVVNIQKEIDRLNEVAKNLNESLIDLQELGKYEQYIKGGGSGGGQIYEGKLTAEGLRFGIVASRFNHALVDRLVEGAIDAIVRHGGREEDITLVRVPGSWEIPVAAGELARKEDIDAVIAIGVLIRGATPHFDYIASEVSKGLADLSLELRKPITFGVITADTLEQAIERAGTKHGNKGWEAALSAIEMANLFKSLR

SEQ ID NO: 4422 - protein, 1371 aa, Artificial Sequence
  SARS-CoV-2/USA/WI-13/2020__EPI_ISL_417516 spike protein (1-1211)(F970C_G999C) LumSynth construct
MFVFLVLLPLVSSQCVNLTTRTQLPPAYTNSFTRGVYYPDKVFRSSVLHSTQDLFLPFFSNVTWFHAIHVSGTNGTKRFDNPVLPFNDGVYFASTEKSNIIRGWIFGTTLDSKTQSLLIVNNATNVVIKVCEFQFCNDPFLGVYYHKNNKSWMESEFRVYSSANNCTFEYVSQPFLMDLEGKQGNFKNLREFVFKNIDGYFKIYSKHTPINLVRDLPQGFSALEPLVDLPIGINITRFQTLLALHRSYLTPGDSSSGWTAGAAAYYVGYLQPRTFLLKYNENGTITDAVDCALDPLSETKCTLKSFTVEKGIYQTSNFRVLPTESIVRFPNITNLCPFGEVFNATRFASVYAWNRKRISNCVADYSVLYNSASFSTFKCYGVSPTKLNDLCFTNVYADSFVIRGDEVRQIAPGQTGKIADYNYKLPDDFTGCVIAWNSNNLDSKVGGNYNYLYRLFRKSNLKPFERDISTEIYQAGSTPCNGVEGFNCYFPLQSYGFQPTNGVGYQPYRVVVLSFELLHAPATVCGPKKSTNLVKNKCVNFNFNGLTGTGVLTESNKKFLPFQQFGRDIADTTDAVRDPQTLEILDITPCSFGGVSVITPGTNTSNQVAVLYQGVNCTEVPVAIHADQLTPTWRVYSTGSNVFQTRAGCLIGAEHVNNSYECDIPIGAGICASYQTQTNSPRRARSVASQSIIAYTMSLGAENSVAYSNNSIAIPTNFTISVTTEILPVSMTKTSVDCTMYICGDSTECSNLLLQYGSFCTQLNRALTGIAVEQDKNTQEVFAQVKQIYKTPPIKDFGGFNFSQILPDPSKPSKRSFIEDLLFNKVTLADAGFIKQYGDCLGDIAARDLICAQKFNGLTVLPPLLTDEMIAQYTSALLAGTITSGWTFGAGAALQIPFAMQMAYRFNGIGVTQNVLYENQKLIANQFNSAIGKIQDSLSSTASALGKLQDVVNQNAQALNTLVKQLSSNCGAISSVLNDILSRLDKVEAEVQIDRLITCRLQSLQTYVTQQLIRAAEIRASANLAATKMSECVLGQSKRVDFCGKGYHLMSFPQSAPHGVVFLHVTYVPAQEKNFTTAPAICHDGKAHFPREGVFVSNGTHWFVTQRNFYEPQIITTDNTFVSGNCDVVIGIVNNTVYDPLQPELDSFKEELDKYFKNHTSPDVDLGDISGINASVVNIQKEIDRLNEVAKNLNESLIDLQELGKYEQYIKGGGSGGGQIYEGKLTAEGLRFGIVASRFNHALVDRLVEGAIDAIVRHGGREEDITLVRVPGSWEIPVAAGELARKEDIDAVIAIGVLIRGATPHFDYIASEVSKGLADLSLELRKPITFGVITADTLEQAIERAGTKHGNKGWEAALSAIEMANLFKSLR

SEQ ID NO: 4423 - protein, 1370 aa, Artificial Sequence
  SARS-CoV-2/India/1-27/2020__EPI_ISL_413522 spike protein (1-1210)(F969C_G998C) LumSynth construct
MFVFLVLLPLVSSQCVNLTTRTQLPPAYTNSFTRGVYYPDKVFRSSVLHSTQDLFLPFFSNVTWFHAIHVSGTNGTKRFDNPVLPFNDGVYFASTEKSNIIRGWIFGTTLDSKTQSLLIVNNATNVVIKVCEFQFCNDPFLGVYHKNNKSWMESEFRVYSSANNCTFEYVSQPFLMDLEGKQGNFKNLREFVFKNIDGYFKIYSKHTPINLVRDLPQGFSALEPLVDLPIGINITRFQTLLALHRSYLTPGDSSSGWTAGAAAYYVGYLQPRTFLLKYNENGTITDAVDCALDPLSETKCTLKSFTVEKGIYQTSNFRVQPTESIVRFPNITNLCPFGEVFNATRFASVYAWNRKRISNCVADYSVLYNSASFSTFKCYGVSPTKLNDLCFTNVYADSFVIRGDEVIQIAPGQTGKIADYNYKLPDDFTGCVIAWNSNNLDSKVGGNYNYLYRLFRKSNLKPFERDISTEIYQAGSTPCNGVEGFNCYFPLQSYGFQPTNGVGYQPYRVVVLSFELLHAPATVCGPKKSTNLVKNKCVNFNFNGLTGTGVLTESNKKFLPFQQFGRDIADTTDAVRDPQTLEILDITPCSFGGVSVITPGTNTSNQVAVLYQDVNCTEVPVAIHADQLTPTWRVYSTGSNVFQTRAGCLIGAEHVNNSYECDIPIGAGICASYQTQTNSPRRARSVASQSIIAYTMSLGAENSVAYSNNSIAIPTNFTISVTTEILPVSMTKTSVDCTMYICGDSTECSNLLLQYGSFCTQLNRALTGIAVEQDKNTQEVFAQVKQIYKTPPIKDFGGFNFSQILPDPSKPSKRSFIEDLLFNKVTLADAGFIKQYGDCLGDIAARDLICAQKFNGLTVLPPLLTDEMIAQYTSALLAGTITSGWTFGAGAALQIPFAMQMAYRFNGIGVTQNVLYENQKLIANQFNSAIGKIQDSLSSTASALGKLQDVVNQNAQALNTLVKQLSSNCGAISSVLNDILSRLDKVEAEVQIDRLITCRLQSLQTYVTQQLIRAAEIRASANLAATKMSECVLGQSKRVDFCGKGYHLMSFPQSAPHGVVFLHVTYVPAQEKNFTTAPAICHDGKAHFPREGVFVSNGTHWFVTQRNFYEPQIITTDNTFVSGNCDVVIGIVNNTVYDPLQPELDSFKEELDKYFKNHTSPDVDLGDISGINASVVNIQKEIDRLNEVAKNLNESLIDLQELGKYEQYIKGGGSGGGQIYEGKLTAEGLRFGIVASRFNHALVDRLVEGAIDAIVRHGGREEDITLVRVPGSWEIPVAAGELARKEDIDAVIAIGVLIRGATPHFDYIASEVSKGLADLSLELRKPITFGVITADTLEQAIERAGTKHGNKGWEAALSAIEMANLFKSLR

SEQ ID NO: 4424 - protein, 1365 aa, Artificial Sequence
  SARS-CoV-2/pangolin/Guangxi/P4L/2017__EPI_ISL_410538 spike protein (1-1205)(F964C_G993C) LumSynth construct
MFVFLFVLPLVSSQCVNLTTRTGIPPGYTNSSTRGVYYPDKVFRSSILHLTQDLFLPFFSNVTWFNTINYQGGFKKFDNPVLPFNDGVYFASTEKSNIIRGWIFGTTLDARTQSLLIVNNATNVVIKVCEFQFCTDPFLGVYYHNNNKTWVENEFRVYSSANNCTFEYISQPFLMDLEGKQGNFKNLREFVFKNVDGYFKIYSKHTPIDLVRDLPRGFAALEPLVDLPIGINITRFQTLLALHRSYLTPGNLESGWTTGAAAYYVGYLQQRTFLLSYNQNGTITDAVDCSLDPLSETKCTLKSLTVEKGIYQTSNFRVQPTISIVRFPNITNLCPFGEVFNASKFASVYAWNRKRISNCVADYSVLYNSTSFSTFKCYGVSPTKLNDLCFTNVYADSFVVKGDEVRQIAPGQTGVIADYNYKLPDDFTGCVIAWNSVKQDALTGGNYGYLYRLFRKSKLKPFERDISTEIYQAGSTPCNGQVGLNCYYPLERYGFHPTTGVNYQPFRVVVLSFELLNGPATVCGPKLSTTLVKDKCVNFNFNGLTGTGVLTTSKKQFLPFQQFGRDISDTTDAVRDPQTLEILDITPCSFGGVSVITPGTNTSNQVAVLYQDVNCTEVPMAIHAEQLTPAWRVYSAGANVFQTRAGCLVGAEHVNNSYECDIPVGAGICASYHSMSSLRSVNQRSIIAYTMSLGAENSVAYSNNSIAIPTNFTISVTTEILPVSMTKTSVDCTMYICGDSIECSNLLLQYGSFCTQLNRALTGIAVEQDKNTQEVFAQVKQIYKTPPIKDFGGFNFSQILPDPSKPSKRSFIEDLLFNKVTLADAGFIKQYGDCLGDIAARDLICAQKFNGLTVLPPLLTDEMIAQYTSALLAGTITSGWTFGAGAALQIPFAMQMAYRFNGIGVTQNVLYENQKLIANQFNSAIGKIQDSLSSTASALGKLQDVVNQNAQALNTLVKQLSSNCGAISSVLNDILSRLDKVEAEVQIDRLITCRLQSLQTYVTQQLIRAAEIRASANLAATKMSECVLGQSKRVDFCGKGYHLMSFPQSAPHGVVFLHVTYVPAQEKNFTTAPAICHEGKAHFPREGVFVSNGTHWFITQRNFYEPQIITTDNTFVSGSCDVVIGIVNNTVYDPLQPELDSFKEELDKYFKNHTSPDVDLGDISGINASVVNIQKEIDRLNEVAKNLNESPIDLQELGKYEQYIKGGGSGGGQIYEGKLTAEGLRFGIVASRFNHALVDRLVEGAIDAIVRHGGREEDITLVRVPGSWEIPVAAGELARKEDIDAVIAIGVLIRGATPHFDYIASEVSKGLADLSLELRKPITFGVITADTLEQAIERAGTKHGNKGWEAALSAIEMANLFKSLR

SEQ ID NO: 4425 - protein, 1365 aa, Artificial Sequence
  SARS-CoV-2/pangolin/Guangxi/P5L/2017__EPI_ISL_410540 spike protein (1-1205)(F964C_G993C) LumSynth construct
MFVFLFVLPLVSSQCVNLTTRTGIPPGYTNSSTRGVYYPDKVFRSSILHLTQDLFLPFFSNVTWFNTINYQGGFKKFDNPVLPFNDGVYFASTEKSNIIRGWIFGTTLDARTQSLLIVNNATNVVIKVCEFQFCTDPFLGVYYHNNNKTWVENEFRVYSSANNCTFEYISQPFLMDLEGKQGNFKNLREFVFKNVDGYFKIYSKHTPIDLVRDLPRGFAALEPLVDLPIGINITRFQTLLALHRSYLTPGKLESGWTTGAAAYYVGYLQQRTFLLSYNQNGTITDAVDCSLDPLSETKCTLKSLTVEKGIYQTSNFRVQPTISIVRFPNITNLCPFGEVFNASKFASVYAWNRKRISNCVADYSVLYNSTSFSTFKCYGVSPTKLNDLCFTNVYADSFVVKGDEVRQIAPGQTGVIADYNYKLPDDFTGCVIAWNSVKQDALTGGNYGYLYRLFRKSKLKPFERDISTEIYQAGSTPCNGQVGLNCYYPLERYGFHPTTGVNYQPFRVVVLSFELLNGPATVCGPKLSTTLVKDKCVNFNFNGLTGTGVLTTSKKQFLPFQQFGRDISDTTDAVRDPQTLEILDITPCSFGGVSVITPGTNTSNQVAVLYQDVNCTEVPMAIHAEQLTPAWRVYSAGANVFQTRAGCLVGAEHVNNSYECDIPVGAGICASYHSMSSFRSVNQRSIIAYTMSLGAENSVAYSNNSIAIPTNFTISVTTEILPVSMTKTSVDCTMYICGDSIECSNLLLQYGSFCTQLNRALTGIAVEQDKNTQEVFAQVKQIYKTPPIKDFGGFNFSQILPDPSKPSKRSFIEDLLFNKVTLADAGFIKQYGDCLGDIAARDLICAQKFNGLTVLPPLLTDEMIAQYTSALLAGTITSGWTFGAGAALQIPFAMQMAYRFNGIGVTQNVLYENQKLIANQFNSAIGKIQDSLSSTASALGKLQDVVNQNAQALNTLVKQLSSNCGAISSVLNDILSRLDKVEAEVQIDRLITCRLQSLQTYVTQQLIRAAEIRASANLAATKMSECVLGQSKRVDFCGKGYHLMSFPQSAPHGVVFLHVTYVPAQEKNFTTAPAICHEGKAHFPREGVFVSNGTHWFITQRNFYEPQIITTDNTFVSGSCDVVIGIVNNTVYDPLQPELDSFKEELDKYFKNHTSPDVDLGDISGINASVVNIQKEIDRLNEVAKNLNESLIDLQELGKYEQYIKGGGSGGGQIYEGKLTAEGLRFGIVASRFNHALVDRLVEGAIDAIVRHGGREEDITLVRVPGSWEIPVAAGELARKEDIDAVIAIGVLIRGATPHFDYIASEVSKGLADLSLELRKPITFGVITADTLEQAIERAGTKHGNKGWEAALSAIEMANLFKSLR

SEQ ID NO: 4426 - protein, 1365 aa, Artificial Sequence
  SARS-CoV-2/pangolin/Guangxi/P5E/2017__EPI_ISL_410541 spike protein (1-1205)(F964C_G993C) LumSynth construct
MFVFLFVLPLVSSQCVNLTTRTGIPPGYTNSSTRGVYYPDKVFRSSILHLTQDLFLPFFSNVTWFNTITYQGGSKKFDNPVLPFNDGVYFASTEKSNIIRGWIFGTTLDARTQSLLIVNNATNVVIKVCEFQFCTDPFLGVYYHNNNKTWVENEFRVYSSANNCTFEYISQPFLMDLEGKQGNFKNLREFVFKNVDGYFKIYSKHTPIDLVRDLPRGFAALEPLVDLPIGINITRFQTLLALHRSYLTPGKLESGWTTGAAAYYVGYLQQRTFLLSYNQNGTITDAVDCSLDPLSETKCTLKSLTVEKGIYQTSNFRVQPTISIVRFPNITNLCPFGEVFNASKFASVYAWNRKRISNCVADYSVLYNSTSFSTFKCYGVSPTKLNDLCFTNVYADSFVVKGDEVRQIAPGQTGVIADYNYKLPDDFTGCVIAWNSVKQDALTGDNYGYLYRLFRKSKLKPFERDISTEIYQAGSTPCNGQVGLNCYYPLERYGFHPTTGVNYQPFRVVVLSFELLNGPATVCGPKLSTTLVKDKCVNFNFNGLTGTGVLTTSKKQFLPFQQFGRDISDTTDAVRDPQTLEILDITPCSFGGVSVITPGTNTSNQVAVLYQDVNCTEVPMAIHAEQLTPAWRVYSAGANVFQTRAGCLVGAEHVNNSYECDIPVGAGICASYHSMSSFRSVNQRSIIAYTMSLGAENSVAYSNNSIAIPTNFTISVTTEILPVSMTKTSVDCTMYICGDSIECSNLLLQYGSFCTQLNRALTGIAVEQDKNTQEVFAQVKQIYKTPPIKDFGGFNFSQILPDPSKPSKRSFIEDLLFNKVTLADAGFIKQYGDCLGDIAARDLICAQKFNGLTVLPPLLTDEMIAQYTSALLAGTITSGWTFGAGAALQIPFAMQMAYRFNGIGVTQNVLYENQKLIANQFNSAIGKIQDSLSSTASALGKLQDVVNQNAQALNTLVKQLSSNCGAISSVLNDILSRLDKVEAEVQIDRLITCRLQSLQTYVTQQLIRAAEIRASANLAATKMSECVLGQSKRVDFCGKGYHLMSFPQSAPHGVVFLHVTYVPAQEKNFTTAPAICHEGKAHFPREGVFVSNGTHWFITQRNFYEPQIITTDNTFVSGSCDVVIGIVNNTVYDPLQPELDSFKEELDKYFKNHTSPDVDLGDISGINASVVNIQKEIDRLNEVAKNLNESLIDLQELGKYEQYIKGGGSGGGQIYEGKLTAEGLRFGIVASRFNHALVDRLVEGAIDAIVRHGGREEDITLVRVPGSWEIPVAAGELARKEDIDAVIAIGVLIRGATPHFDYIASEVSKGLADLSLELRKPITFGVITADTLEQAIERAGTKHGNKGWEAALSAIEMANLFKSLR

SEQ ID NO: 4427 - protein, 1363 aa, Artificial Sequence
  SARS-CoV-2/pangolin/Guangxi/P1E/2017__EPI_ISL_410539 spike protein (1-1203)(F962C_G991C) LumSynth construct
MFVFLFVLPLVSSQCVNLTTRTGIQPGYTNSSTRGVYYPDKVFRSSILHLTQDLFLPFFSNVTWFNTINYQGGFKKFDNPVLPFNDGVYFASTEKSNIIRGWIFGTTLDARTQSLLIVNNATNVVIKVCEFQFCTDPFLGVYYHNNNKTWVENEFRVYSSANNCTFEYISQPFLMDLEGKQGNFKNLREFVFKNVDGYFKIYSKHTPIDLVRDLPRGFAALEPLVDLPIGINITRFQTLLALHRSYLTPGKLESGWTTGAAAYYVGYLQQRTFLLSYNQNGTITDAVDCSLDPLSETKCTLKSLTVEKGIYQTSNFRVQPTISIVRFPNITNLCPFGEVFNASKFASVYAWNRKRISNCVADYSVLYNSTSFSTFKCYGVSPTKLNDLCFTNVYADSFVVKGDEVRQIAPGQTGVIADYNYKLPDDFTGCVIAWNSVKQDALTGGNYLYRLFRKSKLKPFERDISTEIYQAGSTPCNGQVGLNCYYPLERYGFHPTTGVNYQPFRVVVLSFELLNGPATVCGPKLSTTLVKDKCVNFNFNGLTGTGVLTTSKKQFLPFQQFGRDISDTTDAVRDPQTLEILDITPCSFGGVSVITPGTNTSNQVAVLYQDVNCTEVPMAIHAEQLTPAWRVYSAGANVFQTRAGCLVGAEHVNNSYECDIPVGAGICASYHSMSSLRSVNQRSIIAYTMSLGAENSVAYSNNSIAIPTNFTISVTTEILPVSMTKTSVDCTMYICGDSIECSNLLLQYGSFCTQLNRALTGIAVEQDKNTQEVFAQVKQIYKTPPIKDFGGFNFSQILPDPSKPSKRSFIEDLLFNKVTLADAGFIKQYGDCLGDIAARDLICAQKFNGLTVLPPLLTDEMIAQYTSALLAGTITSGWTFGAGAALQIPFAMQMAYRFNGIGVTQNVLYENQKLIANQFNSAIGKIQDSLSSTASALGKLQDVVNQNAQALNTLVKQLSSNCGAISSVLNDILSRLDKVEAEVQIDRLITCRLQSLQTYVTQQLIRAAEIRASANLAATKMSECVLGQSKRVDFCGKGYHLMSFPQSAPHGVVFLHVTYVPAQEKNFTTAPAICHEGKAHFPREGVFVSNGTHWFITQRNFYEPQIITTDNTFVSGSCDVVIGIVNNTVYDPLQPELDSFKEELDKYFKNHTSPDVDLGDISGINASVVNIQKEIDRLNEVAKNLNESLIDLQELGKYEQYIKGGGSGGGQIYEGKLTAEGLRFGIVASRFNHALVDRLVEGAIDAIVRHGGREEDITLVRVPGSWEIPVAAGELARKEDIDAVIAIGVLIRGATPHFDYIASEVSKGLADLSLELRKPITFGVITADTLEQAIERAGTKHGNKGWEAALSAIEMANLFKSLR

SEQ ID NO: 4428 - protein, 1371 aa, Artificial Sequence
  SARS-CoV-2/Wuhan/WIV05/2019__EPI_ISL_402128 spike protein (1-1211)(A972C_R995C) LumSynth construct
MFVFLVLLPLVSSQCVNLTTRTQLPPAYTNSFTRGVYYPDKVFRSSVLHSTQDLFLPFFSNVTWFHAIHVSGTNGTKRFDNPVLPFNDGVYFASTEKSNIIRGWIFGTTLDSKTQSLLIVNNATNVVIKVCEFQFCNDPFLGVYYHKNNKSWMESEFRVYSSANNCTFEYVSQPFLMDLEGKQGNFKNLREFVFKNIDGYFKIYSKHTPINLVRDLPQGFSALEPLVDLPIGINITRFQTLLALHRSYLTPGDSSSGWTAGAAAYYVGYLQPRTFLLKYNENGTITDAVDCALDPLSETKCTLKSFTVEKGIYQTSNFRVQPTESIVRFPNITNLCPFGEVFNATRFASVYAWNRKRISNCVADYSVLYNSASFSTFKCYGVSPTKLNDLCFTNVYADSFVIRGDEVRQIAPGQTGKIADYNYKLPDDFTGCVIAWNSNNLDSKVGGNYNYLYRLFRKSNLKPFERDISTEIYQAGSTPCNGVEGFNCYFPLQSYGFQPTNGVGYQPYRVVVLSFELLHAPATVCGPKKSTNLVKNKCVNFNFNGLTGTGVLTESNKKFLPFQQFGRDIADTTDAVRDPQTLEILDITPCSFGGVSVITPGTNTSNQVAVLYQDVNCTEVPVAIHADQLTPTWRVYSTGSNVFQTRAGCLIGAEHVNNSYECDIPIGAGICASYQTQTNSPRRARSVASQSIIAYTMSLGAENSVAYSNNSIAIPTNFTISVTTEILPVSMTKTSVDCTMYICGDSTECSNLLLQYGSFCTQLNRALTGIAVEQDKNTQEVFAQVKQIYKTPPIKDFGGFNFSQILPDPSKPSKRSFIEDLLFNKVTLADAGFIKQYGDCLGDIAARDLICAQKFNGLTVLPPLLTDEMIAQYTSALLAGTITSGWTFGAGAALQIPFAMQMAYRFNGIGVTQNVLYENQKLIANQFNSAIGKIQDSLSSTASALGKLQDVVNQNAQALNTLVKQLSSNFGCISSVLNDILSRLDKVEAEVQIDCLITGRLQSLQTYVTQQLIRAAEIRASANLAATKMSECVLGQSKRVDFCGKGYHLMSFPQSAPHGVVFLHVTYVPAQEKNFTTAPAICHDGKAHFPREGVFVSNGTHWFVTQRNFYEPQIITTDNTFVSGNCDVVIGIVNNTVYDPLQPELDSFKEELDKYFKNHTSPDVDLGDISGINASVVNIQKEIDRLNEVAKNLNESLIDLQELGKYEQYIKGGGSGGGQIYEGKLTAEGLRFGIVASRFNHALVDRLVEGAIDAIVRHGGREEDITLVRVPGSWEIPVAAGELARKEDIDAVIAIGVLIRGATPHFDYIASEVSKGLADLSLELRKPITFGVITADTLEQAIERAGTKHGNKGWEAALSAIEMANLFKSLR

SEQ ID NO: 4429 - protein, 1367 aa, Artificial Sequence
  SARS-CoV-2/bat/Yunnan/RaTG13/2013__EPI_ISL_402131 spike protein (1-1207)(A968C_R991C) LumSynth construct
MFVFLVLLPLVSSQCVNLTTRTQLPPAYTNSSTRGVYYPDKVFRSSVLHLTQDLFLPFFSNVTWFHAIHVSGTNGIKRFDNPVLPFNDGVYFASTEKSNIIRGWIFGTTLDSKTQSLLIVNNATNVVIKVCEFQFCNDPFLGVYYHKNNKSWMESEFRVYSSANNCTFEYVSQPFLMDLEGKQGNFKNLREFVFKNIDGYFKIYSKHTPINLVRDLPPGFSALEPLVDLPIGINITRFQTLLALHRSYLTPGDSSSGWTAGAAAYYVGYLQPRTFLLKYNENGTITDAVDCALDPLSETKCTLKSFTVEKGIYQTSNFRVQPTDSIVRFPNITNLCPFGEVFNATTFASVYAWNRKRISNCVADYSVLYNSTSFSTFKCYGVSPTKLNDLCFTNVYADSFVITGDEVRQIAPGQTGKIADYNYKLPDDFTGCVIAWNSKHIDAKEGGNFNYLYRLFRKANLKPFERDISTEIYQAGSKPCNGQTGLNCYYPLYRYGFYPTDGVGHQPYRVVVLSFELLNAPATVCGPKKSTNLVKNKCVNFNFNGLTGTGVLTESNKKFLPFQQFGRDIADTTDAVRDPQTLEILDITPCSFGGVSVITPGTNASNQVAVLYQDVNCTEVPVAIHADQLTPTWRVYSTGSNVFQTRAGCLIGAEHVNNSYECDIPIGAGICASYQTQTNSRSVASQSIIAYTMSLGAENSVAYSNNSIAIPTNFTISVTTEILPVSMTKTSVDCTMYICGDSTECSNLLLQYGSFCTQLNRALTGIAVEQDKNTQEVFAQVKQIYKTPPIKDFGGFNFSQILPDPSKPSKRSFIEDLLFNKVTLADAGFIKQYGDCLGDIAARDLICAQKFNGLTVLPPLLTDEMIAQYTSALLAGTITSGWTFGAGAALQIPFAMQMAYRFNGIGVTQNVLYENQKLIANQFNSAIGKIQDSLSSTASALGKLQDVVNQNAQALNTLVKQLSSNFGCISSVLNDILSRLDKVEAEVQIDCLITGRLQSLQTYVTQQLIRAAEIRASANLAATKMSECVLGQSKRVDFCGKGYHLMSFPQSAPHGVVFLHVTYVPAQEKNFTTAPAICHDGKAHFPREGVFVSNGTHWFVTQRNFYEPQIITTDNTFVSGSCDVVIGIVNNTVYDPLQPELDSFKEELDKYFKNHTSPDVDLGDISGINASVVNIQKEIDRLNEVAKNLNESLIDLQELGKYEQYIKGGGSGGGQIYEGKLTAEGLRFGIVASRFNHALVDRLVEGAIDAIVRHGGREEDITLVRVPGSWEIPVAAGELARKEDIDAVIAIGVLIRGATPHFDYIASEVSKGLADLSLELRKPITFGVITADTLEQAIERAGTKHGNKGWEAALSAIEMANLFKSLR

SEQ ID NO: 4430 - protein, 1371 aa, Artificial Sequence
  SARS-CoV-2/Wuhan/HBCDC-HB-01/2019__EPI_ISL_402132 spike protein (1-1211)(A972C_R995C) LumSynth construct
MFVFLVLLPLVSSQCVNLTTRTQLPPAYTNSITRGVYYPDKVFRSSVLHSTQDLFLPFFSNVTWFHAIHVSGTNGTKRFDNPVLPFNDGVYFASTEKSNIIRGWIFGTTLDSKTQSLLIVNNATNVVIKVCEFQFCNDPFLGVYYHKNNKSWMESEFRVYSSANNCTFEYVSQPFLMDLEGKQGNFKNLREFVFKNIDGYFKIYSKHTPINLVRDLPQGFSALEPLVDLPIGINITRFQTLLALHRSYLTPGDSSSGWTAGAAAYYVGYLQPRTFLLKYNENGTITDAVDCALDPLSETKCTLKSFTVEKGIYQTSNFRVQPTESIVRFPNITNLCPFGEVFNATRFASVYAWNRKRISNCVADYSVLYNSASFSTFKCYGVSPTKLNDLCFTNVYADSFVIRGDEVRQIAPGQTGKIADYNYKLPDDFTGCVIAWNSNNLDSKVGGNYNYLYRLFRKSNLKPFERDISTEIYQAGSTPCNGVEGFNCYFPLQSYGFQPTNGVGYQPYRVVVLSFELLHAPATVCGPKKSTNLVKNKCVNFNFNGLTGTGVLTESNKKFLPFQQFGRDIADTTDAVRDPQTLEILDITPCSFGGVSVITPGTNTSNQVAVLYQDVNCTEVPVAIHADQLTPTWRVYSTGSNVFQTRAGCLIGAEHVNNSYECDIPIGAGICASYQTQTNSPRRARSVASQSIIAYTMSLGAENSVAYSNNSIAIPTNFTISVTTEILPVSMTKTSVDCTMYICGDSTECSNLLLQYGSFCTQLNRALTGIAVEQDKNTQEVFAQVKQIYKTPPIKDFGGFNFSQILPDPSKPSKRSFIEDLLFNKVTLADAGFIKQYGDCLGDIAARDLICAQKFNGLTVLPPLLTDEMIAQYTSALLAGTITSGWTFGAGAALQIPFAMQMAYRFNGIGVTQNVLYENQKLIANQFNSAIGKIQDSLSSTASALGKLQDVVNQNAQALNTLVKQLSSNFGCISSVLNDILSRLDKVEAEVQIDCLITGRLQSLQTYVTQQLIRAAEIRASANLAATKMSECVLGQSKRVDFCGKGYHLMSFPQSAPHGVVFLHVTYVPAQEKNFTTAPAICHDGKAHFPREGVFVSNGTHWFVTQRNFYEPQIITTDNTFVSGNCDVVIGIVNNTVYDPLQPELDSFKEELDKYFKNHTSPDVDLGDISGINASVVNIQKEIDRLNEVAKNLNESLIDLQELGKYEQYIKGGGSGGGQIYEGKLTAEGLRFGIVASRFNHALVDRLVEGAIDAIVRHGGREEDITLVRVPGSWEIPVAAGELARKEDIDAVIAIGVLIRGATPHFDYIASEVSKGLADLSLELRKPITFGVITADTLEQAIERAGTKHGNKGWEAALSAIEMANLFKSLR

SEQ ID NO: 4431 - protein, 1371 aa, Artificial Sequence
  SARS-CoV-2/Guangdong/20SF028/2020__EPI_ISL_403936 spike protein (1-1211)(A972C_R995C) LumSynth construct
MFVFLVLLPLVSSQCVNLTTRTQLPPAYTNSFTRGVYYPDKVFRSSVLYSTQDLFLPFFSNVTWFHAIHVSGTNGTKRFDNPVLPFNDGVYFASTEKSNIIRGWIFGTTLDSKTQSLLIVNNATNVVIKVCEFQFCNDPFLGVYYHKNNKSWMESEFRVYSSANNCTFEYVSQPFLMDLEGKQGNFKNLREFVFKNIDGYFKIYSKHTPINLVRDLPQGFSALEPLVDLPIGINITRFQTLLALHRSYLTPGDSSSGWTAGAAAYYVGYLQPRTFLLKYNENGTITDAVDCALDPLSETKCTLKSFTVEKGIYQTSNFRVQPTESIVRFPNITNLCPFGEVFNATRFASVYAWNRKRISNCVADYSVLYNSASFSTFKCYGVSPTKLNDLCFTNVYADSFVIRGDEVRQIAPGQTGKIADYNYKLPDDFTGCVIAWNSNNLDSKVGGNYNYLYRLFRKSNLKPFERDISTEIYQAGSTPCNGVEGFNCYFPLQSYGFQPTNGVGYQPYRVVVLSFELLHAPATVCGPKKSTNLVKNKCVNFNFNGLTGTGVLTESNKKFLPFQQFGRDIADTTDAVRDPQTLEILDITPCSFGGVSVITPGTNTSNQVAVLYQDVNCTEVPVAIHADQLTPTWRVYSTGSNVFQTRAGCLIGAEHVNNSYECDIPIGAGICASYQTQTNSPRRARSVASQSIIAYTMSLGAENSVAYSNNSIAIPTNFTISVTTEILPVSMTKTSVDCTMYICGDSTECSNLLLQYGSFCTQLNRALTGIAVEQDKNTQEVFAQVKQIYKTPPIKDFGGFNFSQILPDPSKPSKRSFIEDLLFNKVTLADAGFIKQYGDCLGDIAARDLICAQKFNGLTVLPPLLTDEMIAQYTSALLAGTITSGWTFGAGAALQIPFAMQMAYRFNGIGVTQNVLYENQKLIANQFNSAIGKIQDSLSSTASALGKLQDVVNQNAQALNTLVKQLSSNFGCISSVLNDILSRLDKVEAEVQIDCLITGRLQSLQTYVTQQLIRAAEIRASANLAATKMSECVLGQSKRVDFCGKGYHLMSFPQSAPHGVVFLHVTYVPAQEKNFTTAPAICHDGKAHFPREGVFVSNGTHWFVTQRNFYEPQIITTDNTFVSGNCDVVIGIVNNTVYDPLQPELDSFKEELDKYFKNHTSPDVDLGDISGINASVVNIQKEIDRLNEVAKNLNESLIDLQELGKYEQYIKGGGSGGGQIYEGKLTAEGLRFGIVASRFNHALVDRLVEGAIDAIVRHGGREEDITLVRVPGSWEIPVAAGELARKEDIDAVIAIGVLIRGATPHFDYIASEVSKGLADLSLELRKPITFGVITADTLEQAIERAGTKHGNKGWEAALSAIEMANLFKSLR

SEQ ID NO: 4432 - protein, 1371 aa, Artificial Sequence
  SARS-CoV-2/Shenzhen/SZTH-001/2020__EPI_ISL_406592 spike protein (1-1211)(A972C_R995C) LumSynth construct
MFVFLVLLPLVSSQCVNLTTRTQLPPAYTNSFTRGVYYPDKVFRSSVLHSTQDLFLPFFSNVTWFHAIHVSGTNGTKRFDNPVLPFNDGVYFASTEKSNIIRGWIFGTTLDSKTQSLLIVNNATNVVIKVCEFQFCNDPFLGVYYHKNNKSWMESEFRVYSSANNCTFEYVSQPFLMDLEGKQGNFKNLREFVFKNIDGYFKIYSKHTPINLVRDLPQGFSALEPLVDLPIGINITRFQTLLALHRSYLTPGDSSSGWTAGAAAYYVGYLQPRTFLLKYNENGTITDAVDCALDPLSETKCTLKSFTVEKGIYQTSNFRVQPTESIVRFPNITNLCPFGEVFNATRFASVYAWNRKRISNCVADYSVLYNSASFSTFKCYGVSPTKLNDLCFTNVYADSFVIRGDEVRQIAPGQTGKIADYNYKLPDDFTGCVIAWNSNNLDSKVGGNYNYLYRLFRKSNLKPFERDISTEIYQAGSTPCNGVEGFNCYFPLQSYGFQPTNGVGYQPYRVVVLSFELLHAPATVCGPKKSTNLVKNKCVNFNFNGLTGTGVLTESNKKFLPFQQFGRDIADTTDAVRDPQTLEILDITPCSFGGVSVITPGTNTSNQVAVLYQDVNCTEVPVAIHADQLTPTWRVYSTGSNVFQTRAGCLIGAEHVNNSYECDIPIGAGICASYQTQTNSPRRARSVASQSIIAYTMSLGAENSVAYSNNSIAIPTNFTISVTTEILPVSMTKTSVDCTMYICGDSTECSNLLLQYGSFCTQLNRALTGIAVEQDKNTQEVFAQVKQIYKTPPIKDFGGFNFSQILPDPSKPSKRSFIEDLLFNKVTLADAGFIKQYGDCLGDIAARDLICAQKFNGLTVLPPLLTDEMIAQYTSALLAGTITSGWTFGAGAALQIPFAMQMAYRFNGIGVTQNVLYENQKLIANQFNSAIGKIQDSLSSTASALGKLQDVVNQNAQALNTLVKQLSSNFGCISSVLNDILSRLDKVEAEVQIDCLITGRLQSLQTYVTQQLIRAAEIRASANLAATKMSECVLGQSKRVDFCGKGYHLMSFPQSAPHGVVFLHVTYVPAQEKNFTTAPAICHDGKAHFPREGVFVSNGTHWFVTQRNFYEPQIITTDNTFVSGNCDVLIGIVNNTVYDPLQPELDSFKEELDKYFKNHTSPDVDLGDISGINASVVNIQKEIDRLNEVAKNLNESLIDLQELGKYEQYIKGGGSGGGQIYEGKLTAEGLRFGIVASRFNHALVDRLVEGAIDAIVRHGGREEDITLVRVPGSWEIPVAAGELARKEDIDAVIAIGVLIRGATPHFDYIASEVSKGLADLSLELRKPITFGVITADTLEQAIERAGTKHGNKGWEAALSAIEMANLFKSLR

SEQ ID NO: 4433 - protein, 1371 aa, Artificial Sequence
  SARS-CoV-2/Shenzhen/SZTH-004/2020__EPI_ISL_406595 spike protein (1-1211)(A972C_R995C) LumSynth construct
MFVFLVLLPLVSSQCVNLTTRTQLPPAYTNSFTRGVYYPDKVFRSSVLHSTQDLFLPFFSNVTWFHAIHVSGTNGTKRFDNPVLPFNDGVYFASTEKSNIIRGWIFGTTLDSKTQSLLIVNNATNVVIKVCEFQFCNDPFLGVYYHKNNKSWMESEFRVYSSANNCTFEYVSQPFLMDLEGKQGNFKNLREFVFKNIDGYFKIYSKHTPINLVRDLPQGFSALEPLVDLPIGINITRFQTLLALHRSYLTPGDSSSGWTAGAAAYYVGYLQPRTFLLKYNENGTITDAVDCALDPLSETKCTLKSFTVEKGIYQTSNFRVQPTESIVRFPNITNLCPFGEVFNATRFASVYAWDRKRISNCVAYYSVLYNSASFSTFKCYGVSPTKLNDLCFTNVYADSFVIRGDEVRQIAPGQTGKIADYNYKLPDDFTGCVIAWNSNNLDSKVGGNYNYLYRLFRKSNLKPFERDISTEIYQAGSTPCNGVEGFNCYFPLQSYGFQPTNGVGYQPYRVVVLSFELLHAPATVCGPKKSTNLVKNKCVNFNFNGLTGTGVLTESNKKFLPFQQFGRDIADTTDAVRDPQTLEILDITPCSFGGVSVITPGTNTSNQVAVLYQDVNCTEVPVAIHADQLTPTWRVYSTGSNVFQTRAGCLIGAEHVNNSYECDIPIGAGICASYQTQTNSPRRARSVASQSIIAYTMSLGAENSVAYSNNSIAIPTNFTISVTTEILPVSMTKTSVDCTMYICGDSTECSNLLLQYGSFCTQLNRALTGIAVEQDKNTQEVFAQVKQIYKTPPIKDFGGFNFSQILPDPSKPSKRSFIEDLLFNKVTLADAGFIKQYGDCLGDIAARDLICAQKFNGLTVLPPLLTDEMIAQYTSALLAGTITSGWTFGAGAALQIPFAMQMAYRFNGIGVTQNVLYENQKLIANQFNSAIGKIQDSLSSTASALGKLQDVVNQNAQALNTLVKQLSSNFGCISSVLNDILSRLDKVEAEVQIDCLITGRLQSLQTYVTQQLIRAAEIRASANLAATKMSECVLGQSKRVDFCGKGYHLMSFPQSAPHGVVFLHVTYVPAQEKNFTTAPAICHDGKAHFPREGVFVSNGTHWFVTQRNFYEPQIITTDNTFVSGNCDVVIGIVNNTVYDPLQPELDSFKEELDKYFKNHTSPDVDLGDISGINASVVNIQKEIDRLNEVAKNLNESLIDLQELGKYEQYIKGGGSGGGQIYEGKLTAEGLRFGIVASRFNHALVDRLVEGAIDAIVRHGGREEDITLVRVPGSWEIPVAAGELARKEDIDAVIAIGVLIRGATPHFDYIASEVSKGLADLSLELRKPITFGVITADTLEQAIERAGTKHGNKGWEAALSAIEMANLFKSLR

SEQ ID NO: 4434 - protein, 1371 aa, Artificial Sequence
  SARS-CoV-2/France/IDF0372/2020__EPI_ISL_406596 spike protein (1-1211)(A972C_R995C) LumSynth construct
MFVFLVLLPLVSSQCVNLTTRTQLPPAYTNSFTRGVYYPDKVFRSSVLHSTQDLFLPFFSNVTWFHAIHVSGTNGTKRFDNPVLPFNDGVYFASTEKSNIIRGWIFGTTLDSKTQSLLIVNNATNVVIKVCEFQFCNDPFLGVYYHKNNKSWMESEFRVYSSANNCTFEYVSQPFLMDLEGKQGNFKNLREFVFKNIDGYFKIYSKHTPINLVRDLPQGFSALEPLVDLPIGINITRFQTLLALHRSYLTPGDSSSGWTAGAAAYYVGYLQPRTFLLKYNENGTITDAVDCALDPLSETKCTLKSFTVEKGIYQTSNFRVQPTESIVRFPNITNLCPFGEVFNATRFASVYAWNRKRISNCVADYSFLYNSASFSTFKCYGVSPTKLNDLCFTNVYADSFVIRGDEVRQIAPGQTGKIADYNYKLPDDFTGCVIAWNSNNLDSKVGGNYNYLYRLFRKSNLKPFERDISTEIYQAGSTPCNGVEGFNCYFPLQSYGFQPTNGVGYQPYRVVVLSFELLHAPATVCGPKKSTNLVKNKCVNFNFNGLTGTGVLTESNKKFLPFQQFGRDIADTTDAVRDPQTLEILDITPCSFGGVSVITPGTNTSNQVAVLYQDVNCTEVPVAIHADQLTPTWRVYSTGSNVFQTRAGCLIGAEHVNNSYECDIPIGAGICASYQTQTNSPRRARSVASQSIIAYTMSLGAENSVAYSNNSIAIPTNFTISVTTEILPVSMTKTSVDCTMYICGDSTECSNLLLQYGSFCTQLNRALTGIAVEQDKNTQEVFAQVKQIYKTPPIKDFGGFNFSQILPDPSKPSKRSFIEDLLFNKVTLADAGFIKQYGDCLGDIAARDLICAQKFNGLTVLPPLLTDEMIAQYTSALLAGTITSGWTFGAGAALQIPFAMQMAYRFNGIGVTQNVLYENQKLIANQFNSAIGKIQDSLSSTASALGKLQDVVNQNAQALNTLVKQLSSNFGCISSVLNDILSRLDKVEAEVQIDCLITGRLQSLQTYVTQQLIRAAEIRASANLAATKMSECVLGQSKRVDFCGKGYHLMSFPQSAPHGVVFLHVTYVPAQEKNFTTAPAICHDGKAHFPREGVFVSNGTHWFVTQRNFYEPQIITTDNTFVSGNCDVVIGIVNNTVYDPLQPELDSFKEELDKYFKNHTSPDVDLGDISGINASVVNIQKEIDRLNEVAKNLNESLIDLQELGKYEQYIKGGGSGGGQIYEGKLTAEGLRFGIVASRFNHALVDRLVEGAIDAIVRHGGREEDITLVRVPGSWEIPVAAGELARKEDIDAVIAIGVLIRGATPHFDYIASEVSKGLADLSLELRKPITFGVITADTLEQAIERAGTKHGNKGWEAALSAIEMANLFKSLR

SEQ ID NO: 4435 - protein, 1371 aa, Artificial Sequence
  SARS-CoV-2/Australia/VIC01/2020__EPI_ISL_406844 spike protein (1-1211)(A972C_R995C) LumSynth construct
MFVFLVLLPLVSSQCVNLTTRTQLPPAYTNSFTRGVYYPDKVFRSSVLHSTQDLFLPFFSNVTWFHAIHVSGTNGTKRFDNPVLPFNDGVYFASTEKSNIIRGWIFGTTLDSKTQSLLIVNNATNVVIKVCEFQFCNDPFLGVYYHKNNKSWMESEFRVYSSANNCTFEYVSQPFLMDLEGKQGNFKNLREFVFKNIDGYFKIYSKHTPINLVRDLPQGFSALEPLVDLPIGINITRFQTLLALHRRYLTPGDSSSGWTAGAAAYYVGYLQPRTFLLKYNENGTITDAVDCALDPLSETKCTLKSFTVEKGIYQTSNFRVQPTESIVRFPNITNLCPFGEVFNATRFASVYAWNRKRISNCVADYSVLYNSASFSTFKCYGVSPTKLNDLCFTNVYADSFVIRGDEVRQIAPGQTGKIADYNYKLPDDFTGCVIAWNSNNLDSKVGGNYNYLYRLFRKSNLKPFERDISTEIYQAGSTPCNGVEGFNCYFPLQSYGFQPTNGVGYQPYRVVVLSFELLHAPATVCGPKKSTNLVKNKCVNFNFNGLTGTGVLTESNKKFLPFQQFGRDIADTTDAVRDPQTLEILDITPCSFGGVSVITPGTNTSNQVAVLYQDVNCTEVPVAIHADQLTPTWRVYSTGSNVFQTRAGCLIGAEHVNNSYECDIPIGAGICASYQTQTNSPRRARSVASQSIIAYTMSLGAENSVAYSNNSIAIPTNFTISVTTEILPVSMTKTSVDCTMYICGDSTECSNLLLQYGSFCTQLNRALTGIAVEQDKNTQEVFAQVKQIYKTPPIKDFGGFNFSQILPDPSKPSKRSFIEDLLFNKVTLADAGFIKQYGDCLGDIAARDLICAQKFNGLTVLPPLLTDEMIAQYTSALLAGTITSGWTFGAGAALQIPFAMQMAYRFNGIGVTQNVLYENQKLIANQFNSAIGKIQDSLSSTASALGKLQDVVNQNAQALNTLVKQLSSNFGCISSVLNDILSRLDKVEAEVQIDCLITGRLQSLQTYVTQQLIRAAEIRASANLAATKMSECVLGQSKRVDFCGKGYHLMSFPQSAPHGVVFLHVTYVPAQEKNFTTAPAICHDGKAHFPREGVFVSNGTHWFVTQRNFYEPQIITTDNTFVSGNCDVVIGIVNNTVYDPLQPELDSFKEELDKYFKNHTSPDVDLGDISGINASVVNIQKEIDRLNEVAKNLNESLIDLQELGKYEQYIKGGGSGGGQIYEGKLTAEGLRFGIVASRFNHALVDRLVEGAIDAIVRHGGREEDITLVRVPGSWEIPVAAGELARKEDIDAVIAIGVLIRGATPHFDYIASEVSKGLADLSLELRKPITFGVITADTLEQAIERAGTKHGNKGWEAALSAIEMANLFKSLR

SEQ ID NO: 4436 - protein, 1371 aa, Artificial Sequence
  SARS-CoV-2/Germany/BavPat1/2020__EPI_ISL_406862 spike protein (1-1211)(A972C_R995C) LumSynth construct
MFVFLVLLPLVSSQCVNLTTRTQLPPAYTNSFTRGVYYPDKVFRSSVLHSTQDLFLPFFSNVTWFHAIHVSGTNGTKRFDNPVLPFNDGVYFASTEKSNIIRGWIFGTTLDSKTQSLLIVNNATNVVIKVCEFQFCNDPFLGVYYHKNNKSWMESEFRVYSSANNCTFEYVSQPFLMDLEGKQGNFKNLREFVFKNIDGYFKIYSKHTPINLVRDLPQGFSALEPLVDLPIGINITRFQTLLALHRSYLTPGDSSSGWTAGAAAYYVGYLQPRTFLLKYNENGTITDAVDCALDPLSETKCTLKSFTVEKGIYQTSNFRVQPTESIVRFPNITNLCPFGEVFNATRFASVYAWNRKRISNCVADYSVLYNSASFSTFKCYGVSPTKLNDLCFTNVYADSFVIRGDEVRQIAPGQTGKIADYNYKLPDDFTGCVIAWNSNNLDSKVGGNYNYLYRLFRKSNLKPFERDISTEIYQAGSTPCNGVEGFNCYFPLQSYGFQPTNGVGYQPYRVVVLSFELLHAPATVCGPKKSTNLVKNKCVNFNFNGLTGTGVLTESNKKFLPFQQFGRDIADTTDAVRDPQTLEILDITPCSFGGVSVITPGTNTSNQVAVLYQGVNCTEVPVAIHADQLTPTWRVYSTGSNVFQTRAGCLIGAEHVNNSYECDIPIGAGICASYQTQTNSPRRARSVASQSIIAYTMSLGAENSVAYSNNSIAIPTNFTISVTTEILPVSMTKTSVDCTMYICGDSTECSNLLLQYGSFCTQLNRALTGIAVEQDKNTQEVFAQVKQIYKTPPIKDFGGFNFSQILPDPSKPSKRSFIEDLLFNKVTLADAGFIKQYGDCLGDIAARDLICAQKFNGLTVLPPLLTDEMIAQYTSALLAGTITSGWTFGAGAALQIPFAMQMAYRFNGIGVTQNVLYENQKLIANQFNSAIGKIQDSLSSTASALGKLQDVVNQNAQALNTLVKQLSSNFGCISSVLNDILSRLDKVEAEVQIDCLITGRLQSLQTYVTQQLIRAAEIRASANLAATKMSECVLGQSKRVDFCGKGYHLMSFPQSAPHGVVFLHVTYVPAQEKNFTTAPAICHDGKAHFPREGVFVSNGTHWFVTQRNFYEPQIITTDNTFVSGNCDVVIGIVNNTVYDPLQPELDSFKEELDKYFKNHTSPDVDLGDISGINASVVNIQKEIDRLNEVAKNLNESLIDLQELGKYEQYIKGGGSGGGQIYEGKLTAEGLRFGIVASRFNHALVDRLVEGAIDAIVRHGGREEDITLVRVPGSWEIPVAAGELARKEDIDAVIAIGVLIRGATPHFDYIASEVSKGLADLSLELRKPITFGVITADTLEQAIERAGTKHGNKGWEAALSAIEMANLFKSLR

SEQ ID NO: 4437 - protein, 1371 aa, Artificial Sequence
  SARS-CoV-2/Wuhan/HBCDC-HB-02/2020__EPI_ISL_412978 spike protein (1-1211)(A972C_R995C) LumSynth construct
MFVFLVLLPLVSSQCVNLTTRTQLPPAYTNSFTRGVYYPDKVFRSSVLHSTQDLFLPFFSNVTWFHAIHVSGTNGTKRFDNPVLPFNDGVYFASTEKSNIIRGWIFGTTLDSKTQSLLIVNNATNVVIKVCEFQFCNDPFLGVYYHKNNKSWMESEFRVYSSANNCTFEYVSQPFLMDLEGKQGNFKNLREFVFKNIDGYFKIYSKHTPINLVRDLPQGFSALEPLVDLPIGINITRFQTLLALHRSYLTPGDSSSGWTAGAAAYYVGYLQPRTFLLKYNENGTITDAVDCALDPLSETKCTLKSFTVEKGIYQTSNFRVQPTESIVRFPNITNLCPFGEVFNATRFASVYAWNRKRISNCVADYSVLYNSASFSTFKCYGVSPTKLNDLCFTNVYADSFVIRGDEVRQIAPGQTGKIADYNYKLPDDFTGCVIAWNSNNLDSKVGGNYNYLYRLFRKSNLKPFERDISTEIYQAGSTPCNGVEGFNCYFPLQSYGFQPTNGVGYQPYRVVVLSFELLHAPATVCGPKKSTNLVKNKCVNFNFNGLTGTGVLTESNKKFLPFQQFGRDIADTTDAVRDPQTLEILDITPCSFGGVSVITPGTNTSNQVAVLYQDVNCTEVPVAIHADQLTPTWRVYSTGSNVFQTRAGCLIGAEHVNNSYECDIPIGAGICASYQTQTNSPRRARSVASQSIIAYTMSLGAENSVAYSNNSIAIPTNFTISVTTEILPVSMTKTSVDCTMYICGDSTECSNFLLQYGSFCTQLNRALTGIAVEQDKNTQEVFAQVKQIYKTPPIKDFGGFNFSQILPDPSKPSKRSFIEDLLFNKVTLADAGFIKQYGDCLGDIAARDLICAQKFNGLTVLPPLLTDEMIAQYTSALLAGTITSGWTFGAGAALQIPFAMQMAYRFNGIGVTQNVLYENQKLIANQFNSAIGKIQDSLSSTASALGKLQDVVNQNAQALNTLVKQLSSNFGCISSVLNDILSRLDKVEAEVQIDCLITGRLQSLQTYVTQQLIRAAEIRASANLAATKMSECVLGQSKRVDFCGKGYHLMSFPQSAPHGVVFLHVTYVPAQEKNFTTAPAICHDGKAHFPREGVFVSNGTHWFVTQRNFYEPQIITTDNTFVSGNCDVVIGIVNNTVYDPLQPELDSFKEELDKYFKNHTSPDVDLGDISGINASVVNIQKEIDRLNEVAKNLNESLIDLQELGKYEQYIKGGGSGGGQIYEGKLTAEGLRFGIVASRFNHALVDRLVEGAIDAIVRHGGREEDITLVRVPGSWEIPVAAGELARKEDIDAVIAIGVLIRGATPHFDYIASEVSKGLADLSLELRKPITFGVITADTLEQAIERAGTKHGNKGWEAALSAIEMANLFKSLR

SEQ ID NO: 4438 - protein, 1371 aa, Artificial Sequence
  SARS-CoV-2/Australia/QLD02/2020__EPI_ISL_407896 spike protein (1-1211)(A972C_R995C) LumSynth construct
MFVFLVLLPLVSSQCVNLTTRTQLPPAYTNSFTRGVYYPDKVFRSSVLHSTQDLFLPFFSNVTWFHAIHVSGTNGTKRFDNPVLPFNDGVYFASTEKSNIIRGWIFGTTLDSKTQSLLIVNNATNVVIKVCEFQFCNDPFLGVYYHKNNKSWMESEFRVYSSANNCTFEYVSQPFLMDLEGKQGNFKNLREFVFKNIDGYFKIYSKHTPINLVRDLPQGFSALEPLVDLPIGINITRFQTLLALHRSYLTPGDSSSGWTAGAAAYYVGYLQPRTFLLKYNENGTITDAVDCALDPLSETKCTLKSFTVEKGIYQTSNFRVQPTESIVRFPNITNLCPFGEVFNATRFASVYAWNRKRISNCVADYSVLYNSASFSTFKCYGVSPTKLNDLCFTNVYADSFVIRGDEVRQIAPGQTGKIADYNYKLPDDFTGCVIAWNSNNLDSKVGGNYNYLYRLFRKSNLKPFERDISTEIYQAGSTPCNGVEGFNCYFPLQSYGFQPTNGVGYQPYRVVVLSFELLHAPATVCGPKKSTNLVKNKCVNFNFNGLTGTGVLTESNKKFLPFQQFGRDIADTTDAVRDPQTLEILDITPCSFGGVSVITPGTNTSNQVAVLYQDVNCTEVPVAIHADQLTPTWRVYSTGSNVFQTRAGCLIGAEHVNNSYECDIPIGAGICASYQTQTNSPRRARSVASQSIIAYTMSLGAENSVAYSNNSIAIPTNFTISVTTEILPVSMTKTSVDCTMYICGDSTECSNLLLQYGSFCTQLNRALTGIAVEQDKNTQEVFAQVKQIYKTPPIKDFGGFNFSQILPDPSKPSKRSFIEDLLFNKVTLADAGFIKQYGDCLGDIAARDLICAQKFNGLTVLPPLLTDEMIAQYTSALLAGTITSGWTFGAGAALQIPFAMQMAYRFNGIGVTQNVLYENQKLIANQFNSAIGKIQDSLSSTASALGKLQDVVNQNAQALNTLVKQLSSNFGCISSVLNDILSRLDKVEAEVQIDCLITGRLQSLQTYVTQQLIRAAEIRASANLAATKMSECVLGQSKRVDFCGKGYHLMSFPQSAPHGVVFLHVTYVPAQEKNFTTAPAICHDGKAHFPREGVFVSNGTHWFVTQRNFYEPQIITTDNTFVSGNCDVVIGIVNNTVYDPLQLELDSFKEELDKYFKNHTSPDVDLGDISGINASVVNIQKEIDRLNEVAKNLNESLIDLQELGKYEQYIKGGGSGGGQIYEGKLTAEGLRFGIVASRFNHALVDRLVEGAIDAIVRHGGREEDITLVRVPGSWEIPVAAGELARKEDIDAVIAIGVLIRGATPHFDYIASEVSKGLADLSLELRKPITFGVITADTLEQAIERAGTKHGNKGWEAALSAIEMANLFKSLR

SEQ ID NO: 4439 - protein, 1371 aa, Artificial Sequence
  SARS-CoV-2/India/1-31/2020__EPI_ISL_413523 spike protein (1-1211)(A972C_R995C) LumSynth construct
MFVFLVLLPLVSSQCVNLTTRTQLPPAYTNSFTRGVYYPDKVFRSSVLHSTQDLFLPFFSNVTWFHAIHVSGTNGTKRFDNPVLPFNDGVYFASTEKSNIIRGWIFGTTLDSKTQSLLIVNNATNVVIKVCEFQFCNDPFLGVYYHKNNKSWMESEFRVYSSANNCTFEYVSQPFLMDLEGKQGNFKNLREFVFKNIDGYFKIYSKHTPINLVRDLPQGFSALEPLVDLPIGINITRFQTLLALHRSYLTPGDSSSGWTAGAAAYYVGYLQPRTFLLKYNENGTITDAVDCALDPLSETKCTLKSFTVEKGIYQTSNFRVQPTESIVRFPNITNLCPFGEVFNATRFASVYAWNRKRISNCVADYSVLYNSASFSTFKCYGVSPTKLNDLCFTNVYADSFVIRGDEVRQIAPGQTGKIADYNYKLPDDFTGCVIAWNSNNLDSKVGGNYNYLYRLFRKSNLKPFERDISTEIYQAGSTPCNGVEGFNCYFPLQSYGFQPTNGVGYQPYRVVVLSFELLHAPATVCGPKKSTNLVKNKCVNFNFNGLTGTGVLTESNKKFLPFQQFGRDIADTTDAVRDPQTLEILDITPCSFGGVSVITPGTNTSNQVAVLYQDVNCTEVPVAIHADQLTPTWRVYSTGSNVFQTRAGCLIGAEHVNNSYECDIPIGAGICASYQTQTNSPRRARSVASQSIIAYTMSLGAENSVAYSNNSIAIPTNFTISVTTEILPVSMTKTSVDCTMYICGDSTECSNLLLQYGSFCTQLNRALTGIAVEQDKNTQEVFAQVKQIYKTPPIKDFGGFNFSQILPDPSKPSKRSFIEDLLFNKVTLADAGFIKQYGDCLGDIAARDLICAQKFNGLTVLPPLLTDEMIAQYTSALLAGTITSGWTFGAGAALQIPFAMQMAYRFNGIGVTQNVLYENQKLIANQFNSVIGKIQDSLSSTASALGKLQDVVNQNAQALNTLVKQLSSNFGCISSVLNDILSRLDKVEAEVQIDCLITGRLQSLQTYVTQQLIRAAEIRASANLAATKMSECVLGQSKRVDFCGKGYHLMSFPQSAPHGVVFLHVTYVPAQEKNFTTAPAICHDGKAHFPREGVFVSNGTHWFVTQRNFYEPQIITTDNTFVSGNCDVVIGIVNNTVYDPLQPELDSFKEELDKYFKNHTSPDVDLGDISGINASVVNIQKEIDRLNEVAKNLNESLIDLQELGKYEQYIKGGGSGGGQIYEGKLTAEGLRFGIVASRFNHALVDRLVEGAIDAIVRHGGREEDITLVRVPGSWEIPVAAGELARKEDIDAVIAIGVLIRGATPHFDYIASEVSKGLADLSLELRKPITFGVITADTLEQAIERAGTKHGNKGWEAALSAIEMANLFKSLR

SEQ ID NO: 4440 - protein, 1371 aa, Artificial Sequence
  SARS-CoV-2/Guangdong/GD2020087-P0008/2020__EPI_ISL_413863 spike protein (1-1211)(A972C_R995C) LumSynth construct
MFVFLVLLPLVSSQCVNLTTRTQLPPAYTNSFTRGVYYPDKVFRSSVLHSTQDLFLPFFSNVTWFHAIHVSGTNGTKRFDNPVLPFNDGVYFASTEKSNIIRGWIFGTTLDSKTQSLLIVNNATNVVIKVCEFQFCNDPFLGVYYHKNNKSWMESEFRVYSSANNCTFEYVSQPFLMDLEGKQGNFKNLREFVFKNIDGYFKIYSKHTPINLVRDLPQGFSALEPLVDLPIGINITRFQTLLALHRSYLTPGDSSSGWTAGAAAYYVGYLQPRTFLLKYNENGTITDAVDCALDPLSETKCTLKSFTVEKGIYQTSNFRVQPTESIVRFPNITNLCPFGEVFNATRFASVYAWNRKRISNCVADYSVLYNSASFSTFKCYGVSPTKLNDLCFTNVYADSFVIRGDEVREIAPGQTGKIADYNYKLPDDFTGCVIAWNSNNLDSKVGGNYNYLYRLFRKSNLKPFERDISTEIYQAGSTPCNGVEGFNCYFPLQSYGFQPTNGVGYQPYRVVVLSFELLHAPATVCGPKKSTNLVKNKCVNFNFNGLTGTGVLTESNKKFLPFQQFGRDIADTTDAVRDPQTLEILDITPCSFGGVSVITPGTNTSNQVAVLYQDVNCTEVPVAIHADQLTPTWRVYSTGSNVFQTRAGCLIGAEHVNNSYECDIPIGAGICASYQTQTNSPRRARSVASQSIIAYTMSLGAENSVAYSNNSIAIPTNFTISVTTEILPVSMTKTSVDCTMYICGDSTECSNLLLQYGSFCTQLNRALTGIAVEQDKNTQEVFAQVKQIYKTPPIKDFGGFNFSQILPDPSKPSKRSFIEDLLFNKVTLADAGFIKQYGDCLGDIAARDLICAQKFNGLTVLPPLLTDEMIAQYTSALLAGTITSGWTFGAGAALQIPFAMQMAYRFNGIGVTQNVLYENQKLIANQFNSAIGKIQDSLSSTASALGKLQDVVNQNAQALNTLVKQLSSNFGCISSVLNDILSRLDKVEAEVQIDCLITGRLQSLQTYVTQQLIRAAEIRASANLAATKMSECVLGQSKRVDFCGKGYHLMSFPQSAPHGVVFLHVTYVPAQEKNFTTAPAICHDGKAHFPREGVFVSNGTHWFVTQRNFYEPQIITTDNTFVSGNCDVVIGIVNNTVYDPLQPELDSFKEELDKYFKNHTSPDVDLGDISGINASVVNIQKEIDRLNEVAKNLNESLIDLQELGKYEQYIKGGGSGGGQIYEGKLTAEGLRFGIVASRFNHALVDRLVEGAIDAIVRHGGREEDITLVRVPGSWEIPVAAGELARKEDIDAVIAIGVLIRGATPHFDYIASEVSKGLADLSLELRKPITFGVITADTLEQAIERAGTKHGNKGWEAALSAIEMANLFKSLR

SEQ ID NO: 4441 - protein, 1371 aa, Artificial Sequence
  SARS-CoV-2/Sweden/01/2020__EPI_ISL_411951 spike protein (1-1211)(A972C_R995C) LumSynth construct
MFVFLVLLPLVSSQCVNLTTRTQLPPAYTNSFTRGVYYPDKVFRSSVLHSTQDLFLPFFSNVTWFHAIHVSGTNGTKRFDNPVLPFNDGVYFASTEKSNIIRGWIFGTTLDSKTQSLLIVNNATNVVIKVCEFQFCNDPFLGVYYHKNNKSWMESEFRVYSSANNCTFEYVSQPFLMDLEGKQGNFKNLREFVFKNIDGYFKIYSKHTPINLVRDLPQGFSALEPLVDLPIGINITRFQTLLALHRSYLTPGDSSSGWTAGAAAYYVGYLQPRTFLLKYNENGTITDAVDCALDPLSETKCTLKSFTVEKGIYQTSNFRVQPTESIVRFPNITNLCPFGEVFNATRFASVYAWNRKRISNCVADYSVLYNSASFSTFKCYGVSPTKLNDLCFTNVYADSFVIRGDEVRQIAPGQTGKIADYNYKLPDDFTGCVIAWNSNNLDSKVGGNYNYLYRLFRKSNLKPFERDISTEIYQAGSTPCNGVEGFNCYFPLQSYGFQPTNGVGYQPYRVVVLSFELLHAPATVCGPKKSTNLVKNKCVNFNFNGLTGTGVLTESNKKFLPFQQFGRDIADTTDAVRDPQTLEILDITPCSFGGVSVITPGTNTSNQVAVLYQDVNCTEVPVAIHADQLTPTWRVYSTGSNVFQTRAGCLIGAEHVNNSYECDIPIGAGICASYQTQTNSPRRARSVASQSIIAYTMSLGAENSVAYSNNSIAIPTNFTISVTTEILPVSMTKTSVDCTMYICGDSTECSNLLLQYGSFCTQLNRALTGIAVEQDKNTQEVFAQVKQIYKTPPIKDCGGFNFSQILPDPSKPSKRSFIEDLLFNKVTLADAGFIKQYGDCLGDIAARDLICAQKFNGLTVLPPLLTDEMIAQYTSALLAGTITSGWTFGAGAALQIPFAMQMAYRFNGIGVTQNVLYENQKLIANQFNSAIGKIQDSLSSTASALGKLQDVVNQNAQALNTLVKQLSSNFGCISSVLNDILSRLDKVEAEVQIDCLITGRLQSLQTYVTQQLIRAAEIRASANLAATKMSECVLGQSKRVDFCGKGYHLMSFPQSAPHGVVFLHVTYVPAQEKNFTTAPAICHDGKAHFPREGVFVSNGTHWFVTQRNFYEPQIITTDNTFVSGNCDVVIGIVNNTVYDPLQPELDSFKEELDKYFKNHTSPDVDLGDISGINASVVNIQKEIDRLNEVAKNLNESLIDLQELGKYEQYIKGGGSGGGQIYEGKLTAEGLRFGIVASRFNHALVDRLVEGAIDAIVRHGGREEDITLVRVPGSWEIPVAAGELARKEDIDAVIAIGVLIRGATPHFDYIASEVSKGLADLSLELRKPITFGVITADTLEQAIERAGTKHGNKGWEAALSAIEMANLFKSLR

SEQ ID NO: 4442 - protein, 1371 aa, Artificial Sequence
  SARS-CoV-2/Tianmen/HBCDC-HB-07/2020__EPI_ISL_412983 spike protein (1-1211)(A972C_R995C) LumSynth construct
MFVFLVLLPLVSSQCVNLTTRTQLPPAYTNSFTRGVYYPDKVFRSSVLHSTQDLFLPFFSNVTWFHAIHVSGTNGTKRFDNPVLPFNDGVYFASTEKSNIIRGWIFGTTLDSKTQSLLIVNNATNVVIKVCEFQFCNDPFLGVYYHKNNKSWMESEFRVYSSANNCTFEYVSQPFLMDLEGKQGNFKNLREFVFKNIDGYFKIYSKHTPINLVRDLPQGFSALEPLVDLPIGINITRFQTLLALHRSYLTPGDSSSGWTAGAAAYYVGYLQPRTFLLKYNENGTITDAVDCALDPLSETKCTLKSFTVEKGIYQTSNFRVQPTESIVRFPNITNLCPFGEVFNATRFASVYAWNRKRISNCVADYSVLYNSASFSTFKCYGVSPTKLNDLCFTNVYADSFVIRGDEVRQIAPGQTGKIADYNYKLPDDFTGCVIAWNSNNLDSKVGGNYNYLYRLFRKSNLKPFERDISTEIYQAGSTPCNGVEGFNCYFPLQSYGFQPTNGVGYQPYRVVVLSFELLHAPATVCGPKKSTNLVKNKCVNFNFNGLTGTGVLTESNKKFLPFQQFGRDIADTTDAVRDPQTLEILDITPCSFGGVSVITPGTNTSNQVAVLYQDLNCTEVPVAIHADQLTPTWRVYSTGSNVFQTRAGCLIGAEHVNNSYECDIPIGAGICASYQTQTNSPRRARSVASQSIIAYTMSLGAENSVAYSNNSIAIPTNFTISVTTEILPVSMTKTSVDCTMYICGDSTECSNLLLQYGSFCTQLNRALTGIAVEQDKNTQEVFAQVKQIYKTPPIKDFGGFNFSQILPDPSKPSKRSFIEDLLFNKVTLADAGFIKQYGDCLGDIAARDLICAQKFNGLTVLPPLLTDEMIAQYTSALLAGTITSGWTFGAGAALQIPFAMQMAYRFNGIGVTQNVLYENQKLIANQFNSAIGKIQDSLSSTASALGKLQDVVNQNAQALNTLVKQLSSNFGCISSVLNDILSRLDKVEAEVQIDCLITGRLQSLQTYVTQQLIRAAEIRASANLAATKMSECVLGQSKRVDFCGKGYHLMSFPQSAPHGVVFLHVTYVPAQEKNFTTAPAICHDGKAHFPREGVFVSNGTHWFVTQRNFYEPQIITTDNTFVSGNCDVVIGIVNNTVYDPLQPELDSFKEELDKYFKNHTSPDVDLGDISGINASVVNIQKEIDRLNEVAKNLNESLIDLQELGKYEQYIKGGGSGGGQIYEGKLTAEGLRFGIVASRFNHALVDRLVEGAIDAIVRHGGREEDITLVRVPGSWEIPVAAGELARKEDIDAVIAIGVLIRGATPHFDYIASEVSKGLADLSLELRKPITFGVITADTLEQAIERAGTKHGNKGWEAALSAIEMANLFKSLR

SEQ ID NO: 4443 - protein, 1371 aa, Artificial Sequence
  SARS-CoV-2/Hong Kong/case42_VM20002493/2020__EPI_ISL_414527 spike protein (1-1211)(A972C_R995C) LumSynth construct
MFVFLVLLPLVSSQCVNLTTRTQLPPAYTNSFTRGVYYPDKVFRSSVLHSTQDLFLPFFSNVTWFHAIHVSGTNGTKRFDNPVLPFNDGVYFASTEKSNIIRGWIFGTTLDSKTQSLLIVNNATNVVIKVCEFQFCNDPFLGVYYHKNNKSWMESEFRVYSSANNCTFEYVSQPFLMDLEGKQGNFKNLREFVFKNIDGYFKIYSKHTPINLVRDLPQGFSALEPLVDLPIGINITRFQTLLALHRSYLTPGDSSSGWTAGAAAYYVGYLQPRTFLLKYNENGTITDAVDCALDPLSETKCTLKSFTVEKGIYQTSNFRVQPTESIVRFPNITNLCPFGEVFNATRFASVYAWNRKRISNCVADYSVLYNSASFSTFKCYGVSPTKLNDLCFTNVYADSFVIRGDEVRQIAPGQTGKIADYNYKLPDDFTGCVIAWNSNNLDSKVGGNYNYLYRLFRKSNLKPFERDISTEIYQAGSTPCNGVEGFNCYFPLQSYGFQPTNGVGYQPYRVVVLSFELLHAPATVCGPKKSTNLVKNKCVNFNFNGLTGTGVLTESNKKFLPFQQFGRDIADTTDAVRDPQTLEILDITPCSFGGVSVITPGTNTSNQVAVLYQDVNCTEVPVAIHADQLTPTWRVYSTGSNVFQTRAGCLIGAEHVNNSYECDIPIGAGICASYQTQTNSPRRARSVASQSIIAYTMSLGAENSVAYSNNSIAIPTNFAISVTTEILPVSMTKTSVDCTMYICGDSTECSNLLLQYGSFCTQLNRALTGIAVEQDKNTQEVFAQVKQIYKTPPIKDFGGFNFSQILPDPSKPSKRSFIEDLLFNKVTLADAGFIKQYGDCLGDIAARDLICAQKFNGLTVLPPLLTDEMIAQYTSALLAGTITSGWTFGAGAALQIPFAMQMAYRFNGIGVTQNVLYENQKLIANQFNSAIGKIQDSLSSTASALGKLQDVVNQNAQALNTLVKQLSSNFGCISSVLNDILSRLDKVEAEVQIDCLITGRLQSLQTYVTQQLIRAAEIRASANLAATKMSECVLGQSKRVDFCGKGYHLMSFPQSAPHGVVFLHVTYVPAQEKNFTTAPAICHDGKAHFPREGVFVSNGTHWFVTQRNFYEPQIITTDNTFVSGNCDVVIGIVNNTVYDPLQPELDSFKEELDKYFKNHTSPDVDLGDISGINASVVNIQKEIDRLNEVAKNLNESLIDLQELGKYEQYIKGGGSGGGQIYEGKLTAEGLRFGIVASRFNHALVDRLVEGAIDAIVRHGGREEDITLVRVPGSWEIPVAAGELARKEDIDAVIAIGVLIRGATPHFDYIASEVSKGLADLSLELRKPITFGVITADTLEQAIERAGTKHGNKGWEAALSAIEMANLFKSLR

SEQ ID NO: 4444 - protein, 1371 aa, Artificial Sequence
  SARS-CoV-2/USA/CruiseA-23/2020__EPI_ISL_414482 spike protein (1-1211)(A972C_R995C) LumSynth construct
MFVFLVLLPLVSSQCVNLTTRTQLPPAYTNSFTRGVYYPDKVFRSSVLHSTQDLFLPFFSNVTWFHAIHVSGTNGTKRFDNPVLPFNDGVYFASTEKSNIIRGWIFGTTLDSKTQSLLIVNNATNVVIKVCEFQFCNDPFLGVYYHKNNKSWMESEFRVYSSANNCTFEYVSQPFLMDLEVKQGNFKNLREFVFKNIDGYFKIYSKHTPINLVRDLPQGFSALEPLVDLPIGINITRFQTLLALHRSYLTPGDSSSGWTAGAAAYYVGYLQPRTFLLKYNENGTITDAVDCALDPLSETKCTLKSFTVEKGIYQTSNFRVQPTESIVRFPNITNLCPFGEVFNATRFASVYAWNRKRISNCVADYSVLYNSASFSTFKCYGVSPTKLNDLCFTNVYADSFVIRGDEVRQIAPGQTGKIADYNYKLPDDFTGCVIAWNSNNLDSKVGGNYNYLYRLFRKSNLKPFERDISTEIYQAGSTPCNGVEGFNCYFPLQSYGFQPTNGVGYQPYRVVVLSFELLHAPATVCGPKKSTNLVKNKCVNFNFNGLTGTGVLTESNKKFLPFQQFGRDIADTTDAVRDPQTLEILDITPCSFGGVSVITPGTNTSNQVAVLYQDVNCTEVPVAIHADQLTPTWRVYSTGSNVFQTRAGCLIGAEHVNNSYECDIPIGAGICASYQTQTNSPRRARSVASQSIIAYTMSLGAENSVAYSNNSIAIPTNFTISVTTEILPVSMTKTSVDCTMYICGDSTECSNLLLQYGSFCTQLNRALTGIAVEQDKNTQEVFAQVKQIYKTPPIKDFGGFNFSQILPDPSKPSKRSFIEDLLFNKVTLADAGFIKQYGDCLGDIAARDLICAQKFNGLTVLPPLLTDEMIAQYTSALLAGTITSGWTFGAGAALQIPFAMQMAYRFNGIGVTQNVLYENQKLIANQFNSAIGKIQDSLSSTASALGKLQDVVNQNAQALNTLVKQLSSNFGCISSVLNDILSRLDKVEAEVQIDCLITGRLQSLQTYVTQQLIRAAEIRASANLAATKMSECVLGQSKRVDFCGKGYHLMSFPQSAPHGVVFLHVTYVPAQEKNFTTAPAICHDGKAHFPREGVFVSNGTHWFVTQRNFYEPQIITTDNTFVSGNCDVVIGIVNNTVYDPLQPELDSFKEELDKYFKNHTSPDVDLGDISGINASVVNIQKEIDRLNEVAKNLNESLIDLQELGKYEQYIKGGGSGGGQIYEGKLTAEGLRFGIVASRFNHALVDRLVEGAIDAIVRHGGREEDITLVRVPGSWEIPVAAGELARKEDIDAVIAIGVLIRGATPHFDYIASEVSKGLADLSLELRKPITFGVITADTLEQAIERAGTKHGNKGWEAALSAIEMANLFKSLR

SEQ ID NO: 4445 - protein, 1371 aa, Artificial Sequence
  SARS-CoV-2/Hong Kong/case85_VM20002868/2020__EPI_ISL_414519 spike protein (1-1211)(A972C_R995C) LumSynth construct
MFVFLVLVPLVSSQCVNLTTRTQLPPAYTNSFTRGVYYPDKVFRSSVLHSTQDLFLPFFSNVTWFHAIHVSGTNGTKRFDNPVLPFNDGVYFASTEKSNIIRGWIFGTTLDSKTQSLLIVNNATNVVIKVCEFQFCNDPFLGVYYHKNNKSWMESEFRVYSSANNCTFEYVSQPFLMDLEGKQGNFKNLREFVFKNIDGYFKIYSKHTPINLVRDLPQGFSALEPLVDLPIGINITRFQTLLALHRSYLTPGDSSSGWTAGAAAYYVGYLQPRTFLLKYNENGTITDAVDCALDPLSETKCTLKSFTVEKGIYQTSNFRVQPTESIVRFPNITNLCPFGEVFNATRFASVYAWNRKRISNCVADYSVLYNSASFSTFKCYGVSPTKLNDLCFTNVYADSFVIRGDEVRQIAPGQTGKIADYNYKLPDDFTGCVIAWNSNNLDSKVGGNYNYLYRLFRKSNLKPFERDISTEIYQAGSTPCNGVEGFNCYFPLQSYGFQPTNGVGYQPYRVVVLSFELLHAPATVCGPKKSTNLVKNKCVNFNFNGLTGTGVLTESNKKFLPFQQFGRDIADTTDAVRDPQTLEILDITPCSFGGVSVITPGTNTSNQVAVLYQDVNCTEVPVAIHADQLTPTWRVYSTGSNVFQTRAGCLIGAEHVNNSYECDIPIGAGICASYQTQTNSPRRARSVASQSIIAYTMSLGAENSVAYSNNSIAIPTNFTISVTTEILPVSMTKTSVDCTMYICGDSTECSNLLLQYGSFCTQLNRALTGIAVEQDKNTQEVFAQVKQIYKTPPIKDFGGFNFSQILPDPSKPSKRSFIEDLLFNKVTLADAGFIKQYGDCLGDIAARDLICAQKFNGLTVLPPLLTDEMIAQYTSALLAGTITSGWTFGAGAALQIPFAMQMAYRFNGIGVTQNVLYENQKLIANQFNSAIGKIQDSLSSTASALGKLQDVVNQNAQALNTLVKQLSSNFGCISSVLNDILSRLDKVEAEVQIDCLITGRLQSLQTYVTQQLIRAAEIRASANLAATKMSECVLGQSKRVDFCGKGYHLMSFPQSAPHGVVFLHVTYVPAQEKNFTTAPAICHDGKAHFPREGVFVSNGTHWFVTQRNFYEPQIITTDNTFVSGNCDVVIGIVNNTVYDPLQPELDSFKEELDKYFKNHTSPDVDLGDISGINASVVNIQKEIDRLNEVAKNLNESLIDLQELGKYEQYIKGGGSGGGQIYEGKLTAEGLRFGIVASRFNHALVDRLVEGAIDAIVRHGGREEDITLVRVPGSWEIPVAAGELARKEDIDAVIAIGVLIRGATPHFDYIASEVSKGLADLSLELRKPITFGVITADTLEQAIERAGTKHGNKGWEAALSAIEMANLFKSLR

SEQ ID NO: 4446 - protein, 1371 aa, Artificial Sequence; identical to SEQ ID NO: 4436
  SARS-CoV-2/England/200990660/2020__EPI_ISL_414523 spike protein (1-1211)(A972C_R995C) LumSynth construct

SEQ ID NO: 4447 - protein, 1371 aa, Artificial Sequence
  SARS-CoV-2/Australia/NSW09/2020__EPI_ISL_413595 spike protein (1-1211)(A972C_R995C) LumSynth construct
MFVFLVLLPLVSSQCVNLTTRTQLPPAYTNSFTRGVYYPDKVFRSSVLHSTQDLFLPFFSNVTWFHAIHVSGTNGTKRFDNPVLPFNDGVYFASTEKSNIIRGWIFGTTLDSKTQSLLIVNNATNVVIKVCEFQFCNDPFLGVYYHKNNKSWMESEFRVYSSANNCTFEYVSQPFLMDLEGKQGNFKNLREFVFKNIDGYFKIYSKHTPINLVRDLPQGFSALEPLVDLPIGINITRFQTLLALHRSYLTPGDSSSGWTAGAAAYYVGYLQPRTFLLKYNENGTITDAVDCALDPLSETKCTLKSFTVEKGIYQTSNFRVQPTESIVRFPNITNLCPFGEVFNATRFASVYAWNRKRISNCVADYSVLYNSASFSTFKCYGVSPTKLNDLCFTNVYADSFVIRGDEVRQIAPGQTGKIADYNYKLPDDFTGCVIAWNSNNLDSKVGGNYNYLYRLFRKSNLKPFERDISTEIYQAGSTPCNGVEGFNCYFPLQSYGFQPTNGVGYQPYRVVVLSFELLHAPATVCGPKKSTNLVKNKCVNFNFNGLTGTGVLTESNKKFLPFQQFGRDIADTTDAVRDPQTLEILDITPCSFGGVSVITPGTNTSNQVAVLYQDVNCTEVPVAIHADQLTPTWRVYSTGSNVFQTRAGCLIGAEHVNNSYECDIPIGAGICASYQTQTNSPRRARSVASQSIIAYTMSLGAENSVAYSNNSIAIPTNFTISVTTEILPVSMTKTSVDCTMYICGDSTECSNLLLQYGSFCTQLNRALTGIAVEQDKNTQEVFAQVKQIYKTPPIKDFGGFNFSQILPDPSKPSKRSFIEDLLFNKVTLADAGFIKQYGDCLGDIAARDLICAQKFNGLTVLPPLLTDEMIAQYTSALLAGTITSGWTFGAGAALQIPFAMQMAYRFNGIGVTQNVLYENQKLIANQFNSAIGKIQDSLSFTASALGKLQDVVNQNAQALNTLVKQLSSNFGCISSVLNDILSRLDKVEAEVQIDCLITGRLQSLQTYVTQQLIRAAEIRASANLAATKMSECVLGQSKRVDFCGKGYHLMSFPQSAPHGVVFLHVTYVPAQEKNFTTAPAICHDGKAHFPREGVFVSNGTHWFVTQRNFYEPQIITTDNTFVSGNCDVVIGIVNNTVYDPLQPELDSFKEELDKYFKNHTSPDVDLGDISGINASVVNIQKEIDRLNEVAKNLNESLIDLQELGKYEQYIKGGGSGGGQIYEGKLTAEGLRFGIVASRFNHALVDRLVEGAIDAIVRHGGREEDITLVRVPGSWEIPVAAGELARKEDIDAVIAIGVLIRGATPHFDYIASEVSKGLADLSLELRKPITFGVITADTLEQAIERAGTKHGNKGWEAALSAIEMANLFKSLR

SEQ ID NO: 4448 - protein, 1371 aa, Artificial Sequence; identical to SEQ ID NO: 4428
  SARS-CoV-2/Australia/NSW10/2020__EPI_ISL_413596 spike protein (1-1211)(A972C_R995C) LumSynth construct

SEQ ID NO: 4449 - protein, 1371 aa, Artificial Sequence
  SARS-CoV-2/Switzerland/1000477797/2020__EPI_ISL_413023 spike protein (1-1211)(A972C_R995C) LumSynth construct
MFVFLVLLPLVSSQCVNLTTRTQLPPAYTNSFTRGVYYPDKVFRSSVLHSTQDLFLPFFSNVTWFHAIHVSGTNGTKRFDNPVLPFNDGVYFASTEKSNIIRGWIFGTTLDSKTQSLLIVNNATNVVIKVCEFQFCNDPFLGVYYHKNNKSWMESEFRVYSSANNCTFEYVSQPFLMDLEGKQGNFKNLREFVFKNIDGYFNIYSKHTPINLVRDLPQGFSALEPLVDLPIGINITRFQTLLALHRSYLTPGDSSSGWTAGAAAYYVGYLQPRTFLLKYNENGTITDAVDCALDPLSETKCTLKSFTVEKGIYQTSNFRVQPTESIVRFPNITNLCPFGEVFNATRFASVYAWNRKRISNCVADYSVLYNSASFSTFKCYGVSPTKLNDLCFTNVYADSFVIRGDEVRQIAPGQTGKIADYNYKLPDDFTGCVIAWNSNNLDSKVGGNYNYLYRLFRKSNLKPFERDISTEIYQAGSTPCNGVEGFNCYFPLQSYGFQPTNGVGYQPYRVVVLSFELLHAPATVCGPKKSTNLVKNKCVNFNFNGLTGTGVLTESNKKFLPFQQFGRDIADTTDAVRDPQTLEILDITPCSFGGVSVITPGTNTSNQVAVLYQGVNCTEVPVAIHADQLTPTWRVYSTGSNVFQTRAGCLIGAEHVNNSYECDIPIGAGICASYQTQTNSPRRARSVASQSIIAYTMSLGAENSVAYSNNSIAIPTNFTISVTTEILPVSMTKTSVDCTMYICGDSTECSNLLLQYGSFCTQLNRALTGIAVEQDKNTQEVFAQVKQIYKTPPIKDFGGFNFSQILPDPSKPSKRSFIEDLLFNKVTLADAGFIKQYGDCLGDIAARDLICAQKFNGLTVLPPLLTDEMIAQYTSALLAGTITSGWTFGAGAALQIPFAMQMAYRFNGIGVTQNVLYENQKLIANQFNSAIGKIQDSLSSTASALGKLQDVVNQNAQALNTLVKQLSSNFGCISSVLNDILSRLDKVEAEVQIDCLITGRLQSLQTYVTQQLIRAAEIRASANLAATKMSECVLGQSKRVDFCGKGYHLMSFPQSAPHGVVFLHVTYVPAQEKNFTTAPAICHDGKAHFPREGVFVSNGTHWFVTQRNFYEPQIITTDNTFVSGNCDVVIGIVNNTVYDPLQPELDSFKEELDKYFKNHTSPDVDLGDISGINASVVNIQKEIDRLNEVAKNLNESLIDLQELGKYEQYIKGGGSGGGQIYEGKLTAEGLRFGIVASRFNHALVDRLVEGAIDAIVRHGGREEDITLVRVPGSWEIPVAAGELARKEDIDAVIAIGVLIRGATPHFDYIASEVSKGLADLSLELRKPITFGVITADTLEQAIERAGTKHGNKGWEAALSAIEMANLFKSLR

SEQ ID NO: 4450 - protein, 1371 aa, Artificial Sequence
  SARS-CoV-2/Belgium/BA-02291/2020__EPI_ISL_415159 spike protein (1-1211)(A972C_R995C) LumSynth construct
MFVFLVLLPLVSSQCVNLTTRTQLPPAYTNSFTRGVYYPDKVFRSSVLHSTQDLFLPFFSNVTWFHAIHVSGTNGTKRFDNPVLPFNDGVYFASTEKSNIIRGWIFGTTLDSKTQSLLIVNNATNVVIKVCEFQFCNDPFLGVYYHKNNKSWMESEFRVYSSANNCTFEYVSQPFLMDLEGKQGNFKNLREFVFKNIDGYFKIYSKHTPINLVRDLPQGFSALEPLVDLPIGINITRFQTLLALHRSYLTPGDSSSGWTAGAAAYYVGYLQPRTFLLKYNENGTITDAVDCALDPLSETKCTLKSFTVEKGIYQTSNFRVQPTESIVRFPNITNLCPFGEVFNATRFASVYAWNRKRISNCVADYSVLYNSASFSTFKCYGVSPTKLNDLCFTNVYADSFVIRGDEVRQIAPGQTGKIADYNYKLPDDFTGCVIAWNSNNLDSKVGGNYNYLYRLFRRSNLKPFERDISTEIYQAGSTPCNGVEGFNCYFPLQSYGFQPTNGVGYQPYRVVVLSFELLPAPATVCGPKKSTNLVKNKCVNFNFNGLTGTGVLTESNKKFLPFQQFGRDIADTTDAVRDPQTLEILDITPCSFGGVSVITPGTNTSNQVAVLYQGVNCTEVPVAIHADQLTPTWRVYSTGSNVFQTRAGCLIGAEHVNNSYECDIPIGAGICASYQTQTNSPRRARSVASQSIIAYTMSLGAENSVAYSNNSIAIPTNFTISVTTEILPVSMTKTSVDCTMYICGDSTECSNLLLQYGSFCTQLNRALTGIAVEQDKNTQEVFAQVKQIYKTPPIKDFGGFNFSQILPDPSKPSKRSFIEDLLFNKVTLADAGFIKQYGDCLGDIAARDLICAQKFNGLTVLPPLLTDEMIAQYTSALLAGTITSGWTFGAGAALQIPFAMQMAYRFNGIGVTQNVLYENQKLIANQFNSAIGKIQDSLSSAAPALGKLQDVVNQNAQALNTLVKQLSSNFGCISSVLNDILSRLDKVEAEVQIDCLITGRLQSLQTYVTQQLIRAAEIRASANLAATKMSECVLGQSKRVDFCGKGYHLMSFPQSAPHGVVFLHVTYVPAQEKNFTTAPAICHDGKAHFPREGVFVSNGTHWFVTQRNFYEPQIITTDNTFVSGNCDVVIGIVNNTVYDPLQPELDSFKEELDKYFKNHTSPDVDLGDISGINASVVNIQKEIDRLNEVAKNLNESLIDLQELGKYEQYIKGGGSGGGQIYEGKLTAEGLRFGIVASRFNHALVDRLVEGAIDAIVRHGGREEDITLVRVPGSWEIPVAAGELARKEDIDAVIAIGVLIRGATPHFDYIASEVSKGLADLSLELRKPITFGVITADTLEQAIERAGTKHGNKGWEAALSAIEMANLFKSLR

SEQ ID NO: 4451 - protein, 1371 aa, Artificial Sequence
  SARS-CoV-2/USA/WA8-UW5/2020__EPI_ISL_413486 spike protein (1-1211)(A972C_R995C) LumSynth construct
MFVFLVLLPLVSSQCVNLTTRTQLPPAYTNSFTRGVYYPDKVFRSSVLHSTQDLFLPFFSNVTWFHAIHVSGTNGTKRFDNPVLPFNDGVYFASTEKSNIIRGWIFGTTLDSKTQSLLIVNNATNVVIKVCEFQFCNDPFLGVYYHKNNKSWMESEFRVYSSANNCTFEYVSQPFLMDLEGKQGNFKNLREFVFKNIDGYFKIYSKHTPINLVRDLPQGFSALEPLVDLPIGINITRFQTLLALHRSYLTPGDSSSGWTAGAAAYYVGYLQPRTFLLKYNENGTITDAVDCALDPLSETKCTLKSFTVEKGIYQTSNFRVQPTESIVRFPNITNLCPFGEVFNATRFASVYAWNRKRISNCVADYSVLYNSASFSTFKCYGVSPTKLNDLCFTNVYADSFVIRGDEVRQIAPGQTGKIADYNYKLPDDFTGCVIAWNSNNLDSKVGGNYNYLYRLFRKSNLKPFERDISTEIYQAGSTPCNGVEGFNCYFPLQSYGFQPTNGVGYQPYRVVVLSFELLHAPATVCGPKKSTNLVKNKCVNFNFNGLTGTGVLTESNKKFLPFQQFGRDIADTTDAVRDPQTLEILDITPCSFGGVSVITPGTNTSNQVAVLYQDVNCTEVPVAIHADQLTPTWRVYSTGSNVFQTRAGCLIGAEYVNNSYECDIPIGAGICASYQTQTNSPRRARSVASQSIIAYTMSLGAENSVAYSNNSIAIPTNFTISVTTEILPVSMTKTSVDCTMYICGDSTECSNLLLQYGSFCTQLNRALTGIAVEQDKNTQEVFAQVKQIYKTPPIKDFGGFNFSQILPDPSKPSKRSFIEDLLFNKVTLADAGFIKQYGDCLGDIAARDLICAQKFNGLTVLPPLLTDEMIAQYTSALLAGTITSGWTFGAGAALQIPFAMQMAYRFNGIGVTQNVLYENQKLIANQFNSAIGKIQDSLSSTASALGKLQDVVNQNAQALNTLVKQLSSNFGCISSVLNDILSRLDKVEAEVQIDCLITGRLQSLQTYVTQQLIRAAEIRASANLAATKMSECVLGQSKRVDFCGKGYHLMSFPQSAPHGVVFLHVTYVPAQEKNFTTAPAICHDGKAHFPREGVFVSNGTHWFVTQRNFYEPQIITTDNTFVSGNCDVVIGIVNNTVYDPLQPELDSFKEELDKYFKNHTSPDVDLGDISGINASVVNIQKEIDRLNEVAKNLNESLIDLQELGKYEQYIKGGGSGGGQIYEGKLTAEGLRFGIVASRFNHALVDRLVEGAIDAIVRHGGREEDITLVRVPGSWEIPVAAGELARKEDIDAVIAIGVLIRGATPHFDYIASEVSKGLADLSLELRKPITFGVITADTLEQAIERAGTKHGNKGWEAALSAIEMANLFKSLR

SEQ ID NO: 4452 - protein, 1371 aa, Artificial Sequence
  SARS-CoV-2/England/20102000506/2020__EPI_ISL_415147 spike protein (1-1211)(A972C_R995C) LumSynth construct
MFVFLVLLPLVSSQCVNLTTRTQLPPAYTNSFTRGVYYPDKVFRSSVLHSTQDLFLPFFSNVTWFHAIHVSGTNGTKRFDNPVLPFNDGVYFASTEKSNIIRGWIFGTTLDSKTQSLLIVNNATNVVIKVCEFQFCNDPFLGVYYHKNNKSWMESEFRVYSSANNCTFEYVSQPFLMDLEGKQGNFKNLREFVFKNIDGYFKIYSKHTPINLVRDLPQGFSALEPLVDLPIGINITRFQTLLALHRSYLTPGDSSSGWTAGAAAYYVGYLQPRTFLLKYNENGTITDAVDCALDPLSETKCTLKSFTVEKGIYQTSNFRVQPTESIVRFPNITNLCPFGEVFNATRFASVYAWNRKRISNCVADYSVLYNSASFSTFKCYGVSPTKLNDLCFTNVYADSFVIRGDEVRQIAPGQTGKIADYNYKLPDDFTGCVIAWNSNNLDSKVGGNYNYLYRLFRKSNLKPFERDISTEIYQAGSTPCNGVEGFNCYFPLQSYGFQPTNGVGYQPYRVVVLSFELLHAPATVCGPKKSTNLVKNKCVNFNFNGLTGTGVLTESNKKFLPFQQFGRDIADTTDAVRDPQTLEILDITPCSFGGVSVITPGTNTSNQVAVLYQGVNCTEVPVAIHADQLTPTWRVYSTGSNVFQTRAGCLIGAEHVNNSYECDIPIGAGICASYQTQTNSPRRARSVASQSIIAYTMSLGAENSVAYSNNSIAIPTNFTISVTTEILPVSMTKTSVDCTMYICGDSTECSNLLLQYGSFCTQLNRALTGIAVEQDKNTQEVFAQVKQIYKTPPIKDFGGFNFSQILPDPSKPSKRSFIEDLLFNKVTLADAGFIKQYGYCLGDIAARDLICAQKFNGLTVLPPLLTDEMIAQYTSALLAGTITSGWTFGAGAALQIPFAMQMAYRFNGIGVTQNVLYENQKLIANQFNSAIGKIQDSLSSTASALGKLQDVVNQNAQALNTLVKQLSSNFGCISSVLNDILSRLDKVEAEVQIDCLITGRLQSLQTYVTQQLIRAAEIRASANLAATKMSECVLGQSKRVDFCGKGYHLMSFPQSAPHGVVFLHVTYVPAQEKNFTTAPAICHDGKAHFPREGVFVSNGTHWFVTQRNFYEPQIITTDNTFVSGNCDVVIGIVNNTVYDPLQPELDSFKEELDKYFKNHTSPDVDLGDISGINASVVNIQKEIDRLNEVAKNLNESLIDLQELGKYEQYIKGGGSGGGQIYEGKLTAEGLRFGIVASRFNHALVDRLVEGAIDAIVRHGGREEDITLVRVPGSWEIPVAAGELARKEDIDAVIAIGVLIRGATPHFDYIASEVSKGLADLSLELRKPITFGVITADTLEQAIERAGTKHGNKGWEAALSAIEMANLFKSLR

SEQ ID NO: 4453 - protein, 1371 aa, Artificial Sequence
  SARS-CoV-2/Belgium/VAG-03013/2020__EPI_ISL_415155 spike protein (1-1211)(A972C_R995C) LumSynth construct
MFVFLVLLPLVSSQCVNLTTRTQLPPAYTNSFTRGVYYPDKVFRSSVLHSTQDLFLPFFSNVTWFHAIHVSGTNGTKRFDNPVLPFNDGVYFASTEKSNIIRGWIFGTTLDSKTQSLLIVNNATNVVIKVCEFQFCNDPFLGVYYHKNNKSWMESEFRVYSSANNCTFEYVSQPFLMDLEGKQGNFKNLREFVFKNIDGYFKIYSKHTPINLVRDLPQGFSALEPLVDLPIGINITRFQTLLALHRSYLTPGDSSSGWTAGAAAYYVGYLQPRTFLLKYNENGTITDAVDCALDPLSETKCTLKSFTVEKGIYQTSNFRVQPTESIVRFPNITNLCPFGEVFNATRFASVYAWNRKRISNCVADYSVLYNSASFSTFKCYGVSPTKLNDLCFTNVYADSFVIRGDEVRQIAPGQTGKIADYNYKLPDDFTGCVIAWNSNNLDSKVGGNYNYLYRLFRKSNLKPFERDISTEIYQAGSTPCNGVEGFNCYFPLQSYGFQPTNGVGYQPYRVVVLSFELLHAPATVCGPKKSTNLVKNKCVNFNFNGLTGTGVLTESNKKFLPFQQFGRDIADTTDAVRDPQTLEILDITPCSFGGVSVITPGTNTSNQVAVLYQGVNCTEVPVAIHADQLTPTWRVYSTGSNVFQTRAGCLIGAEHVNNSYECDIPIGAGICASYQTQTNSPRRARSVASQSIIAYTMSLGAENSVAYSNNSIAIPTNFTISVTTEILPVSMTKTSVDCTMYICGDSTECSNLLLQYGSFCTQLNRALTGIAVEQDKNTQEVFAQVKQIYKTPPIKDFGGFNFSQILPDPSKPSKRSFIEDLLFNKVTLADAGFIKQYGDCLGDIAARDLICAQKFNGLTVLPPLLTDEMIAQYTSALLAGTITSGWTFGAGAALQIPFAMQMAYRFNGIGVTQNVLYENQKLIANQFNSAIGKIQDSLSSTATALGKLQDVVNQNAQALNTLVKQLSSNFGCISSVLNDILSRLDKVEAEVQIDCLITGRLQSLQTYVTQQLIRAAEIRASANLAATKMSECVLGQSKRVDFCGKGYHLMSFPQSAPHGVVFLHVTYVPAQEKNFTTAPAICHDGKAHFPREGVFVSNGTHWFVTQRNFYEPQIITTDNTFVSGNCDVVIGIVNNTVYDPLQPELDSFKEELDKYFKNHTSPDVDLGDISGINASVVNIQKEIDRLNEVAKNLNESLIDLQELGKYEQYIKGGGSGGGQIYEGKLTAEGLRFGIVASRFNHALVDRLVEGAIDAIVRHGGREEDITLVRVPGSWEIPVAAGELARKEDIDAVIAIGVLIRGATPHFDYIASEVSKGLADLSLELRKPITFGVITADTLEQAIERAGTKHGNKGWEAALSAIEMANLFKSLR

SEQ ID NO: 4454 - protein, 1371 aa, Artificial Sequence
  SARS-CoV-2/Belgium/BC-03016/2020__EPI_ISL_415157 spike protein (1-1211)(A972C_R995C) LumSynth construct
MFVFLVLLPLVSSQCVNLTTRTQLPPAYTNSFTRGVYYPDKVFRSSVLHSTQDLFLPFFSNVTWFHAIHVSGTNGTKRFDNPVLPFNDGVYFASTEKSNIIRGWIFGTTLDSKTQSLLIVNNATNVVIKVCEFQFCNDPFLGVYYHKNNKSWMESEFRVYSSANNCTFEYVSQPFLMDLEGKQGNFKNLREFVFKNIDGYFKIYSKHTPINLVRDLPQGFSALEPLVDLPIGINITRFQTLLALHRSYLTPGDSSSGWTAGAAAYYVGYLQPRTFLLKYNENGTITDAVDCALDPLSETKCTLKSFTVEKGIYQTSNFRVQPTESIVRFPNITNLCPFGEVFNATRFASVYAWNRKRISNCVADYSVLYNSASFSTFKCYGVSPTKLNDLCFTNVYADSFVIRGDEVRQIAPGQTGKIADYNYKLPDDFTGCVIAWNSNNLDSKVGGNYNYLYRLFRKSNLKPFERDISTEIYQAGSTPCNGVEGFNCYFPLQSYGFQPTNGVGYQPYRVVVLSFELLHAPATVCGPKKSTNLVKNKCVNFNFNGLTGTGVLTESNKKFLPFQQFGRDIADTTDAVRDPQTLEILDITPCSFGGVSVITPGTNTSNQVAVLYQGVNCTEVPVAIHADQLTPTWRVYSTGSNVFQTRAGCLIGAEHVNNSYECDIPIGAGICASYQTQTNSPRRARSVASQSIIAYTMSLGAENSVAYSNNSIAIPTNFTISVTTEILPVSMTKTSVDCTMYICGDSTECSNLLLQYGSFCTQLNRALTGIAVEQDKNTQEVFAQVKQIYKTPPIKDFGGFNFSQILPDPSKPSKRSFIEDLLFNKVTLADAGFIKQYGDCLGDIAARDLICAQKFNGLTVLPPLLTDEMIAQYTSALLAGTITSGWTFGAGAALQIPFAMQMAYRFNGIGVTQNVLYENQKLIANQFNSAIGKIQDSLSSTAPALGKLQDVVNQNAQALNTLVKQLSSNFGCISSVLNDILSRLDKVEAEVQIDCLITGRLQSLQTYVTQQLIRAAEIRASANLAATKMSECVLGQSKRVDFCGKGYHLMSFPQSAPHGVVFLHVTYVPAQEKNFTTAPAICHDGKAHFPREGVFVSNGTHWFVTQRNFYEPQIITTDNTFVSGNCDVVIGIVNNTVYDPLQPELDSFKEELDKYFKNHTSPDVDLGDISGINASVVNIQKEIDRLNEVAKNLNESLIDLQELGKYEQYIKGGGSGGGQIYEGKLTAEGLRFGIVASRFNHALVDRLVEGAIDAIVRHGGREEDITLVRVPGSWEIPVAAGELARKEDIDAVIAIGVLIRGATPHFDYIASEVSKGLADLSLELRKPITFGVITADTLEQAIERAGTKHGNKGWEAALSAIEMANLFKSLR

SEQ ID NO: 4455 - protein, 1371 aa, Artificial Sequence
  SARS-CoV-2/Germany/BavPat3/2020__EPI_ISL_414521 spike protein (1-1211)(A972C_R995C) LumSynth construct
MFVFLVLLPLVSSQCVNLTTRTQLPPAYTNSFTRGVYYPDKVFRSSVLHSTQDLFLPFFSNVTWFHAIHVSGTNGTKRFDNPVLPFNDGVYFASTEKSNIIRGWIFGTTLDSKTQSLLIVNNATNVVIKVCEFQFCNDPFLGVYYHKNNKSWMESEFRVYSSANNCTFEYVSQPFLMDLEGKQGNFKNLREFVFKNIDGYFKIYSKHTPINLVRDLPQGFSALEPLVDLPIGINITRFQTLLALHRSYLTPGDSSSGWTAGAAAYYVGYLQPRTFLLKYNENGTITDAVDCALDPLSETKCTLKSFTVEKGIYQTSNFRVQPTESIVRFPNITNLCPFGEVFNATRFASVYAWNRKRISNCVADYSVLYNSASFSTFKCYGVSPTKLNDLCFTNVYADSFVIRGDEVRQIAPGQTGKIADYNYKLPDDFTGCVIAWNSNNLDSKVGGNYNYLYRLFRKSNLKPFERDISTEIYQAGSTPCNGVEGFNCYFPLQSYGFQPTNGVGYQPYRVVVLSFELLHAPATVCGPKKSTNLVKNKCVNFNFNGLTGTGVLTESNKKFLPFQQFGRDIADTTDAVRDPQTLEILDITPCSFGGVSVITPGTNTSNQVAVLYQDVNCTEVPVAIHADQLTPTWRVYSTGSNVFQTRAGCLIGAEHVNNSYECDIPIGAGICASYQTQTNSPRRARSVASQSIIAYTMSLGAENSVAYSNNSIAIPTNFTISVTTEILPVSMTKTSVDCTMYICGDSTECSNLLLQYGSFCTQLNRALTGIAVEQDKNTQQVFAQVKQIYKTPPIKDFGGFNFSQILPDPSKPSKRSFIEDLLFNKVTLADAGFIKQYGDCLGDIAARDLICAQKFNGLTVLPPLLTDEMIAQYTSALLAGTITSGWTFGAGAALQIPFAMQMAYRFNGIGVTQNVLYENQKLIANQFNSAIGKIQDSLSSTASALGKLQDVVNQNAQALNTLVKQLSSNFGCISSVLNDILSRLDKVEAEVQIDCLITGRLQSLQTYVTQQLIRAAEIRASANLAATKMSECVLGQSKRVDFCGKGYHLMSFPQSAPHGVVFLHVTYVPAQEKNFTTAPAICHDGKAHFPREGVFVSNGTHWFVTQRNFYEPQIITTDNTFVSGNCDVVIGIVNNTVYDPLQPELDSFKEELDKYFKNHTSPDVDLGDISGINASVVNIQKEIDRLNEVAKNLNESLIDLQELGKYEQYIKGGGSGGGQIYEGKLTAEGLRFGIVASRFNHALVDRLVEGAIDAIVRHGGREEDITLVRVPGSWEIPVAAGELARKEDIDAVIAIGVLIRGATPHFDYIASEVSKGLADLSLELRKPITFGVITADTLEQAIERAGTKHGNKGWEAALSAIEMANLFKSLR

SEQ ID NO: 4456 - protein, 1371 aa, Artificial Sequence
  SARS-CoV-2/France/HF1805/2020__EPI_ISL_414628 spike protein (1-1211)(A972C_R995C) LumSynth construct
MFVFLVLLPLVSSQCVNLTTRTQLPPAYTNSFTRGVYYPDKVFRSSVLHSTQDLFLPFFSNVTWFHAIHVSGTNGTKRFDNPVLPFNDGVYFASTEKSNIIRGWIFGTTLDSKTQSLLIVNNATNVVIKVCEFQFCNDPFLGVYYHKNNKSWMESEFRVYSSANNCTFEYVSQPFLMDLEGKQGNFKNLREFVFKNIDGYFKIYSKHTPINLVRDLPQGFSALEPLVDLPIGINITRFQTLLALHRSYLTPGDSSSGWTAGAAAYYVGYLQPRTFLLKYNENGTITDAVDCALDPLSETKCTLKSFTVEKGIYQTSNFRVQPTESIVRFPNITNLCPFGEVFNATRFASVYAWNRKRISNCVADYSVLYNSASFSTFKCYGVSPTKLNDLCFTNVYADSFVIRGDEVRQIAPGQTGKIADYNYKLPDDFTGCVIAWNSNNLDSKVGGNYNYLYRLFRKSNLKPFERDISTEIYQAGSTPCNGVEGFNCYFPLQSYGFQPTNGVGYQPYRVVVLSFELLHAPATVCGPKKSTNLVKNKCVNFNFNGLTGTGVLTESNKKFLPFQQFGRDIADTTDAVRDPQTLEILDITPCSFGGVSVITPGTNTSNQVAVLYQGVNCTEVPVAIHADQLTPTWRVYSTGSNVFQTRAGCLIGAEHVNNSYECDIPIGAGICASYQTQTNSPRRARSVASQSIIAYTMSLGAENSVAYSNNSIAIPTNFTISVTTEILPVSMTKTSVDCTMYICGDSTECSNLLLQYGSFCTQLNRALTGIAVEQDKNTQEVFAQVKQIYKTPPIKDFGGFNFSQILPDPSKPSKRSFIEDLLFNKVTLADAGFIKQYGDCLGDIAARDLICAQKFNGLTVLPPLLTDEMIAQYTSALLAGTITSGWTFGAGAALQIPFAMQMAYRFNGIGVTQNVLYENQKLIANQFNSAIGKIQDSLSSTASALGKLQDVVNQNAQALNTLVKQLSSNFGCISSVLNDILSRLDKVEAEVQIDCLITGRLQSLQTYVTQQLIRAAEIRASANLAATKMSECVLGQSKRVDFCGKGYHLMSFPQSAPHGVVFLHVTYVPAQEKNFTTAPAICHDGKAHFPREGVFVSNGTHWFVTQRNFYEPQIITTDNTFVSGNCDVVIGVVNNTVYDPLQPELDSFKEELDKYFKNHTSPDVDLGDISGINASVVNIQKEIDRLNEVAKNLNESLIDLQELGKYEQYIKGGGSGGGQIYEGKLTAEGLRFGIVASRFNHALVDRLVEGAIDAIVRHGGREEDITLVRVPGSWEIPVAAGELARKEDIDAVIAIGVLIRGATPHFDYIASEVSKGLADLSLELRKPITFGVITADTLEQAIERAGTKHGNKGWEAALSAIEMANLFKSLR

SEQ ID NO: 4457 - protein, 1371 aa, Artificial Sequence
  SARS-CoV-2/Netherlands/ZuidHolland_9/2020__EPI_ISL_414445 spike protein (1-1211)(A972C_R995C) LumSynth construct
MFVFLVLLPLVSSQCVNLTTRTQLPPAYTNSFTRGVYYPDKVFRSSVLHSTQDLFLPFFSNVTWFHAIHVSGTNGTKRFDNPVLPFNDGVYFASTEKSNIIRGWIFGTTLDSKTQSLLIVNNATNVVIKVCEFQFCNDPFLGVYYHKNNKSWMESEFRVYSSANNCTFEYVSQPFLMDLEGKQGNFKNLREFVFKNIDGYFKIYSKHTPINLVRDLPQGFSALEPLVDLPIGINITRFQTLLALHRSYLTPGDSSSGWTAGAAAYYVGYLQPRTFLLKYNENGTITDAVDCALDPLSETKCTLKSFTVEKGIYQTSNFRVQPTESIVRFPNITNLCPFGEVFNATRFASVYAWNRKRISNCVADYSVLYNSASFSTFKCYGVSPTKLNDLCFTNVYADSFVIRGDEVRQIAPGQTGKIADYNYKLPDDFTGCVIAWNSNNLDSKVGGNYNYLYRLFRKSNLKPFERDISTEIYQAGSTPCNGVEGFNCYFPLQSYGFQPTNGVGYQPYRVVVLSFELLHAPATVCGPKKSTNLVKNKCVNFNFNGLTGTGVLTESNKKFLPFQQFGRDIADTTDAVRDPQTLEILDITPCSFGGVSVITPGTNTSNQVAVLYQGVNCTEVPVAIHADQLTPTWRVYSTGSNVFQTRAGCLIGAEHVNNSYECDIPIGAGICASYQTQTNSPRRARSVASQSIIAYTMSLGAENSVAYSNNSIAIPTNFTISVTTEILPVSMTKTSVDCTMYICGDSTECSNLLLQYGSFCTQLNRALTGIAVEQDKNTQEVFAQVKQIYKTPPIKDFGGFNFSQILPDPSKPSKRSFIEDLLFNKVTLADAGFIKQYGDCLGDIAARDLICVQKFNGLTVLPPLLTDEMIAQYTSALLAGTITSGWTFGAGAALQIPFAMQMAYRFNGIGVTQNVLYENQKLIANQFNSAIGKIQDSLSSTASALGKLQDVVNQNAQALNTLVKQLSSNFGCISSVLNDILSRLDKVEAEVQIDCLITGRLQSLQTYVTQQLIRAAEIRASANLAATKMSECVLGQSKRVDFCGKGYHLMSFPQSAPHGVVFLHVTYVPAQEKNFTTAPAICHDGKAHFPREGVFVSNGTHWFVTQRNFYEPQIITTDNTFVSGNCDVVIGIVNNTVYDPLQPELDSFKEELDKYFKNHTSPDVDLGDISGINASVVNIQKEIDRLNEVAKNLNESLIDLQELGKYEQYIKGGGSGGGQIYEGKLTAEGLRFGIVASRFNHALVDRLVEGAIDAIVRHGGREEDITLVRVPGSWEIPVAAGELARKEDIDAVIAIGVLIRGATPHFDYIASEVSKGLADLSLELRKPITFGVITADTLEQAIERAGTKHGNKGWEAALSAIEMANLFKSLR

SEQ ID NO: 4458 - protein, 1371 aa, Artificial Sequence
  SARS-CoV-2/Finland/FIN03032020A/2020__EPI_ISL_413602 spike protein (1-1211)(A972C_R995C) LumSynth construct
MFVFLVLLPLVSSQCVNLTTRTQLPPAYTNSFTRGVYYPDKVFRSSVLHSTQDLFLPFFSNVTWFHAIHVSGTNGTKRFDNPVLPFNDGVYFASTEKSNIIRGWIFGTTLDSKTQSLLIVNNATNVVIKVCEFQFCNDPFLGVYYHKNNKSWMESEFRVYSSANNCTFEYVSQPFLMDLEGKQGNFKNLREFVFKNIDGYFKIYSKHTPINLVRDLPQGFSALEPLVDLPIGINITRFQTLLALHRSYLTPGDSSSGWTAGAAAYYVGYLQPRTFLLKYNENGTITDAVDCALDPLSETKCTLKSFTVEKGIYQTSNFRVQPTESIVRFPNITNLCPFGEVFNATRFASVYAWNRKRISNCVADYSVLYNSASFSTFKCYGVSPTKLNDLCFTNVYADSFVIRGDEVRQIAPGQTGKIADYNYKLPDDFTGCVISWNSNNLDSKVGGNYNYLYRLFRKSNLKPFERDISTEIYQAGSTPCNGVEGFNCYFPLQSYGFQPTNGVGYQPYRVVVLSFELLHAPATVCGPKKSTNLVKNKCVNFNFNGLTGTGVLTESNKKFLPFQQFGRDIADTTDAVRDPQTLEILDITPCSFGGVSVITPGTNTSNQVAVLYQGVNCTEVPVAIHADQLTPTWRVYSTGSNVFQTRAGCLIGAEHVNNSYECDIPIGAGICASYQTQTNSPRRARSVASQSIIAYTMSLGAENSVAYSNNSIAIPTNFTISVTTEILPVSMTKTSVDCTMYICGDSTECSNLLLQYGSFCTQLNRALTGIAVEQDKNTQEVFAQVKQIYKTPPIKDFGGFNFSQILPDPSKPSKRSFIEDLLFNKVTLADAGFIKQYGDCLGDIAARDLICAQKFNGLTVLPPLLTDEMIAQYTSALLAGTITSGWTFGAGAALQIPFAMQMAYRFNGIGVTQNVLYENQKLIANQFNSAIGKIQDSLSSTASALGKLQDVVNQNAQALNTLVKQLSSNFGCISSVLNDILSRLDKVEAEVQIDCLITGRLQSLQTYVTQQLIRAAEIRASANLAATKMSECVLGQSKRVDFCGKGYHLMSFPQSAPHGVVFLHVTYVPAQEKNFTTAPAICHDGKAHFPREGVFVSNGTHWFVTQRNFYEPQIITTDNTFVSGNCDVVIGIVNNTVYDPLQPELDSFKEELDKYFKNHTSPDVDLGDISGINASVVNIQKEIDRLNEVAKNLNESLIDLQELGKYEQYIKGGGSGGGQIYEGKLTAEGLRFGIVASRFNHALVDRLVEGAIDAIVRHGGREEDITLVRVPGSWEIPVAAGELARKEDIDAVIAIGVLIRGATPHFDYIASEVSKGLADLSLELRKPITFGVITADTLEQAIERAGTKHGNKGWEAALSAIEMANLFKSLR

SEQ ID NO: 4459 - protein, 1371 aa, Artificial Sequence
  SARS-CoV-2/France/GE1977/2020__EPI_ISL_414632 spike protein (1-1211)(A972C_R995C) LumSynth construct
MFVFLVLLPLVSSQCVNLTTRTQLPPAYTNSFTRGVYYPDKVFRSSVLHSTQDLFLPFFSNVTWFHAIHVSGTNGTKRFDNPVLPFNDGVYFASTEKSNIIRGWIFGTTLDSKTQSLLIVNNATNVVIKVCEFQFCNDPFLGVYYHKNNKSWMESEFRVYSSANNCTFEYVSQPFLMDLEGKQGNFKNLREFVFKNIDGYFKIYSKHTPINLVRDLPQGFSALEPLVDLPIGINITRFQTLLALHRSYLTPGDSSSGWTAGAAAYYVGYLQPRTFLLKYNENGTITDAVDCALDPLSETKCTLKSFTVEKGIYQTSNFRVQPTESIVRFPNITNLCPFGEVFNATRFASVYAWNRKRISNCVADYSVLYNSASFSTFKCYGVSPTKLNDLCFTNVYADSFVIRGDEVRQIAPGQTGKIADYNYKLPDDFTGCVIAWNSNNLDSKVGGNYNYLYRLFRKSNLKPFERDISTEIYQAGSTPCNGVEGFNCYFPLQSYGFQPTNGVGYQPYRVVVLSFELLHAPATVCGPKKSTNLVKNKCVNFNFNGLTGTGVLTESNKKFLPFQQFGRDIADTTDAVRDPQTLEILDITPCSFGGVSVITPGTNTSNQVAVLYQGVNCTEVPVAIHADQLTPTWRVYSTGSNVFQTRAGCLIGAEHVNNSYECDIPIGAGICASYQTQTNSPRRARSVASQSIIAYTMSLGAENSVAYSNNSIAIPTNFTISVTTEILPVSMTKTSVDCTMYICGDSTECSNLLLQYGSFCTQLNRALTGIAVEQDKNTQEVFAQVKQIYKTPPIKDFGGFNFSQILPDPSKPSKRSFIEDLLFNKVTLADAGFIKQYGDCLGDIAARDLICAQKFNGLTVLPPLLTDEMIAQYTSALLAGTITSGWTFGAGAALQIPFAMQMAYRFNGIGVTQNVLYENQKLIANQFNSAIGKIQDSLFSTASALGKLQDVVNQNAQALNTLVKQLSSNFGCISSVLNDILSRLDKVEAEVQIDCLITGRLQSLQTYVTQQLIRAAEIRASANLAATKMSECVLGQSKRVDFCGKGYHLMSFPQSAPHGVVFLHVTYVPAQEKNFTTAPAICHDGKAHFPREGVFVSNGTHWFVTQRNFYEPQIITTDNTFVSGNCDVVIGIVNNTVYDPLQPELDSFKEELDKYFKNHTSPDVDLGDISGINASVVNIQKEIDRLNEVAKNLNESLIDLQELGKYEQYIKGGGSGGGQIYEGKLTAEGLRFGIVASRFNHALVDRLVEGAIDAIVRHGGREEDITLVRVPGSWEIPVAAGELARKEDIDAVIAIGVLIRGATPHFDYIASEVSKGLADLSLELRKPITFGVITADTLEQAIERAGTKHGNKGWEAALSAIEMANLFKSLR

SEQ ID NO: 4460 - protein, 1371 aa, Artificial Sequence
  SARS-CoV-2/Finland/FIN-313/2020__EPI_ISL_414641 spike protein (1-1211)(A972C_R995C) LumSynth construct
MFVFLVLLPLVSSQCVNLTTRTQLPPAYTNSFTRGVYYPDKVFRSSVLHSTQDLFLPFFSNVTWFHAIHVSGTNGTKRFDNPVLPFNDGVYFASTEKSNIIRGWIFGTTLDSKTQSLLIVNNATNVVIKVCEFQFCNDPFLGVYYHKNNKSWMESEFRVYSSANNCTFEYVSQPFLMDLEGKQGNFKNLREFVFKNIDGYFKIYSKHTPINLVRDLPQGFSALEPLVDLPIGINITRFKTLLALHRSYLTPGDSSSGWTAGAAAYYVGYLQPRTFLLKYNENGTITDAVDCALDPLSETKCTLKSFTVEKGIYQTSNFRVQPTESIVRFPNITNLCPFGEVFNATRFASVYAWNRKRISNCVADYSVLYNSASFSTFKCYGVSPTKLNDLCFTNVYADSFVIRGDEVRQIAPGQTGKIADYNYKLPDDFTGCVIAWNSNNLDSKVGGNYNYLYRLFRKSNLKPFERDISTEIYQAGSTPCNGVEGFNCYFPLQSYGFQPTNGVGYQPYRVVVLSFELLHAPATVCGPKKSTNLVKNKCVNFNFNGLTGTGVLTESNKKFLPFQQFGRDIADTTDAVRDPQTLEILDITPCSFGGVSVITPGTNTSNQVAVLYQGVNCTEVPVAIHADQLTPTWRVYSTGSNVFQTRAGCLIGAEHVNNSYECDIPIGAGICASYQTQTNSPRRARSVASQSIIAYTMSLGAENSVAYSNNSIAIPTNFTISVTTEILPVSMTKTSVDCTMYICGDSTECSNLLLQYGSFCTQLNRALTGIAVEQDKNTQEVFAQVKQIYKTPPIKDFGGFNFSQILPDPSKPSKRSFIEDLLFNKVTLADAGFIKQYGDCLGDIAARDLICAQKFNGLTVLPPLLTDEMIAQYTSALLAGTITSGWTFGAGAALQIPFAMQMAYRFNGIGVTQNVLYENQKLIANQFNSAIGKIQDSLSSTASALGKLQDVVNQNAQALNTLVKQLSSNFGCISSVLNDILSRLDKVEAEVQIDCLITGRLQSLQTYVTQQLIRAAEIRASANLAATKMSECVLGQSKRVDFCGKGYHLMSFPQSAPHGVVFLHVTYVPAQEKNFTTAPAICHDGKAHFPREGVFVSNGTHWFVTQRNFYEPQIITTDNTFVSGNCDVVIGIVNNTVYDPLQPELDSFKEELDKYFKNHTSPDVDLGDISGINASVVNIQKEIDRLNEVAKNLNESLIDLQELGKYEQYIKGGGSGGGQIYEGKLTAEGLRFGIVASRFNHALVDRLVEGAIDAIVRHGGREEDITLVRVPGSWEIPVAAGELARKEDIDAVIAIGVLIRGATPHFDYIASEVSKGLADLSLELRKPITFGVITADTLEQAIERAGTKHGNKGWEAALSAIEMANLFKSLR

SEQ ID NO: 4461 - protein, 1371 aa, Artificial Sequence
  SARS-CoV-2/Netherlands/ZuidHolland_2/2020__EPI_ISL_414556 spike protein (1-1211)(A972C_R995C) LumSynth construct
MFVFLVLLPLVSSQCVNLTTRTQLPPAYTNSFTRGVYYPDKVFRSSVLHSTQDLFLPFFSNVTWFHAIHVSGTNGTKRFDNPVLPFNDGVYFASTEKSNIIRGWIFGTTLDSKTQSLLIVNNATNVVIKVCEFQFCNDPFLGVYYHKNNKSWMESEFRVYSSANNCTFEYVSQPFLMDLEGKQGNFKNLREFVFKNIDGYFKIYSKHTPINLVRDLPQGFSALEPLVDLPIGINITRFQTLLALHRSYLTPGDSSSGWTAGAAAYYVGYLQPRTFLLKYNENGTITDAVDCALDPLSETKCTLKSFTVEKGIYQTSNFRVQPTESIVRFPNITNLCPFGEVFNATRFASVYAWNRKRISNCVADYSVLYNSASFSTFKCYGVSPTKLNDLCFTNVYADSFVIRGDEVRQIAPGQTGKIADYNYKLPDDFTGCVIAWNSNNLDSKVGGNYNYLYRLFRKSNLKPFERDISTEIYQAGSTPCNGVEGFNCYFPLQSYGFQPTNGVGYQPYRVVVLSFELLHAPATVCGPKKSTNLVKNKCVNFNFNGLTGTGVLTESNKKFLPFQQFGRDIADTTDAVRDPQTLEILDITPCSFGGVSVITPGTNTSNQVAVLYQGVNCTEVPVAIHADQLTPTWRVYSTGSNVFQTRAGCLIGAEHVNNSYECDIPIGAGICASYQTQTNSPRRARSVASQSIIAYTMSLGAENSVAYSNNSIAIPTNFTISVTTEILPVSMTKTSVDCTMYICGDSTECSNLLLQYGSFCTQLNRALTGIALEQDKNTQEVFAQVKQIYKTPPIKDFGGFNFSQILPDPSKPSKRSFIEDLLFNKVTLADAGFIKQYGDCLGDIAARDLICAQKFNGLTVLPPLLTDEMIAQYTSALLAGTITSGWTFGAGAALQIPFAMQMAYRFNGIGVTQNVLYENQKLIANQFNSAIGKIQDSLSSTASALGKLQDVVNQNAQALNTLVKQLSSNFGCISSVLNDILSRLDKVEAEVQIDCLITGRLQSLQTYVTQQLIRAAEIRASANLAATKMSECVLGQSKRVDFCGKGYHLMSFPQSAPHGVVFLHVTYVPAQEKNFTTAPAICHDGKAHFPREGVFVSNGTHWFVTQRNFYEPQIITTDNTFVSGNCDVVIGIVNNTVYDPLQPELDSFKEELDKYFKNHTSPDVDLGDISGINASVVNIQKEIDRLNEVAKNLNESLIDLQELGKYEQYIKGGGSGGGQIYEGKLTAEGLRFGIVASRFNHALVDRLVEGAIDAIVRHGGREEDITLVRVPGSWEIPVAAGELARKEDIDAVIAIGVLIRGATPHFDYIASEVSKGLADLSLELRKPITFGVITADTLEQAIERAGTKHGNKGWEAALSAIEMANLFKSLR

SEQ ID NO: 4462 - protein, 1371 aa, Artificial Sequence
  SARS-CoV-2/USA/WA-UW31/2020__EPI_ISL_414618 spike protein (1-1211)(A972C_R995C) LumSynth construct
MFVFLVLLPLVSSQCVNLTTRTQLPPAYTNSFTRGVYYPDKVFRSSVLHSTQDLFLPFFSNVTWFHAIHVSGTNGTKRFDNPVLPFNDGVYFASTEKSNIIRGWIFGTTLDSKTQSLLIVNNATNVVIKVCEFQFCNDPFLGVYYHKNNKSWMESEFRVYSSANNCTFEYVSQPFLMDLEGKQGNFKNLREFVFKNIDGYFKIYSKHTPINLVRDLPQGFSALEPLVDLPIGINITRFQTLLALHRSYLTPGDSSSGWTAGAAAYYVGYLQPRTFLLKYNENGTITDAVDCALDPLSETKCTLKSFTVEKGIYQTSNFRVQPTESIVRFPNITNLCPFGEVFNATRFASVYAWNRKRISNCVADYSVLYNSASFSTFKCYGVSPTKLNDLCFTNVYADSFVIRGDEVRQIAPGQTGKIADYNYKLPDDFTGCVIAWNSNNLDSKVGGNYNYLYRLFRKSNLKPFERDISTEIYQAGSTPCNGAEGFNCYFPLQSYGFQPTNGVGYQPYRVVVLSFELLHAPATVCGPKKSTNLVKNKCVNFNFNGLTGTGVLTESNKKFLPFQQFGRDIADTTDAVRDPQTLEILDITPCSFGGVSVITPGTNTSNQVAVLYQDVNCTEVPVAIHADQLTPTWRVYSTGSNVFQTRAGCLIGAEHVNNSYECDIPIGAGICASYQTQTNSPRRARSVASQSIIAYTMSLGAENSVAYSNNSIAIPTNFTISVTTEILPVSMTKTSVDCTMYICGDSTECSNLLLQYGSFCTQLNRALTGIAVEQDKNTQEVFAQVKQIYKTPPIKDFGGFNFSQILPDPSKPSKRSFIEDLLFNKVTLADAGFIKQYGDCLGDIAARDLICAQKFNGLTVLPPLLTDEMIAQYTSALLAGTITSGWTFGAGAALQIPFAMQMAYRFNGIGVTQNVLYENQKLIANQFNSAIGKIQDSLSSTASALGKLQDVVNQNAQALNTLVKQLSSNFGCISSVLNDILSRLDKVEAEVQIDCLITGRLQSLQTYVTQQLIRAAEIRASANLAATKMSECVLGQSKRVDFCGKGYHLMSFPQSAPHGVVFLHVTYVPAQEKNFTTAPAICHDGKAHFPREGVFVSNGTHWFVTQRNFYEPQIITTDNTFVSGNCDVVIGIVNNTVYDPLQPELDSFKEELDKYFKNHTSPDVDLGDISGINASVVNIQKEIDRLNEVAKNLNESLIDLQELGKYEQYIKGGGSGGGQIYEGKLTAEGLRFGIVASRFNHALVDRLVEGAIDAIVRHGGREEDITLVRVPGSWEIPVAAGELARKEDIDAVIAIGVLIRGATPHFDYIASEVSKGLADLSLELRKPITFGVITADTLEQAIERAGTKHGNKGWEAALSAIEMANLFKSLR

SEQ ID NO: 4463 - protein, 1371 aa, Artificial Sequence
  SARS-CoV-2/South Korea/SNU01/2020__EPI_ISL_411929 spike protein (1-1211)(A972C_R995C) LumSynth construct
MFVFLVLLPLVSSQCVNLTTRTQLPPAYTNSFTRGVYYPDKVFRSSVLHSTQDLFLPFFSNVTWFHAIHVSGTNGTKRFDNPVLPFNDGVYFASTEKSNIIRGWIFGTTLDSKTQSLLIVNNATNVVIKVCEFQFCNDPFLGVYYHKNNKSWMESEFRVYSSANNCTFEYVSQPFLMDLEGKQGNFKNLREFVFKNIDGYFKIYSKHTPINLVRDLPQGFWALEPLVDLPIGINITRFQTLLALHRSYLTPGDSSSGWTAGAAAYYVGYLQPRTFLLKYNENGTITDAVDCALDPLSETKCTLKSFTVEKGIYQTSNFRVQPTESIVRFPNITNLCPFGEVFNATRFASVYAWNRKRISNCVADYSVLYNSASFSTFKCYGVSPTKLNDLCFTNVYADSFVIRGDEVRQIAPGQTGKIADYNYKLPDDFTGCVIAWNSNNLDSKVGGNYNYLYRLFRKSNLKPFERDISTEIYQAGSTPCNGVEGFNCYFPLQSYGFQPTNGVGYQPYRVVVLSFELLHAPATVCGPKKSTNLVKNKCVNFNFNGLTGTGVLTESNKKFLPFQQFGRDIADTTDAVRDPQTLEILDITPCSFGGVSVITPGTNTSNQVAVLYQDVNCTEVPVAIHADQLTPTWRVYSTGSNVFQTRAGCLIGAEHVNNSYECDIPIGAGICASYQTQTNSPRRARSVASQSIIAYTMSLGAENSVAYSNNSIAIPTNFTISVTTEILPVSMTKTSVDCTMYICGDSTECSNLLLQYGSFCTQLNRALTGIAVEQDKNTQEVFAQVKQIYKTPPIKDFGGFNFSQILPDPSKPSKRSFIEDLLFNKVTLADAGFIKQYGDCLGDIAARDLICAQKFNGLTVLPPLLTDEMIAQYTSALLAGTITSGWTFGAGAALQIPFAMQMAYRFNGIGVTQNVLYENQKLIANQFNSAIGKIQDSLSSTASALGKLQDVVNQNAQALNTLVKQLSSNFGCISSVLNDILSRLDKVEAEVQIDCLITGRLQSLQTYVTQQLIRAAEIRASANLAATKMSECVLGQSKRVDFCGKGYHLMSFPQSAPHGVVFLHVTYVPAQEKNFTTAPAICHDGKAHFPREGVFVSNGTHWFVTQRNFYEPQIITTDNTFVSGNCDVVIGIVNNTVYDPLQPELDSFKEELDKYFKNHTSPDVDLGDISGINASVVNIQKEIDRLNEVAKNLNESLIDLQELGKYEQYIKGGGSGGGQIYEGKLTAEGLRFGIVASRFNHALVDRLVEGAIDAIVRHGGREEDITLVRVPGSWEIPVAAGELARKEDIDAVIAIGVLIRGATPHFDYIASEVSKGLADLSLELRKPITFGVITADTLEQAIERAGTKHGNKGWEAALSAIEMANLFKSLR

SEQ ID NO: 4464 - protein, 1371 aa, Artificial Sequence
  SARS-CoV-2/China/WF0004/2020__EPI_ISL_413694 spike protein (1-1211)(A972C_R995C) LumSynth construct
MFVFLVLLPLVSSQCVNLTTRTQLPPAYTNSFTRGVYYPDKVFRSSVLHSTQDLFLPFFSNVTWFHAIHVSGTNGTKRFDNPVLPFNDGVYFASTEKSNIIRGWIFGTTLDSKTQSLLIVNNATNVVIKVCEFQFCNDPFLGVYYHKNNKSWTESEFRVYSSANNCTFEYVSQPFLMDLEGKQGNFKNLREFVFKNIDGYFKIYSKHTPINLVRDLPQGFSALEPLVDLPIGINITRFQTLLALHRSYLTPGDSSSGWTAGAAAYYVGYLQPRTFLLKYNENGTITDAVDCALDPLSETKCTLKSFTVEKGIYQTSNFRVQPTESIVRFPNITNLCPFGEVFNATRFASVYAWNRKRISNCVADYSVLYNSASFSTFKCYGVSPTKLNDLCFTNVYADSFVIRGDEVRQIAPGQTGKIADYNYKLPDDFTGCVIAWNSNNLDSKVGGNYNYLYRLFRKSNLKPFERDISTEIYQAGSTPCNGVEGFNCYFPLQSYGFQPTNGVGYQPYRVVVLSFELLHAPATVCGPKKSTNLVKNKCVNFNFNGLTGTGVLTESNKKFLPFQQFGRDIADTTDAVRDPQTLEILDITPCSFGGVSVITPGTNTSNQVAVLYQDVNCTEVPVAIHADQLTPTWRVYSTGSNVFQTRAGCLIGAEHVNNSYECDIPIGAGICASYQTQTNSPRRARSVASQSIIAYTMSLGAENSVAYSNNSIAIPTNFTISVTTEILPVSMTKTSVDCTMYICGDSTECSNLLLQYGSFCTQLNRALTGIAVEQDKNTQEVFAQVKQIYKTPPIKDFGGFNFSQILPDPSKPSKRSFIEDLLFNKVTLADAGFIKQYGDCLGDIAARDLICAQKFNGLTVLPPLLTDEMIAQYTSALLAGTITSGWTFGAGAALQIPFAMQMAYRFNGIGVTQNVLYENQKLIANQFNSAIGKIQDSLSSTASALGKLQDVVNQNAQALNTLVKQLSSNFGCISSVLNDILSRLDKVEAEVQIDCLITGRLQSLQTYVTQQLIRAAEIRASANLAATKMSECVLGQSKRFDFCGKGYHLMSFPQSAPHGVVFLHVTYVPAQEKNFTTAPAICHDGKAHFPREGVFVSNGTHWFVTQRNFYEPQIITTDNTFVSGNCDVVIGIVNNTVYDPLQPELDSFKEELDKYFKNHTSPDVDLGDISGINASVVNIQKEIDRLNEVAKNLNESLIDLQELGKYEQYIKGGGSGGGQIYEGKLTAEGLRFGIVASRFNHALVDRLVEGAIDAIVRHGGREEDITLVRVPGSWEIPVAAGELARKEDIDAVIAIGVLIRGATPHFDYIASEVSKGLADLSLELRKPITFGVITADTLEQAIERAGTKHGNKGWEAALSAIEMANLFKSLR

SEQ ID NO: 4465 - protein, 1371 aa, Artificial Sequence
  SARS-CoV-2/China/WF0028/2020__EPI_ISL_413791 spike protein (1-1211)(A972C_R995C) LumSynth construct
MFVFLVLLPLVSSQCVNLTTRTQLPPAYTNSFTRGVYYPDKVFRSSVLHSTQDLFLPFFSNVTWFHAIHVSGTNGTKRFDNPVLPFNDGVYFASTEKSNIIRGWIFGTTLDSKTQSLLIVNNATNVVIKVCEFQFCNDPFLGVYYHKNNKSWMESEFRVYSSANNCTFEYVSQPFLMDLEGKQGNFKNLREFVFKNIDGYFKIYSKHTPINLVRDLPQGFSALEPLVDLPIGINITRFQTLLALHRSYLTPGDSSSGWTAGAAAYYVGYLQPRTFLLKYNENGTITDAVDCALDPLSETKCTLKSFTVEKGIYQTSNFRVQPTESIVRFPNITNLCPFGEVFNATRFASVYAWNRKRISNCVADYSVLYNSASFSTFKCYGVSPTKLNDLCFTNVYADSFVIRGDEVRQIAPGQTGKIADYNYKLPDDFTGCVIAWNSNNLDSKVGGNYNYLYRLFRKSNLKPFERDISTEIYQAGSTPCNGVEGFNCYFPLQSYGFQPTNGVGYQPYRVVVLSFELLHAPATVCGPKKSTNLVKNKCVNFNFNGLTGTGVLTESNKKFLPFQQFGRDIADTTDAVRDPQTLEILDITPCSFGGVSVITPGTNTSNQVAVLYQDVNCTEVPVAIHADQLTPTWRVYSTGSNVFQTRAGCLIGAEHVNNSYECDIPIGAGICASYQTQTNSPRRARSVASQSIIAYTMSLGAENSVAYSNNSIAIPTNFTISVTTEILPVSMTKTSVDCTMYICGDSTECSNLLLQYGSFCTQLNRALTGIAVEQDKNTQEVFAQVKQIYKTPPIKDFGGFNFSQILPDPSKPSKRSFIEDLLFNKVTLADAGFIKQYGDCLGDIAARDLICAQKFNGLTVLPPLLTDEMIAQYTSALLAGTITSGWTFGAGAALQIPFAMQMAYRFNGIGVTQNVLYENQKLIANQFNSAIGKIQDSLSSTASALGKLQDVVNQNAQALNTLVKQLSSNFGCISSVLNDILSRLDKVEAEVQIDCLITGRLQSLQTYVTQQLIRAAEIRASANLAATKMSECVLGQSKRVDFCGKGYHLMSFPQSAPHGVVFLHVTYVPAQEKNFTTAPAICHDGKAHFPREGVFVSNGTHWFVTQRNFYEPQIITTDNTFVSGNCDVVIGIVNNTVYDPLQPELESFKEELDKYFKNHTSPDVDLGDISGINASVVNIQKEIDRLNEVAKNLNESLIDLQELGKYEQYIKGGGSGGGQIYEGKLTAEGLRFGIVASRFNHALVDRLVEGAIDAIVRHGGREEDITLVRVPGSWEIPVAAGELARKEDIDAVIAIGVLIRGATPHFDYIASEVSKGLADLSLELRKPITFGVITADTLEQAIERAGTKHGNKGWEAALSAIEMANLFKSLR

SEQ ID NO: 4466 - protein, 1371 aa, Artificial Sequence
  SARS-CoV-2/2019-nCoV/USA-CruiseA-18/2020__MT159716.1 spike protein (1-1211)(A972C_R995C) LumSynth construct
MFVFLVLLPLVSSQCVNLTTRTQLPPAYTNSFTRGVYYPDKVFRSSVLHSTQDLFLPFFSNVTWFHAIHVSGTNGTKRFDNPVLPFNDGVYFASTEKSNIIRGWIFGTTLDSKTQSLLIVNNATNVVIKVCEFQFCNDPFLGVYYHKNNKSWMESELRVYSSANNCTFEYVSQPFLMDLEGKQGNFKNLREFVFKNIDGYFKIYSKHTPINLVRDLPQGFSALEPLVDLPIGINITRFQTLLALHRSYLTPGDSSSGWTAGAAAYYVGYLQPRTFLLKYNENGTITDAVDCALDPLSETKCTLKSFTVEKGIYQTSNFRVQPTESIVRFPNITNLCPFGEVFNATRFASVYAWNRKRISNCVADYSVLYNSASFSTFKCYGVSPTKLNDLCFTNVYADSFVIRGDEVRQIAPGQTGKIADYNYKLPDDFTGCVIAWNSNNLDSKVGGNYNYLYRLFRKSNLKPFERDISTEIYQAGSTPCNGVEGFNCYFPLQSYGFQPTNGVGYQPYRVVVLSFELLHAPATVCGPKKSTNLVKNKCVNFNFNGLTGTGVLTESNKKFLPFQQFGRDIADTTDAVRDPQTLEILDITPCSFGGVSVITPGTNTSNQVAVLYQDVNCTEVPVAIHADQLTPTWRVYSTGSNVFQTRAGCLIGAEHVNNSYECDIPIGAGICASYQTQTNSPRRARSVASQSIIAYTMSLGAENSVAYSNNSIAIPTNFTISVTTEILPVSMTKTSVDCTMYICGDSTECSNLLLQYGSFCTQLNRALTGIAVEQDKNTQEVFAQVKQIYKTPPIKDFGGFNFSQILPDPSKPSKRSFIEDLLFNKVTLADAGFIKQYGDCLGDIAARDLICAQKFNGLTVLPPLLTDEMIAQYTSALLAGTITSGWTFGAGAALQIPFAMQMAYRFNGIGVTQNVLYENQKLIANQFNSAIGKIQDSLSSTASALGKLQDVVNQNAQALNTLVKQLSSNFGCISSVLNDILSRLDKVEAEVQIDCLITGRLQSLQTYVTQQLIRAAEIRASANLAATKMSECVLGQSKRVDFCGKGYHLMSFPQSAPHGVVFLHVTYVPAQEKNFTTAPAICHDGKAHFPREGVFVSNGTHWFVTQRNFYEPQIITTDNTFVSGNCDVVIGIVNNTVYDPLQPELDSFKEELDKYFKNHTSPDVDLGDISGINASVVNIQKEIDRLNEVAKNLNESLIDLQELGKYEQYIKGGGSGGGQIYEGKLTAEGLRFGIVASRFNHALVDRLVEGAIDAIVRHGGREEDITLVRVPGSWEIPVAAGELARKEDIDAVIAIGVLIRGATPHFDYIASEVSKGLADLSLELRKPITFGVITADTLEQAIERAGTKHGNKGWEAALSAIEMANLFKSLR

SEQ ID NO: 4467 - protein, 1371 aa, Artificial Sequence
  SARS-CoV-2/SARS-CoV-2/Yunnan-01/human/2020/CHN__MT049951.1 spike protein (1-1211)(A972C_R995C) LumSynth construct
MFVFLVLLPLVSSQCVNLTTRTQLPPANTNSFTRGVYYPDKVFRSSVLHSTQDLFLPFFSNVTWFHAIHVSGTNGTKRFDNPVLPFNDGVYFASTEKSNIIRGWIFGTTLDSKTQSLLIVNNATNVVIKVCEFQFCNDPFLGVYYHKNNKSWMESEFRVYSSANNCTFEYVSQPFLMDLEGKQGNFKNLREFVFKNIDGYFKIYSKHTPINLVRDLPQGFSALEPLVDLPIGINITRFQTLLALHRSYLTPGDSSSGWTAGAAAYYVGYLQPRTFLLKYNENGTITDAVDCALDPLSETKCTLKSFTVEKGIYQTSNFRVQPTESIVRFPNITNLCPFGEVFNATRFASVYAWNRKRISNCVADYSVLYNSASFSTFKCYGVSPTKLNDLCFTNVYADSFVIRGDEVRQIAPGQTGKIADYNYKLPDDFTGCVIAWNSNNLDSKVGGNYNYLYRLFRKSNLKPFERDISTEIYQAGSTPCNGVEGFNCYFPLQSYGFQPTNGVGYQPYRVVVLSFELLHAPATVCGPKKSTNLVKNKCVNFNFNGLTGTGVLTESNKKFLPFQQFGRDIADTTDAVRDPQTLEILDITPCSFGGVSVITPGTNTSNQVAVLYQDVNCTEVPVAIHADQLTPTWRVYSTGSNVFQTRAGCLIGAEHVNNSYECDIPIGAGICASYQTQTNSPRRARSVASQSIIAYTMSLGAENSVAYSNNSIAIPTNFTISVTTEILPVSMTKTSVDCTMYICGDSTECSNLLLQYGSFCTQLNRALTGIAVEQDKNTQEVFAQVKQIYKTPPIKDFGGFNFSQILPDPSKPSKRSFIEDLLFNKVTLADAGFIKQYGDCLGDIAARDLICAQKFNGLTVLPPLLTDEMIAQYTSALLAGTITSGWTFGAGAALQIPFAMQMAYRFNGIGVTQNVLYENQKLIANQFNSAIGKIQDSLSSTASALGKLQDVVNQNAQALNTLVKQLSSNFGCISSVLNDILSRLDKVEAEVQIDCLITGRLQSLQTYVTQQLIRAAEIRASANLAATKMSECVLGQSKRVDFCGKGYHLMSFPQSAPHGVVFLHVTYVPAQEKNFTTAPAICHDGKAHFPREGVFVSNGTHWFVTQRNFYEPQIITTDNTFVSGNCDVVIGIVNNTVYDPLQPELDSFKEELDKYFKNHTSPDVDLGDISGINASVVNIQKEIDRLNEVAKNLNESLIDLQELGKYEQYIKGGGSGGGQIYEGKLTAEGLRFGIVASRFNHALVDRLVEGAIDAIVRHGGREEDITLVRVPGSWEIPVAAGELARKEDIDAVIAIGVLIRGATPHFDYIASEVSKGLADLSLELRKPITFGVITADTLEQAIERAGTKHGNKGWEAALSAIEMANLFKSLR

SEQ ID NO: 4468 - protein, 1371 aa, Artificial Sequence
  SARS-CoV-2/USA/WA-UW292/2020__EPI_ISL_418077 spike protein (1-1211)(A972C_R995C) LumSynth construct
MFVFLVLLPLVSSQCVNLTTRTQLPPAYTNSFTRGVYYPDKVFRSSVLHSTQDLFLPFFSNVTWFHAIHVSGTNGTKRFDNPVLPFNDGVYFASTEKSNIIRGWIFGTTLDSKTQSLLIVNNATNVVIKVCEFQFCNDPFLGVYYHKNNKSWMESEFRVYSSANNCTFEYVSQPFLMDLEGKQGNFKNLREFVFKNIDGYFKIYSKHTPINLVRDLPQGFSALEPLVDLPIGINITRFQTLLALHRSYLTPGDSSSGWTAGAAAYYVGYLQPRTFLLKYNENGTITDAVDCALDPLSETKCTLKSFTVEKGIYQTSNFRVQPTESIVRFPNITNLCPFGEVFNATRFASVYAWNRKRISNCVADYSVLYNSASFSTFKCYGVSPTKLNDLCFTNVYADSFVIRGDEVRQIAPGQTGKIADYNYKLPDDFTGCVIAWNSNNLDSKVGGNYNYLYRLFRKSNLKPFERDISTEIYQASSTPCNGVEGFNCYFPLQSYGFQPTNGVGYQPYRVVVLSFELLHAPATVCGPKKSTNLVKNKCVNFNFNGLTGTGVLTESNKKFLPFQQFGRDIADTTDAVRDPQTLEILDITPCSFGGVSVITPGTNTSNQVAVLYQDVNCTEVPVAIHADQLTPTWRVYSTGSNVFQTRAGCLIGAEHVNNSYECDIPIGAGICASYQTQTNSPRRARSVASQSIIAYTMSLGAENSVAYSNNSIAIPTNFTISVTTEILPVSMTKTSVDCTMYICGDSTECSNLLLQYGSFCTQLNRALTGIAVEQDKNTQEVFAQVKQIYKTPPIKDFGGFNFSQILPDPSKPSKRSFIEDLLFNKVTLADAGFIKQYGDCLGDIAARDLICAQKFNGLTVLPPLLTDEMIAQYTSALLAGTITSGWTFGAGAALQIPFAMQMAYRFNGIGVTQNVLYENQKLIANQFNSAIGKIQDSLSSTASALGKLQDVVNQNAQALNTLVKQLSSNFGCISSVLNDILSRLDKVEAEVQIDCLITGRLQSLQTYVTQQLIRAAEIRASANLAATKMSECVLGQSKRVDFCGKGYHLMSFPQSAPHGVVFLHVTYVPAQEKNFTTAPAICHDGKAHFPREGVFVSNGTHWFVTQRNFYEPQIITTDNTFVSGNCDVVIGIVNNTVYDPLQPELDSFKEELDKYFKNHTSPDVDLGDISGINASVVNIQKEIDRLNEVAKNLNESLIDLQELGKYEQYIKGGGSGGGQIYEGKLTAEGLRFGIVASRFNHALVDRLVEGAIDAIVRHGGREEDITLVRVPGSWEIPVAAGELARKEDIDAVIAIGVLIRGATPHFDYIASEVSKGLADLSLELRKPITFGVITADTLEQAIERAGTKHGNKGWEAALSAIEMANLFKSLR

SEQ ID NO: 4469 - protein, 1371 aa, Artificial Sequence
  SARS-CoV-2/Iceland/192/2020__EPI_ISL_417819 spike protein (1-1211)(A972C_R995C) LumSynth construct
MFVFFVLLPLVSSQCVNLTTRTQLPPAYTNSFTRGVYYPDKVFRSSVLHSTQDLFLPFFSNVTWFHAIHVSGTNGTKRFDNPVLPFNDGVYFASTEKSNIIRGWIFGTTLDSKTQSLLIVNNATNVVIKVCEFQFCNDPFLGVYYHKNNKSWMESEFRVYSSANNCTFEYVSQPFLMDLEGKQGNFKNLREFVFKNIDGYFKIYSKHTPINLVRDLPQGFSALEPLVDLPIGINITRFQTLLALHRSYLTPGDSSSGWTAGAAAYYVGYLQPRTFLLKYNENGTITDAVDCALDPLSETKCTLKSFTVEKGIYQTSNFRVQPTESIVRFPNITNLCPFGEVFNATRFASVYAWNRKRISNCVADYSVLYNSASFSTFKCYGVSPTKLNDLCFTNVYADSFVIRGDEVRQIAPGQTGKIADYNYKLPDDFTGCVIAWNSNNLDSKVGGNYNYLYRLFRKSNLKPFERDISTEIYQAGSTPCNGVEGFNCYFPLQSYGFQPTNGVGYQPYRVVVLSFELLHAPATVCGPKKSTNLVKNKCVNFNFNGLTGTGVLTESNKKFLPFQQFGRDIADTTDAVRDPQTLEILDITPCSFGGVSVITPGTNTSNQVAVLYQGVNCTEVPVAIHADQLTPTWRVYSTGSNVFQTRAGCLIGAEHVNNSYECDIPIGAGICASYQTQTNSPRRARSVASQSIIAYTMSLGAENSVAYSNNSIAIPTNFTISVTTEILPVSMTKTSVDCTMYICGDSTECSNLLLQYGSFCTQLNRALTGIAVEQDKNTQEVFAQVKQIYKTPPIKDFGGFNFSQILPDPSKPSKRSFIEDLLFNKVTLADAGFIKQYGDCLGDIAARDLICAQKFNGLTVLPPLLTDEMIAQYTSALLAGTITSGWTFGAGAALQIPFAMQMAYRFNGIGVTQNVLYENQKLIANQFNSAIGKIQDSLSSTASALGKLQDVVNQNAQALNTLVKQLSSNFGCISSVLNDILSRLDKVEAEVQIDCLITGRLQSLQTYVTQQLIRAAEIRASANLAATKMSECVLGQSKRVDFCGKGYHLMSFPQSAPHGVVFLHVTYVPAQEKNFTTAPAICHDGKAHFPREGVFVSNGTHWFVTQRNFYEPQIITTDNTFVSGNCDVVIGIVNNTVYDPLQPELDSFKEELDKYFKNHTSPDVDLGDISGINASVVNIQKEIDRLNEVAKNLNESLIDLQELGKYEQYIKGGGSGGGQIYEGKLTAEGLRFGIVASRFNHALVDRLVEGAIDAIVRHGGREEDITLVRVPGSWEIPVAAGELARKEDIDAVIAIGVLIRGATPHFDYIASEVSKGLADLSLELRKPITFGVITADTLEQAIERAGTKHGNKGWEAALSAIEMANLFKSLR

SEQ ID NO: 4470 - protein, 1371 aa, Artificial Sequence
  SARS-CoV-2/Belgium/ULG-6939/2020__EPI_ISL_417020 spike protein (1-1211)(A972C_R995C) LumSynth construct
MFVFLVLLPLVSSQCVNLTTRTQLPPAYTNSFTRGVYYPDKVFRSSVLHSTQDLFLPFFSNVTWFHAIHVSGTNGTKRFDNPVLPFNDGVYFASTEKSNIIRGWIFGTTLDSKTQSLLIVNNATNVVIKVCEFQFCNDPFLGVYYHKNNKSWMESEFRVYSSANNCTFEYVSQPFLMDLEGKQGNFKNLREFVFKNIDGYFKIYSKHTPINLVRDLPQGFSALEPLVDLPIGINITRFQTLLALHRSYLTPGDSSSGWTAGAAAYYVGYLQPRTFLLKYNENGTITDAVDCALDPLSETKCTLKSFTVEKGIYQTSNFRVQPTESIVRFPNITNLCPFGEVFNATRFASVYAWNRKRISNCVADYSVLYNSASFSTFKCYGVSPTKLNDLCFTNVYADSFVIRGDEVRQIAPGQTGKIADYNYKLPDDFTGCVIAWNSNNLDSKVGGNYNYLYRLFRKSNLKPFERDISTEIYQAGSTPCNGVEGFNCYFPLQSYGFQPTNGVGYQPYRVVVLSFELLHAPATVCGPKKSTNLVKNKCVNFNFNGLTGTGVLTESNKKFLPFQQFGRDIADTTDAVRDPQTLEILDITPCSFGGVSVITPGTNTSNQVAVLYQGVNCTEVPVAIHADQLTPTWRVYSTGSNVFQTRAGCLIGAEHVNNSYECDIPIGAGICASYQTQTNSPRRARSVASQSIIAYTMSLGAENSVVYSNNSIAIPTNFTISVTTEILPVSMTKTSVDCTMYICGDSTECSNLLLQYGSFCTQLNRALTGIAVEQDKNTQEVFAQVKQIYKTPPIKDFGGFNFSQILPDPSKPSKRSFIEDLLFNKVTLADAGFIKQYGDCLGDIAARDLICAQKFNGLTVLPPLLTDEMIAQYTSALLAGTITSGWTFGAGAALQIPFAMQMAYRFNGIGVTQNVLYENQKLIANQFNSAIGKIQDSLSSTASALGKLQDVVNQNAQALNTLVKQLSSNFGCISSVLNDILSRLDKVEAEVQIDCLITGRLQSLQTYVTQQLIRAAEIRASANLAATKMSECVLGQSKRVDFCGKGYHLMSFPQSAPHGVVFLHVTYVPAQEKNFTTAPAICHDGKAHFPREGVFVSNGTHWFVTQRNFYEPQIITTDNTFVSGNCDVVIGIVNNTVYDPLQPELDSFKEELDKYFKNHTSPDVDLGDISGINASVVNIQKEIDRLNEVAKNLNESLIDLQELGKYEQYIKGGGSGGGQIYEGKLTAEGLRFGIVASRFNHALVDRLVEGAIDAIVRHGGREEDITLVRVPGSWEIPVAAGELARKEDIDAVIAIGVLIRGATPHFDYIASEVSKGLADLSLELRKPITFGVITADTLEQAIERAGTKHGNKGWEAALSAIEMANLFKSLR

SEQ ID NO: 4471 - protein, 1371 aa, Artificial Sequence
  SARS-CoV-2/France/HF2496/2020__EPI_ISL_418231 spike protein (1-1211)(A972C_R995C) LumSynth construct
MFVFLVLLPLVSSQCVNLTTRTQLPPAYTNSFTRGVYYPDKVFRSSVLHSTQDLFLPFFSNVTWFHAIHVSGTNGTKRFDNPVLPFNDGVYFASTEKSNIIRGWIFGTTLDSKTQSLLIVNNATNVVIKVCEFQFCNDPFLGVYYHKNNKSWMESEFRVYSSANNCTFEYVSQPFLMDLEGKQGNFKNLREFVFKNIDGYFKIYSKHTPINLVRDLPQGFSALEPLVDLPIGINITRFQTLLALHRSYLTPGDSSSGWTAGAAAYYVGYLQPRTFLLKYNENGTITDAVDCALDPLSETKCTLKSFTVEKGIYQTSNFRVQPTESIVRFPNITNLCPFGEVFNATRFASVYAWNRKRISNCVADYSVLYNSASFSTFKCYGVSPTKLNDLCFTNVYADSFVIRGDEVRQIAPGQTGKIADYNYKLPDDFTGCVIAWNSNNLDSKVGGNYNYLYRLFRKSNLKPFERDISTEIYQAGSTPCNGVEGFNCYFPLQSYGFQPTNGVGYQPYRVVVLSFELLHAPATVCGPKKSTNLVKNKCVNFNFNGLTGTGVLTESNKKFLPFQQFGRDIADTTDAVRDPQTLEILDITPCSFGGVSVITPGTNTSNQVAVLYQGVNCTEVPVAIHADQLTPTWRVYSTGSNVFQTRAGCLIGAEHVNNSYECDIPIGAGICASYQTQTNSPRRARSVASQSIIAYTMSLGAENSVAYSNNSIAIPTNFTISVTTEILPVSMTKTSVDCTMYICGDSTECSNLLLQYGSFCTQLNRALTGIAVEQDKNTQEVFAQVKQIYKTPPIKDFGGFNFSQILPDPSKPSKRSFIEDLLFNKVTLADAGFIKQYGDCLGDIVARDLICAQKFNGLTVLPPLLTDEMIAQYTSALLAGTITSGWTFGAGAALQIPFAMQMAYRFNGIGVTQNVLYENQKLIANQFNSAIGKIQDSLSSTASALGKLQDVVNQNAQALNTLVKQLSSNFGCISSVLNDILSRLDKVEAEVQIDCLITGRLQSLQTYVTQQLIRAAEIRASANLAATKMSECVLGQSKRVDFCGKGYHLMSFPQSAPHGVVFLHVTYVPAQEKNFTTAPAICHDGKAHFPREGVFVSNGTHWFVTQRNFYEPQIITTDNTFVSGNCDVVIGIVNNTVYDPLQPELDSFKEELDKYFKNHTSPDVDLGDISGINASVVNIQKEIDRLNEVAKNLNESLIDLQELGKYEQYIKGGGSGGGQIYEGKLTAEGLRFGIVASRFNHALVDRLVEGAIDAIVRHGGREEDITLVRVPGSWEIPVAAGELARKEDIDAVIAIGVLIRGATPHFDYIASEVSKGLADLSLELRKPITFGVITADTLEQAIERAGTKHGNKGWEAALSAIEMANLFKSLR

SEQ ID NO: 4472 - protein, 1371 aa, Artificial Sequence
  SARS-CoV-2/USA/WA-UW291/2020__EPI_ISL_418076 spike protein (1-1211)(A972C_R995C) LumSynth construct
MFVFLVLLPLVSSQCVNLTTRTQLPPAYTNSFTRGVYYPDKVFRSSVLHSTQDLFLPFFSNVTWFHAIHVSGTNGTKRFDNPVLPFNDGVYFASTEKSNIIRGWIFGTTLDSKTQSLLIVNNATNVVIKVCEFQFCNDPFLGVYYHKNNKSWMESEFRVYSSANNCTFEYVSQPFLMDLEGKQGNFKNLREFVFKNIDGYFKIYSKHTPINLVRDLPQGFSALEPLVDLPIGINITRFQTLLALHRSYLTPGDSSSGWTAGAAAYYVGYLQPRTFLLKYNENGTITDAVDCALDPLSETKCTLKSFTVEKGIYQTSNFRVQPTESIVRFPNITNLCPFGEVFNATRFASVYAWNRKRISNCVADYSVLYNSASFSTFKCYGVSPTKLNDLCFTNVYADSFVIRGDEVRQIAPGQTGKIADYNYKLPDDFTGCVIAWNSNNLDSKVGGNYNYLYRLFRKSNLKPFERDISTEIYQAGSTPCNGVEGFNCYFPLQSYGFQPTNGVGYQPYRVVVLSFELLHAPATVCGPKKSTNLVKNKCVNFNFNGLTGTGVLTESNKKFLPFQQFGRDIADTTDAVRDPQTLEILDITPCSFGGVSVITPGTNTSNQVAVLYQGVNCTEVPVAIHADQLTPTWRVYSTGSNVFQTRAGCLIGAEHVNNSYECDIPIGAGICASYQTQTNSPRRARSVASQSIIAYTMSLGAENSVAYSNNSIAIPTNFTISVTTEILPVSMTKTSVDCTMYICGDSTECSNLLLQYGSFCTQLNRALTGIAVEQDKNTQEVFAQVKQIYKTPPIKDFGGFNFSQILPDPSKPSKRSFIEDLLFNKVTLADAGFIKQYGDCLGDIAARDLICAQKFNGLTVLPPLLTDEMIAQYTSALLAGTITSGWTFGAGAALQIPFAMQMAYRFNGIGVTQNVLYENQKLIANQFNSAIGKIQYSLSSTASALGKLQDVVNQNAQALNTLVKQLSSNFGCISSVLNDILSRLDKVEAEVQIDCLITGRLQSLQTYVTQQLIRAAEIRASANLAATKMSECVLGQSKRVDFCGKGYHLMSFPQSAPHGVVFLHVTYVPAQEKNFTTAPAICHDGKAHFPREGVFVSNGTHWFVTQRNFYEPQIITTDNTFVSGNCDVVIGIVNNTVYDPLQPELDSFKEELDKYFKNHTSPDVDLGDISGINASVVNIQKEIDRLNEVAKNLNESLIDLQELGKYEQYIKGGGSGGGQIYEGKLTAEGLRFGIVASRFNHALVDRLVEGAIDAIVRHGGREEDITLVRVPGSWEIPVAAGELARKEDIDAVIAIGVLIRGATPHFDYIASEVSKGLADLSLELRKPITFGVITADTLEQAIERAGTKHGNKGWEAALSAIEMANLFKSLR

SEQ ID NO: 4473 - protein, 1371 aa, Artificial Sequence; identical to SEQ ID NO: 4436
  SARS-CoV-2/Portugal/PT0034/2020__EPI_ISL_418019 spike protein (1-1211)(A972C_R995C) LumSynth construct

SEQ ID NO: 4474 - protein, 1371 aa, Artificial Sequence
  SARS-CoV-2/Iceland/202/2020__EPI_ISL_417750 spike protein (1-1211)(A972C_R995C) LumSynth construct
MFVFLVLLPLVSSQCVNLTTRTQLPPAYTNSFTRGVYYPDKVFRSSVLHSTQDLFLPFFSNVTWFHAIHVSGTNGTKRFDNPVLPFNDGVYFASTEKSNIIRGWIFGTTLDSKTQSLLIVNNATNVVIKVCEFQFCNDPFLGVYYHKNNKSWMESEFRVYSSANNCTFEYVSQPFLMDLEGKQGNFKNLREFVFKNIDGYFKIYSKHTPINLVRDLPQGFSALEPLVDLPIGINITRFQTLLALHRSYLTPGDSSSGWTAGAAAYYVGYLQPRTFLLKYNENGTITDAVDCALDPLSETKCTLKSFTVEKGIYQTSNFRVQPTESIVRFPNITNLCPFGEVFNATRFASVYAWNRKRISNCVADYSVLYNSASFSTFKCYGVSPTKLNDLCFTNVYADSFVIRGDEVRQIAPGQTGKIADYNYKLPDDFTGCVIAWNSNNLDSKVGGNYNYLYRLFRKSNLKPFERDISTEIYQAGSTPCNGVEGFNCYFPLQSYGFQPTNGVGYQPYRVVVLSFELLHAPATVCGPKKSTNLVKNKCVNFNFNGLTGTGVLTESNKKFLPFQQFGRDIADTTDAVRDPQTLEILDITPCSFGGVSVITPGTNTSNQVAVLYQDVNCTEVPVAIHADQLTPTWRVYSTGSNVFQTRAGCLIGAEHVNNSYECDIPIGAGICASYQTQTNSPRRARSVASQSIIAYTMSLGAENSVAYSNNSIAIPTNFTISVTTEILPVSMTKTSVDCTMYICGDSTECSNLLLQYGSFCTQLNRALTGIAVEQDKNTQEVFAQVKQIYKTPPIKDFGGFNFSQILPDPSKPSKRSFIEDLLFNKVTLADAGFIKQYGDCLGDIAARDLICAQKFNGLTVLPPLLTDEMIAQYTSALLAGTITSGWTFGAGAALQIPFAMQMAYRFNGIGVTQNVLYENQKLIANQFNSAIGKIQDSLSSTASALGKLQDVVNQNAQALNTLVKQLSSNFGCISSVLNDILSRLDKVEAEVQIDCLITGRLQSLQTYVTQQLIRAAEIRASANLAATKMSECVLGQSKRVDFCGKGYHLMSFPQSAPHGVVFLHVTYVPAQEKNFTTAPAICHDGKAHFPREGVFVSNGTHWFVTQRNFYEPQIITTDNTFVSGNCDVVIGIVNNTVYDPLQPELDSFKEELDKYFKNHTSPDVDLGDIPGINASVVNIQKEIDRLNEVAKNLNESLIDLQELGKYEQYIKGGGSGGGQIYEGKLTAEGLRFGIVASRFNHALVDRLVEGAIDAIVRHGGREEDITLVRVPGSWEIPVAAGELARKEDIDAVIAIGVLIRGATPHFDYIASEVSKGLADLSLELRKPITFGVITADTLEQAIERAGTKHGNKGWEAALSAIEMANLFKSLR

SEQ ID NO: 4475 - protein, 1371 aa, Artificial Sequence
  SARS-CoV-2/USA/WA-UW261/2020__EPI_ISL_418046 spike protein (1-1211)(A972C_R995C) LumSynth construct
MFVFLVLLPLVSSQCVNLTTRTQLPPAYTNSFTRGVYYPDKVFRSSVLHSTQDLFLPFFSNVTWFHAIHVSGTNGTKRFDNPVLPFNDGVYFASTEKSNIIRGWIFGTTLDSKTQSLLIVNNATNVVIKVCEFQFCNDPFLGVYYHKNNKSWMESEFRVYSSANNCTFEYVSQPFLMDLEGKQGNFKNLREFVFKNIDGYFKIYSKHTPINLVRDLPQGFSALEPLVDLPIGINITRFQTLLALHRSYLTPGDSSSGWTAGAAAYYVGYLQPRTFLLKYNENGTITDAVDCALDPLSETKCTLKSFTVEKGIYQTSNFRVQPTESIVRFPNITNLCPFGEVFNATRFTSVYAWNRKRISNCVADYSVLYNSASFSTFKCYGVSPTKLNDLCFTNVYADSFVIRGDEVRQIAPGQTGKIADYNYKLPDDFTGCVIAWNSNNLDSKVGGNYNYLYRLFRKSNLKPFERDISTEIYQAGSTPCNGVEGFNCYFPLQSYGFQPTNGVGYQPYRVVVLSFELLHAPATVCGPKKSTNLVKNKCVNFNFNGLTGTGVLTESNKKFLPFQQFGRDIADTTDAVRDPQTLEILDITPCSFGGVSVITPGTNTSNQVAVLYQDVNCTEVPVAIHADQLTPTWRVYSTGSNVFQTRAGCLIGAEHVNNSYECDIPIGAGICASYQTQTNSPRRARSVASQSIIAYTMSLGAENSVAYSNNSIAIPTNFTISVTTEILPVSMTKTSVDCTMYICGDSTECSNLLLQYGSFCTQLNRALTGIAVEQDKNTQEVFAQVKQIYKTPPIKDFGGFNFSQILPDPSKPSKRSFIEDLLFNKVTLADAGFIKQYGDCLGDIAARDLICAQKFNGLTVLPPLLTDEMIAQYTSALLAGTITSGWTFGAGAALQIPFAMQMAYRFNGIGVTQNVLYENQKLIANQFNSAIGKIQDSLSSTASALGKLQDVVNQNAQALNTLVKQLSSNFGCISSVLNDILSRLDKVEAEVQIDCLITGRLQSLQTYVTQQLIRAAEIRASANLAATKMSECVLGQSKRVDFCGKGYHLMSFPQSAPHGVVFLHVTYVPAQEKNFTTAPAICHDGKAHFPREGVFVSNGTHWFVTQRNFYEPQIITTDNTFVSGNCDVVIGIVNNTVYDPLQPELDSFKEELDKYFKNHTSPDVDLGDISGINASVVNIQKEIDRLNEVAKNLNESLIDLQELGKYEQYIKGGGSGGGQIYEGKLTAEGLRFGIVASRFNHALVDRLVEGAIDAIVRHGGREEDITLVRVPGSWEIPVAAGELARKEDIDAVIAIGVLIRGATPHFDYIASEVSKGLADLSLELRKPITFGVITADTLEQAIERAGTKHGNKGWEAALSAIEMANLFKSLR

SEQ ID NO: 4476 - protein, 1371 aa, Artificial Sequence
  SARS-CoV-2/Portugal/PT0035/2020__EPI_ISL_418020 spike protein (1-1211)(A972C_R995C) LumSynth construct
MFVFLVLLPLVSSQCVNLTTRTQLPPAYTNSFTRGVYYPDKVFRSSVLHSTQDLFLPFFSNVTWFHAIHVSGTNGTKRFDNPVLPFNDGVYFASTEKSNIIRGWIFGTTLDSKTQSLLIVNNATNVVIKVCEFQFCNDPFLGVYYHKNNKSWMESEFRVYSSANNCTFEYVSQPFLMDLEGKQGNFKNLREFVFKNIDGYFKIYSKHTPINLVRDLPQGFSALEPLVDLPIGINITRFQTLLALHRSYLTPGDSSSGWTAGAAAYYVGYLQPRTFLLKYNENGTITDAVDCALDPLSETKCTLKSFTVEKGIYQTSNFRVQPTESIVRFPNITNLCPFGEVFNATRFASVYAWNRKRISNCVADYSVLYNSASFSTFKCYGVSPTKLNDLCFTNVYADSFVIRGDEVRQIAPGQTGKIADYNYKLPDDFTGCVIAWNSNNLDSKVGGNYNYLYRLFRKSNLKPFERDISTEIYQAGSTPCNGVEGFNCYFPLQSYGFQPTNGVGYQPYRVVVLSFELLHAPATVCGPKKSTNLVKNKCVNFNFNGLTGTGVLTESNKKFLPFQQFGRDIADTTDAVRDPQTLEILDITPCSFGGVSVITPGTNTSNQVAVLYQDVNCTEVPVAIHADQLTPTWRVYSTGSNVFQTRAGCLIGAEHVNNSYECDIPIGAGICASYQTQTNSPRRARSVASQSIIAYTMSLGAENSVAYSNNSIAIPTNFTISVTTEILPVSMTKTSVDCTMYICGDSTECSNLLLQYGSFCTQLNRALTGIAVEQDKNTQEVFAQVKQIYKTPPIKDFGGFNFSQILPDPSKPSKRSFIEDLLFNKVTLADAGFIKQYGDCLGDISARDLICAQKFNGLTVLPPLLTDEMIAQYTSALLAGTITSGWTFGAGAALQIPFAMQMAYRFNGIGVTQNVLYENQKLIANQFNSAIGKIQDSLSSTASALGKLQDVVNQNAQALNTLVKQLSSNFGCISSVLNDILSRLDKVEAEVQIDCLITGRLQSLQTYVTQQLIRAAEIRASANLAATKMSECVLGQSKRVDFCGKGYHLMSFPQSAPHGVVFLHVTYVPAQEKNFTTAPAICHDGKAHFPREGVFVSNGTHWFVTQRNFYEPQIITTDNTFVSGNCDVVIGIVNNTVYDPLQPELDSFKEELDKYFKNHTSPDVDLGDISGINASVVNIQKEIDRLNEVAKNLNESLIDLQELGKYEQYIKGGGSGGGQIYEGKLTAEGLRFGIVASRFNHALVDRLVEGAIDAIVRHGGREEDITLVRVPGSWEIPVAAGELARKEDIDAVIAIGVLIRGATPHFDYIASEVSKGLADLSLELRKPITFGVITADTLEQAIERAGTKHGNKGWEAALSAIEMANLFKSLR

SEQ ID NO: 4477 - protein, 1371 aa, Artificial Sequence
  SARS-CoV-2/USA/NY-NYUMC7/2020__EPI_ISL_418192 spike protein (1-1211)(A972C_R995C) LumSynth construct
MFVFLVLLPLVSSQCVNLTTRTQLPPAYTNSFTRGVYYPDKVFRSSVLHSTQDLFLPFFSNVTWFHAIHVSGTNGTKRFDNPVLPFNDGVYFASTEKSNIIRGWIFGTTLDSKTQSLLIVNNATNVVIKVCEFQFCNDPFLGVYHHKNNKSWMESEFRVYSSANNCTFEYVSQPFLMDLEGKQGNFKNLREFVFKNIDGYFKIYSKHTPINLVRDLPQGFSALEPLVDLPIGINITRFQTLLALHRSYLTPGDSSSGWTAGAAAYYVGYLQPRTFLLKYNENGTITDAVDCALDPLSETKCTLKSFTVEKGIYQTSNFRVQPTESIVRFPNITNLCPFGEVFNATRFASVYAWNRKRISNCVADYSVLYNSASFSTFKCYGVSPTKLNDLCFTNVYADSFVIRGDEVRQIAPGQTGKIADYNYKLPDDFTGCVIAWNSNNLDSKVGGNYNYLYRLFRKSNLKPFERDISTEIYQAGSTPCNGVEGFNCYFPLQSYGFQPTNGVGYQPYRVVVLSFELLHAPATVCGPKKSTNLVKNKCVNFNFNGLTGTGVLTESNKKFLPFQQFGRDIADTTDAVRDPQTLEILDITPCSFGGVSVITPGTNTSNQVAVLYQGVNCTEVPVAIHADQLTPTWRVYSTGSNVFQTRAGCLIGAEHVNNSYECDIPIGAGICASYQTQTNSPRRARSVASQSIIAYTMSLGAENSVAYSNNSIAIPTNFTISVTTEILPVSMTKTSVDCTMYICGDSTECSNLLLQYGSFCTQLNRALTGIAVEQDKNTQEVFAQVKQIYKTPPIKDFGGFNFSQILPDPSKPSKRSFIEDLLFNKVTLADAGFIKQYGDCLGDIAARDLICAQKFNGLTVLPPLLTDEMIAQYTSALLAGTITSGWTFGAGAALQIPFAMQMAYRFNGIGVTQNVLYENQKLIANQFNSAIGKIQDSLSSTASALGKLQDVVNQNAQALNTLVKQLSSNFGCISSVLNDILSRLDKVEAEVQIDCLITGRLQSLQTYVTQQLIRAAEIRASANLAATKMSECVLGQSKRVDFCGKGYHLMSFPQSAPHGVVFLHVTYVPAQEKNFTTAPAICHDGKAHFPREGVFVSNGTHWFVTQRNFYEPQIITTDNTFVSGNCDVVIGIVNNTVYDPLQPELDSFKEELDKYFKNHTSPDVDLGDISGINASVVNIQKEIDRLNEVAKNLNESLIDLQELGKYEQYIKGGGSGGGQIYEGKLTAEGLRFGIVASRFNHALVDRLVEGAIDAIVRHGGREEDITLVRVPGSWEIPVAAGELARKEDIDAVIAIGVLIRGATPHFDYIASEVSKGLADLSLELRKPITFGVITADTLEQAIERAGTKHGNKGWEAALSAIEMANLFKSLR

SEQ ID NO: 4478 - protein, 1371 aa, Artificial Sequence
  SARS-CoV-2/Iceland/189/2020__EPI_ISL_417709 spike protein (1-1211)(A972C_R995C) LumSynth construct
MFVFLVLLPLVSSQCVNLTTRTQLPPAYTNSFTRGVYYPDKVFRSSVLHSTQDLFLPFFSNVTWFHAIHVSGTNGTKRFDNPVLPFNDGVYFASTEKSNIIRGWIFGTTLDSKTQSLLIVNNATNVVIKVCEFQFCNDPFLGVYYHKNNKSWMESEFRVYSSANNCTFEYVSQPFLMDLEGKQGNFKNLREFVFKNIDGYFKIYSKHTPINLVRDLPQGFSALEPLVDLPIGINITRFQTLLALHRSYLTPGDSSSGWTAGAAAYYVGYLQPRTFLLKYNENGTITDAVDCALDPLSETKCTLKSFTVEKGIYQTSNFRVQPTESIVRFPNITNLCPFGEVFNATRFASVYAWNRKRISNCVADYSVLYNSASFSTFKCYGVSPTKLNDLCFTNVYADSFVIRGDEVRQIAPGQTGKIADYNYKLPDDFTGCVIAWNSNNLDSKVGGNYNYLYRLFRKSNLKPFERDISTEIYQAGSTPCNGVEGFNCYFPLQSYGFQPTNGVGYQPYRVVVLSFELLHAPATVCGPKKSTNLVKNKCVNFNFNGLTGTGVLTESNKKFLPFQQFGRDIADTTDAVRDPQTLEILDITPCSFGGVSVITPGTNTSNQVAVLYQGVNCTEVPVAIHADQLTPTWRVYSTGSNVFQTRAGCLIGAEHVNNSYECDIPIGAGICASYQTQTNSPRRARSVASQSIIAYTMSLGAENSVAYSNNSIAIPTNFTISVTTEILPVSMTKTSVDCTMYICGDSTECSNLLLQYGSFCTQLNRALTGIAVEQDKNTQEVFAQVKQIYKTPPIKDFGGFNFSQILPDPSKPSKRSFIEDLLFNKVTLADAGFTKQYGDCLGDIAARDLICAQKFNGLTVLPPLLTDEMIAQYTSALLAGTITSGWTFGAGAALQIPFAMQMAYRFNGIGVTQNVLYENQKLIANQFNSAIGKIQDSLSSTASALGKLQDVVNQNAQALNTLVKQLSSNFGCISSVLNDILSRLDKVEAEVQIDCLITGRLQSLQTYVTQQLIRAAEIRASANLAATKMSECVLGQSKRVDFCGKGYHLMSFPQSAPHGVVFLHVTYVPAQEKNFTTAPAICHDGKAHFPREGVFVSNGTHWFVTQRNFYEPQIITTDNTFVSGNCDVVIGIVNNTVYDPLQPELDSFKEELDKYFKNHTSPDVDLGDISGINASVVNIQKEIDRLNEVAKNLNESLIDLQELGKYEQYIKGGGSGGGQIYEGKLTAEGLRFGIVASRFNHALVDRLVEGAIDAIVRHGGREEDITLVRVPGSWEIPVAAGELARKEDIDAVIAIGVLIRGATPHFDYIASEVSKGLADLSLELRKPITFGVITADTLEQAIERAGTKHGNKGWEAALSAIEMANLFKSLR

SEQ ID NO: 4479 - protein, 1371 aa, Artificial Sequence
  SARS-CoV-2/Australia/NSW56/2020__EPI_ISL_417408 spike protein (1-1211)(A972C_R995C) LumSynth construct
MFVFLVLLPLVSSQCVNLTTRTQLPPAYTNSFTRGVYYPDKVFRSSVLHSTQDLFLPFFSNVTWFHAIHVSGTNGTKRFDNPVLPFNDGVYFASTEKSNIIRGWIFGTTLDSKTQSLLIVNNATNVVIKVCEFQFCNDPFLGVYYHKNNKSWMESEFRVYSSANNCTFEYVSQPFLMDLEGKQGNFKNLREFVFKNIDGYFKIYSKHTPINLVRDLPQGFSALEPLVDLPIGINITRFQTLLALHRSYLTPGDSSSGWTAGAAAYYVGYLQPRTFLLKYNENGTITDAVDCALDPLSETKCTLKSFTVEKGIYQTSNFRVQPTESIVRFPNITNLCPFGEVFNATRFASVYAWNRKRISNCVADYSVLYNSASFSTFKCYGVSPTKLNDLCFTNVYADSFVIRGDEVRQIAPGQTGKIADYNYKLPDDFTGCVIAWNSNNLDSKVGGNYNYLYRLFRKSNLKPFERDISTEIYQAGSTPCNGVEGFNCYFPLQSYGFQPTNGVGYQPYRVVVLSFELLHAPATVCGPKKSTNLVKNKCVNFNFNGLTGTGVLTESNKKFLPFQQFGRDIADTTDAVRDPQTLEILDITPCSFGGVSVITPGTNTSNQVAVLYQDVNCTEVPVAIHADQLTPTWRVYSTGSNVFQTRAGCLIGAEHVNNSYECDIPIGAGICASYQTQTNSPRRARSVASQSIIAYTMSLGAENSVAYSNNSIAIPTNFTISVTTEILPVSMTKTSVDCTMYICGDSTECSNLLLQYGSFCTQLNRALTGIAVEQDKNTQEVFAQVKQIYKTPPIKDFGGFNFSQILPDSSKPSKRSFIEDLLFNKVTLADAGFIKQYGDCLGDIAARDLICAQKFNGLTVLPPLLTDEMIAQYTSALLAGTITSGWTFGAGAALQIPFAMQMAYRFNGIGVTQNVLYENQKLIANQFNSAIGKIQDSLSSTASALGKLQDVVNQNAQALNTLVKQLSSNFGCISSVLNDILSRLDKVEAEVQIDCLITGRLQSLQTYVTQQLIRAAEIRASANLAATKMSECVLGQSKRVDFCGKGYHLMSFPQSAPHGVVFLHVTYVPAQEKNFTTAPAICHDGKAHFPREGVFVSNGTHWFVTQRNFYEPQIITTDNTFVSGNCDVVIGIVNNTVYDPLQPELDSFKEELDKYFKNHTSPDVDLGDISGINASVVNIQKEIDRLNEVAKNLNESLIDLQELGKYEQYIKGGGSGGGQIYEGKLTAEGLRFGIVASRFNHALVDRLVEGAIDAIVRHGGREEDITLVRVPGSWEIPVAAGELARKEDIDAVIAIGVLIRGATPHFDYIASEVSKGLADLSLELRKPITFGVITADTLEQAIERAGTKHGNKGWEAALSAIEMANLFKSLR

SEQ ID NO: 4480 - protein, 1371 aa, Artificial Sequence
  SARS-CoV-2/Iceland/280/2020__EPI_ISL_417608 spike protein (1-1211)(A972C_R995C) LumSynth construct
MFVFLVLLPLVSSQCVNLTTRTQLPPAYTNSFTRGVYYPDKVFRSSVLHSTQDLFLPFFSNVTWFHAIHVSGTNGTKRFDNPVLPFNDGVYFASTEKSNIIRGWIFGTTLDSKTQSLLIVNNATNVVIKVCEFQFCNDPFLGVYYHKNNKSWMESEFRVYSSANNCTFEYVSQPFLMDLEGKQGNFKNLREFVFKNIDGYFKIYSKHTPINLVRDLPQGFSALEPLVDLPIGINITRFQTLLALHRSYLTPGDSSSGWTAGAAAYYVGYLQPRTFLLKYNENGTITDAVDCALDPLSETKCTLKSFTVEKGIYQTSNFRVQPTESIVRFPNITNLCPFGEVFNATRFASVYAWNRKRISNCVADYSVLYNSASFSTFKCYGVSPTKLNDLCFTNVYADSFVIRGDEVRQIAPGQTGKIADYNYKLPDDFTGCVIAWNSNNLDSKVGGNYNYLYRLFRKSNLKPFERDISTEIYQAGSTPCNGVEGFNCYFPLQSYGFQPTNGVGYQPYRVVVLSFELLHAPATVCGPKKSTNLVKNKCVNFNFNGLTGTGVLTESNKKFLPFQQFGRDIADTTDAVRDPQTLEILDITPCSFGGVSVITPGTNTSNQVAVLYQGVNCTEVPVAIHADQLTPTWRVYSTGSNVFQTRAGCLIGAEHVNNSYECDIPIGAGICASYHTQTNSPRRARSVASQSIIAYTMSLGAENSVAYSNNSIAIPTNFTISVTTEILPVSMTKTSVDCTMYICGDSTECSNLLLQYGSFCTQLNRALTGIAVEQDKNTQEVFAQVKQIYKTPPIKDFGGFNFSQILPDPSKPSKRSFIEDLLFNKVTLADAGFIKQYGDCLGDIAARDLICAQKFNGLTVLPPLLTDEMIAQYTSALLAGTITSGWTFGAGAALQIPFAMQMAYRFNGIGVTQNVLYENQKLIANQFNSAIGKIQDSLSSTASALGKLQDVVNQNAQALNTLVKQLSSNFGCISSVLNDILSRLDKVEAEVQIDCLITGRLQSLQTYVTQQLIRAAEIRASANLAATKMSECVLGQSKRVDFCGKGYHLMSFPQSAPHGVVFLHVTYVPAQEKNFTTAPAICHDGKAHFPREGVFVSNGTHWFVTQRNFYEPQIITTDNTFVSGNCDVVIGIVNNTVYDPLQPELDSFKEELDKYFKNHTSPDVDLGDISGINASVVNIQKEIDRLNEVAKNLNESLIDLQELGKYEQYIKGGGSGGGQIYEGKLTAEGLRFGIVASRFNHALVDRLVEGAIDAIVRHGGREEDITLVRVPGSWEIPVAAGELARKEDIDAVIAIGVLIRGATPHFDYIASEVSKGLADLSLELRKPITFGVITADTLEQAIERAGTKHGNKGWEAALSAIEMANLFKSLR

SEQ ID NO: 4481 - protein, 1371 aa, Artificial Sequence; identical to SEQ ID NO: 4436
  SARS-CoV-2/Iceland/247/2020__EPI_ISL_417575 spike protein (1-1211)(A972C_R995C) LumSynth construct

SEQ ID NO: 4482 - protein, 1371 aa, Artificial Sequence
  SARS-CoV-2/Iceland/238/2020__EPI_ISL_417566 spike protein (1-1211)(A972C_R995C) LumSynth construct
MFVFLVLLPLVSSQCVNLTTRTQLPPAYTNSFTRGVYYPDKVFRSSVLHSTQDLFLPFFSNVTWFHAIHVSGTNGTKRFDNPVLPFNDGVYFASTEKSNIIRGWIFGTTLDSKTQSLLIVNNATNVVIKVCEFQFCNDPFLGVYYHKNNKSWMESEFRVYSSANNCTFEYVSQPFLMDLEGKQGNFKNLREFVFKNIDGYFKIYSKHTPINLVRDLPQGFSALEPLVDLPIGINITRFQTLLALHRSYLTPGDSSSGWTAGAAAYYVGYLQPRTFLLKYNENGTITDAVDCALDPLSETKCTLKSFTVEKGIYQTSNFRVQPTESIVRFPNITNLCPFGEVFNATRFASVYAWNRKRISNCVADYSVLYNSASFSTFKCYGVSPTKLNDLCFTNVYADSFVIRGDEVRQIAPGQTGKIADYNYKLPDDFTGCVIAWNSNNLDSKVGGNYNYLYRLFRKSNLKPFERDISTEIYQAGSTPCNGVEGFNCYFPLQSYGFQPTNGVGYQPYRVVVLSFELLHAPATVCGPKKSTNLVKNKCVNFNFNGLTGTGVLTESNKKFLPFQQFGRDIADTTDAVRDPQTLEILDITPCSFGGVSVITPGTNTSNQVAVLYQGVNCTEVPVAIHADQLTPTWRVYSTGSNVFQTRAGCLIGAEHVNNSYECDIPIGAGICASYQTQTNSPRRARSVASQSIIAYTMSLGAENSVAYSNNSIAIPTNFTISVTTEILPVSMTKTSVDCTMYICGDSTECSNLLLQYGSFCTQLNRALTGIAVEQDKNTQEVFAQVKQIYKTPPIKDFGGFNFSQILPDPSKPSKRSFIEDLLFNKVTLADVGFIKQYGDCLGDIAARDLICAQKFNGLTVLPPLLTDEMIAQYTSALLAGTITSGWTFGAGAALQIPFAMQMAYRFNGIGVTQNVLYENQKLIANQFNSAIGKIQDSLSSTASALGKLQDVVNQNAQALNTLVKQLSSNFGCISSVLNDILSRLDKVEAEVQIDCLITGRLQSLQTYVTQQLIRAAEIRASANLAATKMSECVLGQSKRVDFCGKGYHLMSFPQSAPHGVVFLHVTYVPAQEKNFTTAPAICHDGKAHFPREGVFVSNGTHWFVTQRNFYEPQIITTDNTFVSGNCDVVIGIVNNTVYDPLQPELDSFKEELDKYFKNHTSPDVDLGDISGINASVVNIQKEIDRLNEVAKNLNESLIDLQELGKYEQYIKGGGSGGGQIYEGKLTAEGLRFGIVASRFNHALVDRLVEGAIDAIVRHGGREEDITLVRVPGSWEIPVAAGELARKEDIDAVIAIGVLIRGATPHFDYIASEVSKGLADLSLELRKPITFGVITADTLEQAIERAGTKHGNKGWEAALSAIEMANLFKSLR

SEQ ID NO: 4483 - protein, 1371 aa, Artificial Sequence
  SARS-CoV-2/Greece/16/2020__EPI_ISL_418265 spike protein (1-1211)(A972C_R995C) LumSynth construct
MFVFLVLLPLVSSQCVNLTTRTQLPPAYTNSFTRGVYYPDKVFRSSVLHSTQDLFLPFFSNVTWFHAIHVSGTNGTKRFDNPVLPFNDGVYFASTEKSNIIRGWIFGTTLDSKTQSLLIVNNATNVVIKVCEFQFCNDPFLGVYYHKNNKSWMESEFRVYSSANNCTFEYVSQPFLMDLEGKQGNFKNLREFVFKNVDGYFKIYSKHTPINLVRDLPQGFSALEPLVDLPIGINITRFQTLLALHRSYLTPGDSSSGWTAGAAAYYVGYLQPRTFLLKYNENGTITDAVDCALDPLSETKCTLKSFTVEKGIYQTSNFRVQPTESIVRFPNITNLCPFGEVFNATRFASVYAWNRKRISNCVADYSVLYNSASFSTFKCYGVSPTKLNDLCFTNVYADSFVIRGDEVRQIAPGQTGKIADYNYKLPDDFTGCVIAWNSNNLDSKVGGNYNYLYRLFRKSNLKPFERDISTEIYQAGSTPCNGVEGFNCYFPLQSYGFQPTNGVGYQPYRVVVLSFELLHAPATVCGPKKSTNLVKNKCVNFNFNGLTGTGVLTESNKKFLPFQQFGRDIADTTDAVRDPQTLEILDITPCSFGGVSVITPGTNTSNQVAVLYQDVNCTEVPVAIHADQLTPTWRVYSTGSNVFQTRAGCLIGAEHVNNSYECDIPIGAGICASYQTQTNSPRRARSVASQSIIAYTMSLGAENSVAYSNNSIAIPTNFTISVTTEILPVSMTKTSVDCTMYICGDSTECSNLLLQYGSFCTQLNRALTGIAVEQDKNTQEVFAQVKQIYKTPPIKDFGGFNFSQILPDPSKPSKRSFIEDLLFNKVTLADAGFIKQYGDCLGDIAARDLICAQKFNGLTVLPPLLTDEMIAQYTSALLAGTITSGWTFGAGAALQIPFAMQMAYRFNGIGVTQNVLYENQKLIANQFNSAIGKIQDSLSSTASALGKLQDVVNQNAQALNTLVKQLSSNFGCISSVLNDILSRLDKVEAEVQIDCLITGRLQSLQTYVTQQLIRAAEIRASANLAATKMSECVLGQSKRVDFCGKGYHLMSFPQSAPHGVVFLHVTYVPAQEKNFTTAPAICHDGKAHFPREGVFVSNGTHWFVTQRNFYEPQIITTDNTFVSGNCDVVIGIVNNTVYDPLQPELDSFKEELDKYFKNHTSPDVDLGDISGINASVVNIQKEIDRLNEVAKNLNESLIDLQELGKYEQYIKGGGSGGGQIYEGKLTAEGLRFGIVASRFNHALVDRLVEGAIDAIVRHGGREEDITLVRVPGSWEIPVAAGELARKEDIDAVIAIGVLIRGATPHFDYIASEVSKGLADLSLELRKPITFGVITADTLEQAIERAGTKHGNKGWEAALSAIEMANLFKSLR

SEQ ID NO: 4484 - protein, 1371 aa, Artificial Sequence
  SARS-CoV-2/Iceland/319/2020__EPI_ISL_417648 spike protein (1-1211)(A972C_R995C) LumSynth construct
MFVFLVLLPLVSSQCVNLTTRTQLPPAYTNSFTRGVYYPDKVFRSSVLHSTQDLFLPFFSNVTWFHAIHVSGTNGTKRFDNPVLPFNDGVYFASTEKSNIIRGWIFGTTLDSKTQSLLIVNNATNVVIKVCEFQFCNDPFLGVYYHKNNKSWMESEFRVYSSANNCTFEYVSQPFLIDLEGKQGNFKNLREFVFKNIDGYFKIYSKHTPINLVRDLPQGFSALEPLVDLPIGINITRFQTLLALHRSYLTPGDSSSGWTAGAAAYYVGYLQPRTFLLKYNENGTITDAVDCALDPLSETKCTLKSFTVEKGIYQTSNFRVQPTESIVRFPNITNLCPFGEVFNATRFASVYAWNRKRISNCVADYSVLYNSASFSTFKCYGVSPTKLNDLCFTNVYADSFVIRGDEVRQIAPGQTGKIADYNYKLPDDFTGCVIAWNSNNLDSKVGGNYNYLYRLFRKSNLKPFERDISTEIYQAGSTPCNGVEGFNCYFPLQSYGFQPTNGVGYQPYRVVVLSFELLHAPATVCGPKKSTNLVKNKCVNFNFNGLTGTGVLTESNKKFLPFQQFGRDIADTTDAVRDPQTLEILDITPCSFGGVSVITPGTNTSNQVAVLYQGVNCTEVPVAIHADQLTPTWRVYSTGSNVFQTRAGCLIGAEHVNNSYECDIPIGAGICASYQTQTNSPRRARSVASQSIIAYTMSLGAENSVAYSNNSIAIPTNFTISVTTEILPVSMTKTSVDCTMYICGDSTECSNLLLQYGSFCTQLNRALTGIAVEQDKNTQEVFAQVKQIYKTPPIKDFGGFNFSQILPDPSKPSKRSFIEDLLFNKVTLADAGFIKQYGDCLGDIAARDLICAQKFNGLTVLPPLLTDEMIAQYTSALLAGTITSGWTFGAGAALQIPFAMQMAYRFNGIGVTQNVLYENQKLIANQFNSAIGKIQDSLSSTASALGKLQDVVNQNAQALNTLVKQLSSNFGCISSVLNDILSRLDKVEAEVQIDCLITGRLQSLQTYVTQQLIRAAEIRASANLAATKMSECVLGQSKRVDFCGKGYHLMSFPQSAPHGVVFLHVTYVPAQEKNFTTAPAICHDGKAHFPREGVFVSNGTHWFVTQRNFYEPQIITTDNTFVSGNCDVVIGIVNNTVYDPLQPELDSFKEELDKYFKNHTSPDVDLGDISGINASVVNIQKEIDRLNEVAKNLNESLIDLQELGKYEQYIKGGGSGGGQIYEGKLTAEGLRFGIVASRFNHALVDRLVEGAIDAIVRHGGREEDITLVRVPGSWEIPVAAGELARKEDIDAVIAIGVLIRGATPHFDYIASEVSKGLADLSLELRKPITFGVITADTLEQAIERAGTKHGNKGWEAALSAIEMANLFKSLR

SEQ ID NO: 4485 - protein, 1371 aa, Artificial Sequence
  SARS-CoV-2/Congo/94/2020__EPI_ISL_417947 spike protein (1-1211)(A972C_R995C) LumSynth construct
MFVFLVLLPLVSSQCVNLTTRTQLPPAYTNSFTRGVYYPDKVFRSSVLHSTQDLFLPFFSNVTWFHAIHVSGTNGTKRFDNPVLPFNDGVYFASTEKSNIIRGWIFGTTLDSKTQSLLIVNNATNVVIKVCEFQFCNDPFLGVYYHKNNKSWMESEFRVYSSANNCTFEYVSQPFLMDLEGKQGNFKNLREFVFKNIDGYFKIYSKHTPINLVRDLPQGFSALEPLVDLPIGINITRFQTLLALHRSYLTPGDSSSGWTAGAAAYYVGYLQPRTFLLKYNENGTITDAVDCALDPLSETKCTLKSFTVEKGIYQTSNFRVQPTESIVRFPNITNLCPFGEVFNATRFASVYAWNRKRISNCVADYSVLYNSASFSTFKCYGVSPTKLNDLCFTNVYADSFVIRGDEVRQIAPGQTGKIADYNYKLPDDFTGCVIAWNSNNLDSKVGGNYNYLYRLFRKSNLKPFERDISTEIYQAGSTPCNGVEGFNCYFPLQSYGFQPTNGVGYQPYRVVVLSFELLHAPATVCGPKKSTNLVKNKCVNFNFNGLTGTGVLTESNKKFLPFQQFGRDIADTTDAVRDPQTLEILDITPCSFGGVSVITPGTNTSNQVAVLYQGVNCTEVPVAIHADQLTPTWRVYSTGSNVFQTRAGCLIGAEHVNNSYECDIPIGAGICASYQTQTNSPRRARSVASQSIIAYTMSLGAENSVAYSNNSIAIPTNFTISVTTEILPVSMTKTSVDCTMYICGDSTECSNLLLQYGSFCTQLNRALTGIAVEQDKNTQEVFAQVKQIYKTPPIKDFGGFNFSQILPDPSKPSKRSFIEDILFNKVTLADAGFIKQYGDCLGDIAARDLICAQKFNGLTVLPPLLTDEMIAQYTSALLAGTITSGWTFGAGAALQIPFAMQMAYRFNGIGVTQNVLYENQKLIANQFNSAIGKIQDSLSSTASALGKLQDVVNQNAQALNTLVKQLSSNFGCISSVLNDILSRLDKVEAEVQIDCLITGRLQSLQTYVTQQLIRAAEIRASANLAATKMSECVLGQSKRVDFCGKGYHLMSFPQSAPHGVVFLHVTYVPAQEKNFTTAPAICHDGKAHFPREGVFVSNGTHWFVTQRNFYEPQIITTDNTFVSGNCDVVIGIVNNTVYDPLQPELDSFKEELDKYFKNHTSPDVDLGDISGINASVVNIQKEIDRLNEVAKNLNESLIDLQELGKYEQYIKGGGSGGGQIYEGKLTAEGLRFGIVASRFNHALVDRLVEGAIDAIVRHGGREEDITLVRVPGSWEIPVAAGELARKEDIDAVIAIGVLIRGATPHFDYIASEVSKGLADLSLELRKPITFGVITADTLEQAIERAGTKHGNKGWEAALSAIEMANLFKSLR

SEQ ID NO: 4486 - protein, 1371 aa, Artificial Sequence
  SARS-CoV-2/Congo/158/2020__EPI_ISL_417950 spike protein (1-1211)(A972C_R995C) LumSynth construct
MFVFLVLLPLVSSQCVNLTTRTQLPPAYTNSFTRGVYYPDKVFRSSVLHSTQDLFLPFFSNVTWFHAIHVSGTNGTKRFDNPVLPFNDGVYFASTEKSNIIRGWIFGTTLDSKTQSLLIVNNATNVVIKVCEFQFCNDPFLGVYYHKNNKSWMESEFRVYSSANNCTFEYVSQPFLMDLEGKQGNFKNLREFVFKNIDGYFKIYSKHTPINLVRDLPQGFSALEPLVDLPIGINITRFQTLLALHRSYLTPGDSSSGWTAGAAAYYVGYLQPRTFLLKYNENGTITDAVDCALDPLSETKCTLKSFTVEKGIYQTSNFRVQPTESIVRFPNITNLCPFGEVFNATRFASVYAWNRKRISNCVADYSVLYNSASFSTFKCYGVSPTKLNDLCFTNVYADSFVIRGDEVRQIAPGQTGKIADYNYKLPDDFTGCVIAWNSNNLDSKVGGNYNYLYRLFRKSNLKPFERDISTEIYQAGSTPCNGVEGFNCYFPLQSYGFQPTNGVGYQPYRVVVLSFELLHAPATVCGPKKSTNLVKNKCVNFNFNGLTGTGVLTESNKKFLPFQQFGRDIADTTDAVRDPQTLEILDITPCSFGGVSVITPGTNTSNQVAVLYQDVNCTEVPVAIHADQLTPTWRVYSTGSNVFQTRAGCLIGAEHVNNSYECDIPIGAGICASYQTQTNSPRRARSVASQSIIAYTMSLGAENSVAYSNNSIAIPTNFTISVTTEILPVSMTKTSVDCTMYICGDSTECSNLLLQYGSFCTQLNRALTGIAVEQDKNTQEVFAQVKQIYKTPPIKDFGGFNFSQILPDPSKPSKRSFIEDLLFNKVTLADAGFIKQYGDCLGDIAARDLICAQKFNGLTVLPPLLTDEMIAQYTSALLAGTITSGWTFGAGAALQIPFAMQMAYRFNGIGVTQNVLYENQKLIANQFNSAIGKIQDSLSSTASALGKLQDVVNQNAQALNTLVKQLSSNFGCISSVLNDILSRLDKVEAEVQIDCLITGRLQSLQTYVTQQLIRAAEIRASANLAATKMSECVLGQSKRVDFCGKGYHLMSFPQSAPHGVVFLHVTYVPAQEKNFTTAPAICHDGKAHFPREGVFVSNGTHWFVTQRNFYEPQIITTDNTFLSGNCDVVIGIVNNTVYDPLQPELDSFKEELDKYFKNHTSPDVDLGDISGINASVVNIQKEIDRLNEVAKNLNESLIDLQELGKYEQYIKGGGSGGGQIYEGKLTAEGLRFGIVASRFNHALVDRLVEGAIDAIVRHGGREEDITLVRVPGSWEIPVAAGELARKEDIDAVIAIGVLIRGATPHFDYIASEVSKGLADLSLELRKPITFGVITADTLEQAIERAGTKHGNKGWEAALSAIEMANLFKSLR

SEQ ID NO: 4487 - protein, 1371 aa, Artificial Sequence
  SARS-CoV-2/USA/UT-00034/2020__EPI_ISL_417977 spike protein (1-1211)(A972C_R995C) LumSynth construct
MFVFLVLLPLVSSQCVNLTTRTQLPPAYTNSFTRGVYYPDKVFRSSVLHSTQDLFLPFFSNVTWFHAIHVSGTNGTKRFDNPVLPFNDGVYFASTEKSNIIRGWIFGTTLDSKTQSLLIVNNATNVVIKVCEFQFCNDPFLGVYYYKNNKSWMESEFRVYSSANNCTFEYVSQPFLMDLEGKQGNFKNLREFVFKNIDGYFKIYSKHTPINLVRDLPQGFSALEPLVDLPIGINITRFQTLLALHRSYLTPGDSSSGWTAGAAAYYVGYLQPRTFLLKYNENGTITDAVDCALDPLSETKCTLKSFTVEKGIYQTSNFRVQPTESIVRFPNITNLCPFGEVFNATRFASVYAWNRKRISNCVADYSVLYNSASFSTFKCYGVSPTKLNDLCFTNVYADSFVIRGDEVRQIAPGQTGKIADYNYKLPDDFTGCVIAWNSNNLDSKVGGNYNYLYRLFRKSNLKPFERDISTEIYQAGSTPCNGVEGFNCYFPLQSYGFQPTNGVGYQPYRVVVLSFELLHAPATVCGPKKSTNLVKNKCVNFNFNGLTGTGVLTESNKKFLPFQQFGRDIADTTDAVRDPQTLEILDITPCSFGGVSVITPGTNTSNQVAVLYQGVNCTEVPVAIHADQLTPTWRVYSTGSNVFQTRAGCLIGAEHVNNSYECDIPIGAGICASYQTQTNSPRRARSVASQSIIAYTMSLGAENSVAYSNNSIAIPTNFTISVTTEILPVSMTKTSVDCTMYICGDSTECSNLLLQYGSFCTQLNRALTGIAVEQDKNTQEVFAQVKQIYKTPPIKDFGGFNFSQILPDPSKPSKRSFIEDLLFNKVTLADAGFIKQYGDCLGDIAARDLICAQKFNGLTVLPPLLTDEMIAQYTSALLAGTITSGWTFGAGAALQIPFAMQMAYRFNGIGVTQNVLYENQKLIANQFNSAIGKIQDSLSSTASALGKLQDVVNQNAQALNTLVKQLSSNFGCISSVLNDILSRLDKVEAEVQIDCLITGRLQSLQTYVTQQLIRAAEIRASANLAATKMSECVLGQSKRVDFCGKGYHLMSFPQSAPHGVVFLHVTYVPAQEKNFTTAPAICHDGKAHFPREGVFVSNGTHWFVTQRNFYEPQIITTDNTFVSGNCDVVIGIVNNTVYDPLQPELDSFKEELDKYFKNHTSPDVDLGDISGINASVVNIQKEIDRLNEVAKNLNESLIDLQELGKYEQYIKGGGSGGGQIYEGKLTAEGLRFGIVASRFNHALVDRLVEGAIDAIVRHGGREEDITLVRVPGSWEIPVAAGELARKEDIDAVIAIGVLIRGATPHFDYIASEVSKGLADLSLELRKPITFGVITADTLEQAIERAGTKHGNKGWEAALSAIEMANLFKSLR

SEQ ID NO: 4488 - protein, 1371 aa, Artificial Sequence
  SARS-CoV-2/USA/UT-00033/2020__EPI_ISL_417976 spike protein (1-1211)(A972C_R995C) LumSynth construct
MFVFLVLLPLVSSQCVNLTTRTQLPPAYTNSFTRGVYYPDKVFRSSVLHSTQDLFLPFFSNVTWFHAIHVSGTNGTKRFDNPVLPFNDGVYFASTEKSNIIRGWIFGTTLDSKTQSLLIVNNATNVVIKVCEFQFCNDPFLGVYYHKNNKSWMESEFRVYSSANNCTFEYVSQPFLMDLEGKQGNFKNLREFVFKNIDGYFKIYSKHTPINLVRDLPQGFSALEPLVDLPIGINITRFQTLLALHRSYLTPGDSSSGLTAGAAAYYVGYLQPRTFLLKYNENGTITDAVDCALDPLSETKCTLKSFTVEKGIYQTSNFRVQPTESIVRFPNITNLCPFGEVFNATRFASVYAWNRKRISNCVADYSVLYNSASFSTFKCYGVSPTKLNDLCFTNVYADSFVIRGDEVRQIAPGQTGKIADYNYKLPDDFTGCVIAWNSNNLDSKVGGNYNYLYRLFRKSNLKPFERDISTEIYQAGSTPCNGVEGFNCYFPLQSYGFQPTNGVGYQPYRVVVLSFELLHAPATVCGPKKSTNLVKNKCVNFNFNGLTGTGVLTESNKKFLPFQQFGRDIADTTDAVRDPQTLEILDITPCSFGGVSVITPGTNTSNQVAVLYQGVNCTEVPVAIHADQLTPTWRVYSTGSNVFQTRAGCLIGAEHVNNSYECDIPIGAGICASYQTQTNSPRRARSVASQSIIAYTMSLGAENSVAYSNNSIAIPTNFTISVTTEILPVSMTKTSVDCTMYICGDSTECSNLLLQYGSFCTQLNRALTGIAVEQDKNTQEVFAQVKQIYKTPPIKDFGGFNFSQILPDPSKPSKRSFIEDLLFNKVTLADAGFIKQYGDCLGDIAARDLICAQKFNGLTVLPPLLTDEMIAQYTSALLAGTITSGWTFGAGAALQIPFAMQMAYRFNGIGVTQNVLYENQKLIANQFNSAIGKIQDSLSSTASALGKLQDVVNQNAQALNTLVKQLSSNFGCISSVLNDILSRLDKVEAEVQIDCLITGRLQSLQTYVTQQLIRAAEIRASANLAATKMSECVLGQSKRVDFCGKGYHLMSFPQSAPHGVVFLHVTYVPAQEKNFTTAPAICHDGKAHFPREGVFVSNGTHWFVTQRNFYEPQIITTDNTFVSGNCDVVIGIVNNTVYDPLQPELDSFKEELDKYFKNHTSPDVDLGDISGINASVVNIQKEIDRLNEVAKNLNESLIDLQELGKYEQYIKGGGSGGGQIYEGKLTAEGLRFGIVASRFNHALVDRLVEGAIDAIVRHGGREEDITLVRVPGSWEIPVAAGELARKEDIDAVIAIGVLIRGATPHFDYIASEVSKGLADLSLELRKPITFGVITADTLEQAIERAGTKHGNKGWEAALSAIEMANLFKSLR

SEQ ID NO: 4489 - protein, 1371 aa, Artificial Sequence
  SARS-CoV-2/USA/WI-13/2020__EPI_ISL_417516 spike protein (1-1211)(A972C_R995C) LumSynth construct
MFVFLVLLPLVSSQCVNLTTRTQLPPAYTNSFTRGVYYPDKVFRSSVLHSTQDLFLPFFSNVTWFHAIHVSGTNGTKRFDNPVLPFNDGVYFASTEKSNIIRGWIFGTTLDSKTQSLLIVNNATNVVIKVCEFQFCNDPFLGVYYHKNNKSWMESEFRVYSSANNCTFEYVSQPFLMDLEGKQGNFKNLREFVFKNIDGYFKIYSKHTPINLVRDLPQGFSALEPLVDLPIGINITRFQTLLALHRSYLTPGDSSSGWTAGAAAYYVGYLQPRTFLLKYNENGTITDAVDCALDPLSETKCTLKSFTVEKGIYQTSNFRVLPTESIVRFPNITNLCPFGEVFNATRFASVYAWNRKRISNCVADYSVLYNSASFSTFKCYGVSPTKLNDLCFTNVYADSFVIRGDEVRQIAPGQTGKIADYNYKLPDDFTGCVIAWNSNNLDSKVGGNYNYLYRLFRKSNLKPFERDISTEIYQAGSTPCNGVEGFNCYFPLQSYGFQPTNGVGYQPYRVVVLSFELLHAPATVCGPKKSTNLVKNKCVNFNFNGLTGTGVLTESNKKFLPFQQFGRDIADTTDAVRDPQTLEILDITPCSFGGVSVITPGTNTSNQVAVLYQGVNCTEVPVAIHADQLTPTWRVYSTGSNVFQTRAGCLIGAEHVNNSYECDIPIGAGICASYQTQTNSPRRARSVASQSIIAYTMSLGAENSVAYSNNSIAIPTNFTISVTTEILPVSMTKTSVDCTMYICGDSTECSNLLLQYGSFCTQLNRALTGIAVEQDKNTQEVFAQVKQIYKTPPIKDFGGFNFSQILPDPSKPSKRSFIEDLLFNKVTLADAGFIKQYGDCLGDIAARDLICAQKFNGLTVLPPLLTDEMIAQYTSALLAGTITSGWTFGAGAALQIPFAMQMAYRFNGIGVTQNVLYENQKLIANQFNSAIGKIQDSLSSTASALGKLQDVVNQNAQALNTLVKQLSSNFGCISSVLNDILSRLDKVEAEVQIDCLITGRLQSLQTYVTQQLIRAAEIRASANLAATKMSECVLGQSKRVDFCGKGYHLMSFPQSAPHGVVFLHVTYVPAQEKNFTTAPAICHDGKAHFPREGVFVSNGTHWFVTQRNFYEPQIITTDNTFVSGNCDVVIGIVNNTVYDPLQPELDSFKEELDKYFKNHTSPDVDLGDISGINASVVNIQKEIDRLNEVAKNLNESLIDLQELGKYEQYIKGGGSGGGQIYEGKLTAEGLRFGIVASRFNHALVDRLVEGAIDAIVRHGGREEDITLVRVPGSWEIPVAAGELARKEDIDAVIAIGVLIRGATPHFDYIASEVSKGLADLSLELRKPITFGVITADTLEQAIERAGTKHGNKGWEAALSAIEMANLFKSLR

SEQ ID NO: 4490 - protein, 1370 aa, Artificial Sequence
  SARS-CoV-2/India/1-27/2020__EPI_ISL_413522 spike protein (1-1210)(A971C_R994C) LumSynth construct
MFVFLVLLPLVSSQCVNLTTRTQLPPAYTNSFTRGVYYPDKVFRSSVLHSTQDLFLPFFSNVTWFHAIHVSGTNGTKRFDNPVLPFNDGVYFASTEKSNIIRGWIFGTTLDSKTQSLLIVNNATNVVIKVCEFQFCNDPFLGVYHKNNKSWMESEFRVYSSANNCTFEYVSQPFLMDLEGKQGNFKNLREFVFKNIDGYFKIYSKHTPINLVRDLPQGFSALEPLVDLPIGINITRFQTLLALHRSYLTPGDSSSGWTAGAAAYYVGYLQPRTFLLKYNENGTITDAVDCALDPLSETKCTLKSFTVEKGIYQTSNFRVQPTESIVRFPNITNLCPFGEVFNATRFASVYAWNRKRISNCVADYSVLYNSASFSTFKCYGVSPTKLNDLCFTNVYADSFVIRGDEVIQIAPGQTGKIADYNYKLPDDFTGCVIAWNSNNLDSKVGGNYNYLYRLFRKSNLKPFERDISTEIYQAGSTPCNGVEGFNCYFPLQSYGFQPTNGVGYQPYRVVVLSFELLHAPATVCGPKKSTNLVKNKCVNFNFNGLTGTGVLTESNKKFLPFQQFGRDIADTTDAVRDPQTLEILDITPCSFGGVSVITPGTNTSNQVAVLYQDVNCTEVPVAIHADQLTPTWRVYSTGSNVFQTRAGCLIGAEHVNNSYECDIPIGAGICASYQTQTNSPRRARSVASQSIIAYTMSLGAENSVAYSNNSIAIPTNFTISVTTEILPVSMTKTSVDCTMYICGDSTECSNLLLQYGSFCTQLNRALTGIAVEQDKNTQEVFAQVKQIYKTPPIKDFGGFNFSQILPDPSKPSKRSFIEDLLFNKVTLADAGFIKQYGDCLGDIAARDLICAQKFNGLTVLPPLLTDEMIAQYTSALLAGTITSGWTFGAGAALQIPFAMQMAYRFNGIGVTQNVLYENQKLIANQFNSAIGKIQDSLSSTASALGKLQDVVNQNAQALNTLVKQLSSNFGCISSVLNDILSRLDKVEAEVQIDCLITGRLQSLQTYVTQQLIRAAEIRASANLAATKMSECVLGQSKRVDFCGKGYHLMSFPQSAPHGVVFLHVTYVPAQEKNFTTAPAICHDGKAHFPREGVFVSNGTHWFVTQRNFYEPQIITTDNTFVSGNCDVVIGIVNNTVYDPLQPELDSFKEELDKYFKNHTSPDVDLGDISGINASVVNIQKEIDRLNEVAKNLNESLIDLQELGKYEQYIKGGGSGGGQIYEGKLTAEGLRFGIVASRFNHALVDRLVEGAIDAIVRHGGREEDITLVRVPGSWEIPVAAGELARKEDIDAVIAIGVLIRGATPHFDYIASEVSKGLADLSLELRKPITFGVITADTLEQAIERAGTKHGNKGWEAALSAIEMANLFKSLR

SEQ ID NO: 4491 - protein, 1365 aa, Artificial Sequence
  SARS-CoV-2/pangolin/Guangxi/P4L/2017__EPI_ISL_410538 spike protein (1-1205)(A966C_R989C) LumSynth construct
MFVFLFVLPLVSSQCVNLTTRTGIPPGYTNSSTRGVYYPDKVFRSSILHLTQDLFLPFFSNVTWFNTINYQGGFKKFDNPVLPFNDGVYFASTEKSNIIRGWIFGTTLDARTQSLLIVNNATNVVIKVCEFQFCTDPFLGVYYHNNNKTWVENEFRVYSSANNCTFEYISQPFLMDLEGKQGNFKNLREFVFKNVDGYFKIYSKHTPIDLVRDLPRGFAALEPLVDLPIGINITRFQTLLALHRSYLTPGNLESGWTTGAAAYYVGYLQQRTFLLSYNQNGTITDAVDCSLDPLSETKCTLKSLTVEKGIYQTSNFRVQPTISIVRFPNITNLCPFGEVFNASKFASVYAWNRKRISNCVADYSVLYNSTSFSTFKCYGVSPTKLNDLCFTNVYADSFVVKGDEVRQIAPGQTGVIADYNYKLPDDFTGCVIAWNSVKQDALTGGNYGYLYRLFRKSKLKPFERDISTEIYQAGSTPCNGQVGLNCYYPLERYGFHPTTGVNYQPFRVVVLSFELLNGPATVCGPKLSTTLVKDKCVNFNFNGLTGTGVLTTSKKQFLPFQQFGRDISDTTDAVRDPQTLEILDITPCSFGGVSVITPGTNTSNQVAVLYQDVNCTEVPMAIHAEQLTPAWRVYSAGANVFQTRAGCLVGAEHVNNSYECDIPVGAGICASYHSMSSLRSVNQRSIIAYTMSLGAENSVAYSNNSIAIPTNFTISVTTEILPVSMTKTSVDCTMYICGDSIECSNLLLQYGSFCTQLNRALTGIAVEQDKNTQEVFAQVKQIYKTPPIKDFGGFNFSQILPDPSKPSKRSFIEDLLFNKVTLADAGFIKQYGDCLGDIAARDLICAQKFNGLTVLPPLLTDEMIAQYTSALLAGTITSGWTFGAGAALQIPFAMQMAYRFNGIGVTQNVLYENQKLIANQFNSAIGKIQDSLSSTASALGKLQDVVNQNAQALNTLVKQLSSNFGCISSVLNDILSRLDKVEAEVQIDCLITGRLQSLQTYVTQQLIRAAEIRASANLAATKMSECVLGQSKRVDFCGKGYHLMSFPQSAPHGVVFLHVTYVPAQEKNFTTAPAICHEGKAHFPREGVFVSNGTHWFITQRNFYEPQIITTDNTFVSGSCDVVIGIVNNTVYDPLQPELDSFKEELDKYFKNHTSPDVDLGDISGINASVVNIQKEIDRLNEVAKNLNESPIDLQELGKYEQYIKGGGSGGGQIYEGKLTAEGLRFGIVASRFNHALVDRLVEGAIDAIVRHGGREEDITLVRVPGSWEIPVAAGELARKEDIDAVIAIGVLIRGATPHFDYIASEVSKGLADLSLELRKPITFGVITADTLEQAIERAGTKHGNKGWEAALSAIEMANLFKSLR

SEQ ID NO: 4492 - protein, 1365 aa, Artificial Sequence
  SARS-CoV-2/pangolin/Guangxi/P5L/2017__EPI_ISL_410540 spike protein (1-1205)(A966C_R989C) LumSynth construct
MFVFLFVLPLVSSQCVNLTTRTGIPPGYTNSSTRGVYYPDKVFRSSILHLTQDLFLPFFSNVTWFNTINYQGGFKKFDNPVLPFNDGVYFASTEKSNIIRGWIFGTTLDARTQSLLIVNNATNVVIKVCEFQFCTDPFLGVYYHNNNKTWVENEFRVYSSANNCTFEYISQPFLMDLEGKQGNFKNLREFVFKNVDGYFKIYSKHTPIDLVRDLPRGFAALEPLVDLPIGINITRFQTLLALHRSYLTPGKLESGWTTGAAAYYVGYLQQRTFLLSYNQNGTITDAVDCSLDPLSETKCTLKSLTVEKGIYQTSNFRVQPTISIVRFPNITNLCPFGEVFNASKFASVYAWNRKRISNCVADYSVLYNSTSFSTFKCYGVSPTKLNDLCFTNVYADSFVVKGDEVRQIAPGQTGVIADYNYKLPDDFTGCVIAWNSVKQDALTGGNYGYLYRLFRKSKLKPFERDISTEIYQAGSTPCNGQVGLNCYYPLERYGFHPTTGVNYQPFRVVVLSFELLNGPATVCGPKLSTTLVKDKCVNFNFNGLTGTGVLTTSKKQFLPFQQFGRDISDTTDAVRDPQTLEILDITPCSFGGVSVITPGTNTSNQVAVLYQDVNCTEVPMAIHAEQLTPAWRVYSAGANVFQTRAGCLVGAEHVNNSYECDIPVGAGICASYHSMSSFRSVNQRSIIAYTMSLGAENSVAYSNNSIAIPTNFTISVTTEILPVSMTKTSVDCTMYICGDSIECSNLLLQYGSFCTQLNRALTGIAVEQDKNTQEVFAQVKQIYKTPPIKDFGGFNFSQILPDPSKPSKRSFIEDLLFNKVTLADAGFIKQYGDCLGDIAARDLICAQKFNGLTVLPPLLTDEMIAQYTSALLAGTITSGWTFGAGAALQIPFAMQMAYRFNGIGVTQNVLYENQKLIANQFNSAIGKIQDSLSSTASALGKLQDVVNQNAQALNTLVKQLSSNFGCISSVLNDILSRLDKVEAEVQIDCLITGRLQSLQTYVTQQLIRAAEIRASANLAATKMSECVLGQSKRVDFCGKGYHLMSFPQSAPHGVVFLHVTYVPAQEKNFTTAPAICHEGKAHFPREGVFVSNGTHWFITQRNFYEPQIITTDNTFVSGSCDVVIGIVNNTVYDPLQPELDSFKEELDKYFKNHTSPDVDLGDISGINASVVNIQKEIDRLNEVAKNLNESLIDLQELGKYEQYIKGGGSGGGQIYEGKLTAEGLRFGIVASRFNHALVDRLVEGAIDAIVRHGGREEDITLVRVPGSWEIPVAAGELARKEDIDAVIAIGVLIRGATPHFDYIASEVSKGLADLSLELRKPITFGVITADTLEQAIERAGTKHGNKGWEAALSAIEMANLFKSLR

SEQ ID NO: 4493 - protein, 1365 aa, Artificial Sequence
  SARS-CoV-2/pangolin/Guangxi/P5E/2017__EPI_ISL_410541 spike protein (1-1205)(A966C_R989C) LumSynth construct
MFVFLFVLPLVSSQCVNLTTRTGIPPGYTNSSTRGVYYPDKVFRSSILHLTQDLFLPFFSNVTWFNTITYQGGSKKFDNPVLPFNDGVYFASTEKSNIIRGWIFGTTLDARTQSLLIVNNATNVVIKVCEFQFCTDPFLGVYYHNNNKTWVENEFRVYSSANNCTFEYISQPFLMDLEGKQGNFKNLREFVFKNVDGYFKIYSKHTPIDLVRDLPRGFAALEPLVDLPIGINITRFQTLLALHRSYLTPGKLESGWTTGAAAYYVGYLQQRTFLLSYNQNGTITDAVDCSLDPLSETKCTLKSLTVEKGIYQTSNFRVQPTISIVRFPNITNLCPFGEVFNASKFASVYAWNRKRISNCVADYSVLYNSTSFSTFKCYGVSPTKLNDLCFTNVYADSFVVKGDEVRQIAPGQTGVIADYNYKLPDDFTGCVIAWNSVKQDALTGDNYGYLYRLFRKSKLKPFERDISTEIYQAGSTPCNGQVGLNCYYPLERYGFHPTTGVNYQPFRVVVLSFELLNGPATVCGPKLSTTLVKDKCVNFNFNGLTGTGVLTTSKKQFLPFQQFGRDISDTTDAVRDPQTLEILDITPCSFGGVSVITPGTNTSNQVAVLYQDVNCTEVPMAIHAEQLTPAWRVYSAGANVFQTRAGCLVGAEHVNNSYECDIPVGAGICASYHSMSSFRSVNQRSIIAYTMSLGAENSVAYSNNSIAIPTNFTISVTTEILPVSMTKTSVDCTMYICGDSIECSNLLLQYGSFCTQLNRALTGIAVEQDKNTQEVFAQVKQIYKTPPIKDFGGFNFSQILPDPSKPSKRSFIEDLLFNKVTLADAGFIKQYGDCLGDIAARDLICAQKFNGLTVLPPLLTDEMIAQYTSALLAGTITSGWTFGAGAALQIPFAMQMAYRFNGIGVTQNVLYENQKLIANQFNSAIGKIQDSLSSTASALGKLQDVVNQNAQALNTLVKQLSSNFGCISSVLNDILSRLDKVEAEVQIDCLITGRLQSLQTYVTQQLIRAAEIRASANLAATKMSECVLGQSKRVDFCGKGYHLMSFPQSAPHGVVFLHVTYVPAQEKNFTTAPAICHEGKAHFPREGVFVSNGTHWFITQRNFYEPQIITTDNTFVSGSCDVVIGIVNNTVYDPLQPELDSFKEELDKYFKNHTSPDVDLGDISGINASVVNIQKEIDRLNEVAKNLNESLIDLQELGKYEQYIKGGGSGGGQIYEGKLTAEGLRFGIVASRFNHALVDRLVEGAIDAIVRHGGREEDITLVRVPGSWEIPVAAGELARKEDIDAVIAIGVLIRGATPHFDYIASEVSKGLADLSLELRKPITFGVITADTLEQAIERAGTKHGNKGWEAALSAIEMANLFKSLR

SEQ ID NO: 4494 - protein, 1363 aa, Artificial Sequence
  SARS-CoV-2/pangolin/Guangxi/P1E/2017__EPI_ISL_410539 spike protein (1-1203)(A964C_R987C) LumSynth construct
MFVFLFVLPLVSSQCVNLTTRTGIQPGYTNSSTRGVYYPDKVFRSSILHLTQDLFLPFFSNVTWFNTINYQGGFKKFDNPVLPFNDGVYFASTEKSNIIRGWIFGTTLDARTQSLLIVNNATNVVIKVCEFQFCTDPFLGVYYHNNNKTWVENEFRVYSSANNCTFEYISQPFLMDLEGKQGNFKNLREFVFKNVDGYFKIYSKHTPIDLVRDLPRGFAALEPLVDLPIGINITRFQTLLALHRSYLTPGKLESGWTTGAAAYYVGYLQQRTFLLSYNQNGTITDAVDCSLDPLSETKCTLKSLTVEKGIYQTSNFRVQPTISIVRFPNITNLCPFGEVFNASKFASVYAWNRKRISNCVADYSVLYNSTSFSTFKCYGVSPTKLNDLCFTNVYADSFVVKGDEVRQIAPGQTGVIADYNYKLPDDFTGCVIAWNSVKQDALTGGNYLYRLFRKSKLKPFERDISTEIYQAGSTPCNGQVGLNCYYPLERYGFHPTTGVNYQPFRVVVLSFELLNGPATVCGPKLSTTLVKDKCVNFNFNGLTGTGVLTTSKKQFLPFQQFGRDISDTTDAVRDPQTLEILDITPCSFGGVSVITPGTNTSNQVAVLYQDVNCTEVPMAIHAEQLTPAWRVYSAGANVFQTRAGCLVGAEHVNNSYECDIPVGAGICASYHSMSSLRSVNQRSIIAYTMSLGAENSVAYSNNSIAIPTNFTISVTTEILPVSMTKTSVDCTMYICGDSIECSNLLLQYGSFCTQLNRALTGIAVEQDKNTQEVFAQVKQIYKTPPIKDFGGFNFSQILPDPSKPSKRSFIEDLLFNKVTLADAGFIKQYGDCLGDIAARDLICAQKFNGLTVLPPLLTDEMIAQYTSALLAGTITSGWTFGAGAALQIPFAMQMAYRFNGIGVTQNVLYENQKLIANQFNSAIGKIQDSLSSTASALGKLQDVVNQNAQALNTLVKQLSSNFGCISSVLNDILSRLDKVEAEVQIDCLITGRLQSLQTYVTQQLIRAAEIRASANLAATKMSECVLGQSKRVDFCGKGYHLMSFPQSAPHGVVFLHVTYVPAQEKNFTTAPAICHEGKAHFPREGVFVSNGTHWFITQRNFYEPQIITTDNTFVSGSCDVVIGIVNNTVYDPLQPELDSFKEELDKYFKNHTSPDVDLGDISGINASVVNIQKEIDRLNEVAKNLNESLIDLQELGKYEQYIKGGGSGGGQIYEGKLTAEGLRFGIVASRFNHALVDRLVEGAIDAIVRHGGREEDITLVRVPGSWEIPVAAGELARKEDIDAVIAIGVLIRGATPHFDYIASEVSKGLADLSLELRKPITFGVITADTLEQAIERAGTKHGNKGWEAALSAIEMANLFKSLR

SEQ ID NO: 4495 - protein, 1371 aa, Artificial Sequence
  SARS-CoV-2/Wuhan/WIV05/2019__EPI_ISL_402128 spike protein (1-1211)(A890C_V1040C) LumSynth construct
MFVFLVLLPLVSSQCVNLTTRTQLPPAYTNSFTRGVYYPDKVFRSSVLHSTQDLFLPFFSNVTWFHAIHVSGTNGTKRFDNPVLPFNDGVYFASTEKSNIIRGWIFGTTLDSKTQSLLIVNNATNVVIKVCEFQFCNDPFLGVYYHKNNKSWMESEFRVYSSANNCTFEYVSQPFLMDLEGKQGNFKNLREFVFKNIDGYFKIYSKHTPINLVRDLPQGFSALEPLVDLPIGINITRFQTLLALHRSYLTPGDSSSGWTAGAAAYYVGYLQPRTFLLKYNENGTITDAVDCALDPLSETKCTLKSFTVEKGIYQTSNFRVQPTESIVRFPNITNLCPFGEVFNATRFASVYAWNRKRISNCVADYSVLYNSASFSTFKCYGVSPTKLNDLCFTNVYADSFVIRGDEVRQIAPGQTGKIADYNYKLPDDFTGCVIAWNSNNLDSKVGGNYNYLYRLFRKSNLKPFERDISTEIYQAGSTPCNGVEGFNCYFPLQSYGFQPTNGVGYQPYRVVVLSFELLHAPATVCGPKKSTNLVKNKCVNFNFNGLTGTGVLTESNKKFLPFQQFGRDIADTTDAVRDPQTLEILDITPCSFGGVSVITPGTNTSNQVAVLYQDVNCTEVPVAIHADQLTPTWRVYSTGSNVFQTRAGCLIGAEHVNNSYECDIPIGAGICASYQTQTNSPRRARSVASQSIIAYTMSLGAENSVAYSNNSIAIPTNFTISVTTEILPVSMTKTSVDCTMYICGDSTECSNLLLQYGSFCTQLNRALTGIAVEQDKNTQEVFAQVKQIYKTPPIKDFGGFNFSQILPDPSKPSKRSFIEDLLFNKVTLADAGFIKQYGDCLGDIAARDLICAQKFNGLTVLPPLLTDEMIAQYTSALLAGTITSGWTFGCGAALQIPFAMQMAYRFNGIGVTQNVLYENQKLIANQFNSAIGKIQDSLSSTASALGKLQDVVNQNAQALNTLVKQLSSNFGAISSVLNDILSRLDKVEAEVQIDRLITGRLQSLQTYVTQQLIRAAEIRASANLAATKMSECVLGQSKRCDFCGKGYHLMSFPQSAPHGVVFLHVTYVPAQEKNFTTAPAICHDGKAHFPREGVFVSNGTHWFVTQRNFYEPQIITTDNTFVSGNCDVVIGIVNNTVYDPLQPELDSFKEELDKYFKNHTSPDVDLGDISGINASVVNIQKEIDRLNEVAKNLNESLIDLQELGKYEQYIKGGGSGGGQIYEGKLTAEGLRFGIVASRFNHALVDRLVEGAIDAIVRHGGREEDITLVRVPGSWEIPVAAGELARKEDIDAVIAIGVLIRGATPHFDYIASEVSKGLADLSLELRKPITFGVITADTLEQAIERAGTKHGNKGWEAALSAIEMANLFKSLR

SEQ ID NO: 4496 - protein, 1367 aa, Artificial Sequence; identical to SEQ ID NO: 4228
  SARS-CoV-2/bat/Yunnan/RaTG13/2013__EPI_ISL_402131 spike protein (1-1207)(A886C_V1036C) LumSynth construct

SEQ ID NO: 4497 - protein, 1371 aa, Artificial Sequence; identical to SEQ ID NO: 4229
  SARS-CoV-2/Wuhan/HBCDC-HB-01/2019__EPI_ISL_402132 spike protein (1-1211)(A890C_V1040C) LumSynth construct

SEQ ID NO: 4498 - protein, 1371 aa, Artificial Sequence; identical to SEQ ID NO: 4230
  SARS-CoV-2/Guangdong/20SF028/2020__EPI_ISL_403936 spike protein (1-1211)(A890C_V1040C) LumSynth construct

SEQ ID NO: 4499 - protein, 1371 aa, Artificial Sequence; identical to SEQ ID NO: 4231
  SARS-CoV-2/Shenzhen/SZTH-001/2020__EPI_ISL_406592 spike protein (1-1211)(A890C_V1040C) LumSynth construct

SEQ ID NO: 4500 - protein, 1371 aa, Artificial Sequence; identical to SEQ ID NO: 4232
  SARS-CoV-2/Shenzhen/SZTH-004/2020__EPI_ISL_406595 spike protein (1-1211)(A890C_V1040C) LumSynth construct

SEQ ID NO: 4501 - protein, 1371 aa, Artificial Sequence; identical to SEQ ID NO: 4233
  SARS-CoV-2/France/IDF0372/2020__EPI_ISL_406596 spike protein (1-1211)(A890C_V1040C) LumSynth construct

SEQ ID NO: 4502 - protein, 1371 aa, Artificial Sequence; identical to SEQ ID NO: 4234
  SARS-CoV-2/Australia/VIC01/2020__EPI_ISL_406844 spike protein (1-1211)(A890C_V1040C) LumSynth construct

SEQ ID NO: 4503 - protein, 1371 aa, Artificial Sequence; identical to SEQ ID NO: 4235
  SARS-CoV-2/Germany/BavPat1/2020__EPI_ISL_406862 spike protein (1-1211)(A890C_V1040C) LumSynth construct

SEQ ID NO: 4504 - protein, 1371 aa, Artificial Sequence; identical to SEQ ID NO: 4236
  SARS-CoV-2/Wuhan/HBCDC-HB-02/2020__EPI_ISL_412978 spike protein (1-1211)(A890C_V1040C) LumSynth construct

SEQ ID NO: 4505 - protein, 1371 aa, Artificial Sequence; identical to SEQ ID NO: 4237
  SARS-CoV-2/Australia/QLD02/2020__EPI_ISL_407896 spike protein (1-1211)(A890C_V1040C) LumSynth construct

SEQ ID NO: 4506 - protein, 1371 aa, Artificial Sequence; identical to SEQ ID NO: 4238
  SARS-CoV-2/India/1-31/2020__EPI_ISL_413523 spike protein (1-1211)(A890C_V1040C) LumSynth construct

SEQ ID NO: 4507 - protein, 1371 aa, Artificial Sequence; identical to SEQ ID NO: 4239
  SARS-CoV-2/Guangdong/GD2020087-P0008/2020__EPI_ISL_413863 spike protein (1-1211)(A890C_V1040C) LumSynth construct

SEQ ID NO: 4508 - protein, 1371 aa, Artificial Sequence; identical to SEQ ID NO: 4240
  SARS-CoV-2/Sweden/01/2020__EPI_ISL_411951 spike protein (1-1211)(A890C_V1040C) LumSynth construct

SEQ ID NO: 4509 - protein, 1371 aa, Artificial Sequence; identical to SEQ ID NO: 4241
  SARS-CoV-2/Tianmen/HBCDC-HB-07/2020__EPI_ISL_412983 spike protein (1-1211)(A890C_V1040C) LumSynth construct

SEQ ID NO: 4510 - protein, 1371 aa, Artificial Sequence; identical to SEQ ID NO: 4242
  SARS-CoV-2/Hong Kong/case42_VM20002493/2020__EPI_ISL_414527 spike protein (1-1211)(A890C_V1040C) LumSynth construct

SEQ ID NO: 4511 - protein, 1371 aa, Artificial Sequence; identical to SEQ ID NO: 4243
  SARS-CoV-2/USA/CruiseA-23/2020__EPI_ISL_414482 spike protein (1-1211)(A890C_V1040C) LumSynth construct

SEQ ID NO: 4512 - protein, 1371 aa, Artificial Sequence; identical to SEQ ID NO: 4244
  SARS-CoV-2/Hong Kong/case85_VM20002868/2020__EPI_ISL_414519 spike protein (1-1211)(A890C_V1040C) LumSynth construct

SEQ ID NO: 4513 - protein, 1371 aa, Artificial Sequence; identical to SEQ ID NO: 4235
  SARS-CoV-2/England/200990660/2020__EPI_ISL_414523 spike protein (1-1211)(A890C_V1040C) LumSynth construct

SEQ ID NO: 4514 - protein, 1371 aa, Artificial Sequence; identical to SEQ ID NO: 4246
  SARS-CoV-2/Australia/NSW09/2020__EPI_ISL_413595 spike protein (1-1211)(A890C_V1040C) LumSynth construct

SEQ ID NO: 4515 - protein, 1371 aa, Artificial Sequence; identical to SEQ ID NO: 4227
  SARS-CoV-2/Australia/NSW10/2020__EPI_ISL_413596 spike protein (1-1211)(A890C_V1040C) LumSynth construct

SEQ ID NO: 4516 - protein, 1371 aa, Artificial Sequence; identical to SEQ ID NO: 4248
  SARS-CoV-2/Switzerland/1000477797/2020__EPI_ISL_413023 spike protein (1-1211)(A890C_V1040C) LumSynth construct

SEQ ID NO: 4517 - protein, 1371 aa, Artificial Sequence; identical to SEQ ID NO: 4249
  SARS-CoV-2/Belgium/BA-02291/2020__EPI_ISL_415159 spike protein (1-1211)(A890C_V1040C) LumSynth construct

SEQ ID NO: 4518 - protein, 1371 aa, Artificial Sequence; identical to SEQ ID NO: 4250
  SARS-CoV-2/USA/WA8-UW5/2020__EPI_ISL_413486 spike protein (1-1211)(A890C_V1040C) LumSynth construct

SEQ ID NO: 4519 - protein, 1371 aa, Artificial Sequence; identical to SEQ ID NO: 4251
  SARS-CoV-2/England/20102000506/2020__EPI_ISL_415147 spike protein (1-1211)(A890C_V1040C) LumSynth construct

SEQ ID NO: 4520 - protein, 1371 aa, Artificial Sequence; identical to SEQ ID NO: 4252
  SARS-CoV-2/Belgium/VAG-03013/2020__EPI_ISL_415155 spike protein (1-1211)(A890C_V1040C) LumSynth construct

SEQ ID NO: 4521 - protein, 1371 aa, Artificial Sequence; identical to SEQ ID NO: 4253
  SARS-CoV-2/Belgium/BC-03016/2020__EPI_ISL_415157 spike protein (1-1211)(A890C_V1040C) LumSynth construct

SEQ ID NO: 4522 - protein, 1371 aa, Artificial Sequence; identical to SEQ ID NO: 4254
  SARS-CoV-2/Germany/BavPat3/2020__EPI_ISL_414521 spike protein (1-1211)(A890C_V1040C) LumSynth construct

SEQ ID NO: 4523 - protein, 1371 aa, Artificial Sequence; identical to SEQ ID NO: 4255
  SARS-CoV-2/France/HF1805/2020__EPI_ISL_414628 spike protein (1-1211)(A890C_V1040C) LumSynth construct

SEQ ID NO: 4524 - protein, 1371 aa, Artificial Sequence; identical to SEQ ID NO: 4256
  SARS-CoV-2/Netherlands/ZuidHolland_9/2020__EPI_ISL_414445 spike protein (1-1211)(A890C_V1040C) LumSynth construct

SEQ ID NO: 4525 - protein, 1371 aa, Artificial Sequence; identical to SEQ ID NO: 4257
  SARS-CoV-2/Finland/FIN03032020A/2020__EPI_ISL_413602 spike protein (1-1211)(A890C_V1040C) LumSynth construct

SEQ ID NO: 4526 - protein, 1371 aa, Artificial Sequence; identical to SEQ ID NO: 4258
  SARS-CoV-2/France/GE1977/2020__EPI_ISL_414632 spike protein (1-1211)(A890C_V1040C) LumSynth construct

SEQ ID NO: 4527 - protein, 1371 aa, Artificial Sequence; identical to SEQ ID NO: 4259
  SARS-CoV-2/Finland/FIN-313/2020__EPI_ISL_414641 spike protein (1-1211)(A890C_V1040C) LumSynth construct

SEQ ID NO: 4528 - protein, 1371 aa, Artificial Sequence; identical to SEQ ID NO: 4260
  SARS-CoV-2/Netherlands/ZuidHolland_2/2020__EPI_ISL_414556 spike protein (1-1211)(A890C_V1040C) LumSynth construct

SEQ ID NO: 4529 - protein, 1371 aa, Artificial Sequence; identical to SEQ ID NO: 4261
  SARS-CoV-2/USA/WA-UW31/2020__EPI_ISL_414618 spike protein (1-1211)(A890C_V1040C) LumSynth construct

SEQ ID NO: 4530 - protein, 1371 aa, Artificial Sequence; identical to SEQ ID NO: 4262
  SARS-CoV-2/South Korea/SNU01/2020__EPI_ISL_411929 spike protein (1-1211)(A890C_V1040C) LumSynth construct

SEQ ID NO: 4531 - protein, 1371 aa, Artificial Sequence; identical to SEQ ID NO: 4263
  SARS-CoV-2/China/WF0004/2020__EPI_ISL_413694 spike protein (1-1211)(A890C_V1040C) LumSynth construct

SEQ ID NO: 4532 - protein, 1371 aa, Artificial Sequence; identical to SEQ ID NO: 4264
  SARS-CoV-2/China/WF0028/2020__EPI_ISL_413791 spike protein (1-1211)(A890C_V1040C) LumSynth construct

SEQ ID NO: 4533 - protein, 1371 aa, Artificial Sequence; identical to SEQ ID NO: 4265
  SARS-CoV-2/2019-nCoV/USA-CruiseA-18/2020__MT159716.1 spike protein (1-1211)(A890C_V1040C) LumSynth construct

SEQ ID NO: 4534 - protein, 1371 aa, Artificial Sequence; identical to SEQ ID NO: 4266
  SARS-CoV-2/SARS-CoV-2/Yunnan-01/human/2020/CHN__MT049951.1 spike protein (1-1211)(A890C_V1040C) LumSynth construct

SEQ ID NO: 4535 - protein, 1371 aa, Artificial Sequence; identical to SEQ ID NO: 4267
  SARS-CoV-2/USA/WA-UW292/2020__EPI_ISL_418077 spike protein (1-1211)(A890C_V1040C) LumSynth construct

SEQ ID NO: 4536 - protein, 1371 aa, Artificial Sequence; identical to SEQ ID NO: 4268
  SARS-CoV-2/Iceland/192/2020__EPI_ISL_417819 spike protein (1-1211)(A890C_V1040C) LumSynth construct

SEQ ID NO: 4537 - protein, 1371 aa, Artificial Sequence; identical to SEQ ID NO: 4269
  SARS-CoV-2/Belgium/ULG-6939/2020__EPI_ISL_417020 spike protein (1-1211)(A890C_V1040C) LumSynth construct

SEQ ID NO: 4538 - protein, 1371 aa, Artificial Sequence; identical to SEQ ID NO: 4270
  SARS-CoV-2/France/HF2496/2020__EPI_ISL_418231 spike protein (1-1211)(A890C_V1040C) LumSynth construct

SEQ ID NO: 4539 - protein, 1371 aa, Artificial Sequence; identical to SEQ ID NO: 4271
  SARS-CoV-2/USA/WA-UW291/2020__EPI_ISL_418076 spike protein (1-1211)(A890C_V1040C) LumSynth construct

SEQ ID NO: 4540 - protein, 1371 aa, Artificial Sequence; identical to SEQ ID NO: 4235
  SARS-CoV-2/Portugal/PT0034/2020__EPI_ISL_418019 spike protein (1-1211)(A890C_V1040C) LumSynth construct

SEQ ID NO: 4541 - protein, 1371 aa, Artificial Sequence; identical to SEQ ID NO: 4273
  SARS-CoV-2/Iceland/202/2020__EPI_ISL_417750 spike protein (1-1211)(A890C_V1040C) LumSynth construct

SEQ ID NO: 4542 - protein, 1371 aa, Artificial Sequence; identical to SEQ ID NO: 4274
  SARS-CoV-2/USA/WA-UW261/2020__EPI_ISL_418046 spike protein (1-1211)(A890C_V1040C) LumSynth construct

SEQ ID NO: 4543 - protein, 1371 aa, Artificial Sequence; identical to SEQ ID NO: 4275
  SARS-CoV-2/Portugal/PT0035/2020__EPI_ISL_418020 spike protein (1-1211)(A890C_V1040C) LumSynth construct

SEQ ID NO: 4544 - protein, 1371 aa, Artificial Sequence; identical to SEQ ID NO: 4276
  SARS-CoV-2/USA/NY-NYUMC7/2020__EPI_ISL_418192 spike protein (1-1211)(A890C_V1040C) LumSynth construct

SEQ ID NO: 4545 - protein, 1371 aa, Artificial Sequence; identical to SEQ ID NO: 4277
  SARS-CoV-2/Iceland/189/2020__EPI_ISL_417709 spike protein (1-1211)(A890C_V1040C) LumSynth construct

SEQ ID NO: 4546 - protein, 1371 aa, Artificial Sequence; identical to SEQ ID NO: 4278
  SARS-CoV-2/Australia/NSW56/2020__EPI_ISL_417408 spike protein (1-1211)(A890C_V1040C) LumSynth construct

SEQ ID NO: 4547 - protein, 1371 aa, Artificial Sequence; identical to SEQ ID NO: 4279
  SARS-CoV-2/Iceland/280/2020__EPI_ISL_417608 spike protein (1-1211)(A890C_V1040C) LumSynth construct

SEQ ID NO: 4548 - protein, 1371 aa, Artificial Sequence; identical to SEQ ID NO: 4235
  SARS-CoV-2/Iceland/247/2020__EPI_ISL_417575 spike protein (1-1211)(A890C_V1040C) LumSynth construct

SEQ ID NO: 4549 - protein, 1371 aa, Artificial Sequence; identical to SEQ ID NO: 4281
  SARS-CoV-2/Iceland/238/2020__EPI_ISL_417566 spike protein (1-1211)(A890C_V1040C) LumSynth construct

SEQ ID NO: 4550 - protein, 1371 aa, Artificial Sequence; identical to SEQ ID NO: 4282
  SARS-CoV-2/Greece/16/2020__EPI_ISL_418265 spike protein (1-1211)(A890C_V1040C) LumSynth construct

SEQ ID NO: 4551 - protein, 1371 aa, Artificial Sequence; identical to SEQ ID NO: 4283
  SARS-CoV-2/Iceland/319/2020__EPI_ISL_417648 spike protein (1-1211)(A890C_V1040C) LumSynth construct

SEQ ID NO: 4552 - protein, 1371 aa, Artificial Sequence; identical to SEQ ID NO: 4284
  SARS-CoV-2/Congo/94/2020__EPI_ISL_417947 spike protein (1-1211)(A890C_V1040C) LumSynth construct

SEQ ID NO: 4553 - protein, 1371 aa, Artificial Sequence; identical to SEQ ID NO: 4285
  SARS-CoV-2/Congo/158/2020__EPI_ISL_417950 spike protein (1-1211)(A890C_V1040C) LumSynth construct

SEQ ID NO: 4554 - protein, 1371 aa, Artificial Sequence; identical to SEQ ID NO: 4286
  SARS-CoV-2/USA/UT-00034/2020__EPI_ISL_417977 spike protein (1-1211)(A890C_V1040C) LumSynth construct

SEQ ID NO: 4555 - protein, 1371 aa, Artificial Sequence; identical to SEQ ID NO: 4287
  SARS-CoV-2/USA/UT-00033/2020__EPI_ISL_417976 spike protein (1-1211)(A890C_V1040C) LumSynth construct

SEQ ID NO: 4556 - protein, 1371 aa, Artificial Sequence; identical to SEQ ID NO: 4288
  SARS-CoV-2/USA/WI-13/2020__EPI_ISL_417516 spike protein (1-1211)(A890C_V1040C) LumSynth construct

SEQ ID NO: 4557 - protein, 1370 aa, Artificial Sequence; identical to SEQ ID NO: 4289
  SARS-CoV-2/India/1-27/2020__EPI_ISL_413522 spike protein (1-1210)(A889C_V1039C) LumSynth construct

SEQ ID NO: 4558 - protein, 1365 aa, Artificial Sequence; identical to SEQ ID NO: 4290
  SARS-CoV-2/pangolin/Guangxi/P4L/2017__EPI_ISL_410538 spike protein (1-1205)(A884C_V1034C) LumSynth construct

SEQ ID NO: 4559 - protein, 1365 aa, Artificial Sequence; identical to SEQ ID NO: 4291
  SARS-CoV-2/pangolin/Guangxi/P5L/2017__EPI_ISL_410540 spike protein (1-1205)(A884C_V1034C) LumSynth construct

SEQ ID NO: 4560 - protein, 1365 aa, Artificial Sequence; identical to SEQ ID NO: 4292
  SARS-CoV-2/pangolin/Guangxi/P5E/2017__EPI_ISL_410541 spike protein (1-1205)(A884C_V1034C) LumSynth construct

SEQ ID NO: 4561 - protein, 1363 aa, Artificial Sequence; identical to SEQ ID NO: 4293
  SARS-CoV-2/pangolin/Guangxi/P1E/2017__EPI_ISL_410539 spike protein (1-1203)(A882C_V1032C) LumSynth construct

SEQ ID NO: 4562 - protein, 1371 aa, Artificial Sequence
  SARS-CoV-2/Wuhan/WIV05/2019__EPI_ISL_402128 spike protein (1-1211)(T874C_S1055C) LumSynth construct
MFVFLVLLPLVSSQCVNLTTRTQLPPAYTNSFTRGVYYPDKVFRSSVLHSTQDLFLPFFSNVTWFHAIHVSGTNGTKRFDNPVLPFNDGVYFASTEKSNIIRGWIFGTTLDSKTQSLLIVNNATNVVIKVCEFQFCNDPFLGVYYHKNNKSWMESEFRVYSSANNCTFEYVSQPFLMDLEGKQGNFKNLREFVFKNIDGYFKIYSKHTPINLVRDLPQGFSALEPLVDLPIGINITRFQTLLALHRSYLTPGDSSSGWTAGAAAYYVGYLQPRTFLLKYNENGTITDAVDCALDPLSETKCTLKSFTVEKGIYQTSNFRVQPTESIVRFPNITNLCPFGEVFNATRFASVYAWNRKRISNCVADYSVLYNSASFSTFKCYGVSPTKLNDLCFTNVYADSFVIRGDEVRQIAPGQTGKIADYNYKLPDDFTGCVIAWNSNNLDSKVGGNYNYLYRLFRKSNLKPFERDISTEIYQAGSTPCNGVEGFNCYFPLQSYGFQPTNGVGYQPYRVVVLSFELLHAPATVCGPKKSTNLVKNKCVNFNFNGLTGTGVLTESNKKFLPFQQFGRDIADTTDAVRDPQTLEILDITPCSFGGVSVITPGTNTSNQVAVLYQDVNCTEVPVAIHADQLTPTWRVYSTGSNVFQTRAGCLIGAEHVNNSYECDIPIGAGICASYQTQTNSPRRARSVASQSIIAYTMSLGAENSVAYSNNSIAIPTNFTISVTTEILPVSMTKTSVDCTMYICGDSTECSNLLLQYGSFCTQLNRALTGIAVEQDKNTQEVFAQVKQIYKTPPIKDFGGFNFSQILPDPSKPSKRSFIEDLLFNKVTLADAGFIKQYGDCLGDIAARDLICAQKFNGLTVLPPLLTDEMIAQYCSALLAGTITSGWTFGAGAALQIPFAMQMAYRFNGIGVTQNVLYENQKLIANQFNSAIGKIQDSLSSTASALGKLQDVVNQNAQALNTLVKQLSSNFGAISSVLNDILSRLDKVEAEVQIDRLITGRLQSLQTYVTQQLIRAAEIRASANLAATKMSECVLGQSKRVDFCGKGYHLMSFPQCAPHGVVFLHVTYVPAQEKNFTTAPAICHDGKAHFPREGVFVSNGTHWFVTQRNFYEPQIITTDNTFVSGNCDVVIGIVNNTVYDPLQPELDSFKEELDKYFKNHTSPDVDLGDISGINASVVNIQKEIDRLNEVAKNLNESLIDLQELGKYEQYIKGGGSGGGQIYEGKLTAEGLRFGIVASRFNHALVDRLVEGAIDAIVRHGGREEDITLVRVPGSWEIPVAAGELARKEDIDAVIAIGVLIRGATPHFDYIASEVSKGLADLSLELRKPITFGVITADTLEQAIERAGTKHGNKGWEAALSAIEMANLFKSLR

SEQ ID NO: 4563 - protein, 1367 aa, Artificial Sequence
  SARS-CoV-2/bat/Yunnan/RaTG13/2013__EPI_ISL_402131 spike protein (1-1207)(T870C_S1051C) LumSynth construct
MFVFLVLLPLVSSQCVNLTTRTQLPPAYTNSSTRGVYYPDKVFRSSVLHLTQDLFLPFFSNVTWFHAIHVSGTNGIKRFDNPVLPFNDGVYFASTEKSNIIRGWIFGTTLDSKTQSLLIVNNATNVVIKVCEFQFCNDPFLGVYYHKNNKSWMESEFRVYSSANNCTFEYVSQPFLMDLEGKQGNFKNLREFVFKNIDGYFKIYSKHTPINLVRDLPPGFSALEPLVDLPIGINITRFQTLLALHRSYLTPGDSSSGWTAGAAAYYVGYLQPRTFLLKYNENGTITDAVDCALDPLSETKCTLKSFTVEKGIYQTSNFRVQPTDSIVRFPNITNLCPFGEVFNATTFASVYAWNRKRISNCVADYSVLYNSTSFSTFKCYGVSPTKLNDLCFTNVYADSFVITGDEVRQIAPGQTGKIADYNYKLPDDFTGCVIAWNSKHIDAKEGGNFNYLYRLFRKANLKPFERDISTEIYQAGSKPCNGQTGLNCYYPLYRYGFYPTDGVGHQPYRVVVLSFELLNAPATVCGPKKSTNLVKNKCVNFNFNGLTGTGVLTESNKKFLPFQQFGRDIADTTDAVRDPQTLEILDITPCSFGGVSVITPGTNASNQVAVLYQDVNCTEVPVAIHADQLTPTWRVYSTGSNVFQTRAGCLIGAEHVNNSYECDIPIGAGICASYQTQTNSRSVASQSIIAYTMSLGAENSVAYSNNSIAIPTNFTISVTTEILPVSMTKTSVDCTMYICGDSTECSNLLLQYGSFCTQLNRALTGIAVEQDKNTQEVFAQVKQIYKTPPIKDFGGFNFSQILPDPSKPSKRSFIEDLLFNKVTLADAGFIKQYGDCLGDIAARDLICAQKFNGLTVLPPLLTDEMIAQYCSALLAGTITSGWTFGAGAALQIPFAMQMAYRFNGIGVTQNVLYENQKLIANQFNSAIGKIQDSLSSTASALGKLQDVVNQNAQALNTLVKQLSSNFGAISSVLNDILSRLDKVEAEVQIDRLITGRLQSLQTYVTQQLIRAAEIRASANLAATKMSECVLGQSKRVDFCGKGYHLMSFPQCAPHGVVFLHVTYVPAQEKNFTTAPAICHDGKAHFPREGVFVSNGTHWFVTQRNFYEPQIITTDNTFVSGSCDVVIGIVNNTVYDPLQPELDSFKEELDKYFKNHTSPDVDLGDISGINASVVNIQKEIDRLNEVAKNLNESLIDLQELGKYEQYIKGGGSGGGQIYEGKLTAEGLRFGIVASRFNHALVDRLVEGAIDAIVRHGGREEDITLVRVPGSWEIPVAAGELARKEDIDAVIAIGVLIRGATPHFDYIASEVSKGLADLSLELRKPITFGVITADTLEQAIERAGTKHGNKGWEAALSAIEMANLFKSLR

SEQ ID NO: 4564 - protein, 1371 aa, Artificial Sequence
  SARS-CoV-2/Wuhan/HBCDC-HB-01/2019__EPI_ISL_402132 spike protein (1-1211)(T874C_S1055C) LumSynth construct
MFVFLVLLPLVSSQCVNLTTRTQLPPAYTNSITRGVYYPDKVFRSSVLHSTQDLFLPFFSNVTWFHAIHVSGTNGTKRFDNPVLPFNDGVYFASTEKSNIIRGWIFGTTLDSKTQSLLIVNNATNVVIKVCEFQFCNDPFLGVYYHKNNKSWMESEFRVYSSANNCTFEYVSQPFLMDLEGKQGNFKNLREFVFKNIDGYFKIYSKHTPINLVRDLPQGFSALEPLVDLPIGINITRFQTLLALHRSYLTPGDSSSGWTAGAAAYYVGYLQPRTFLLKYNENGTITDAVDCALDPLSETKCTLKSFTVEKGIYQTSNFRVQPTESIVRFPNITNLCPFGEVFNATRFASVYAWNRKRISNCVADYSVLYNSASFSTFKCYGVSPTKLNDLCFTNVYADSFVIRGDEVRQIAPGQTGKIADYNYKLPDDFTGCVIAWNSNNLDSKVGGNYNYLYRLFRKSNLKPFERDISTEIYQAGSTPCNGVEGFNCYFPLQSYGFQPTNGVGYQPYRVVVLSFELLHAPATVCGPKKSTNLVKNKCVNFNFNGLTGTGVLTESNKKFLPFQQFGRDIADTTDAVRDPQTLEILDITPCSFGGVSVITPGTNTSNQVAVLYQDVNCTEVPVAIHADQLTPTWRVYSTGSNVFQTRAGCLIGAEHVNNSYECDIPIGAGICASYQTQTNSPRRARSVASQSIIAYTMSLGAENSVAYSNNSIAIPTNFTISVTTEILPVSMTKTSVDCTMYICGDSTECSNLLLQYGSFCTQLNRALTGIAVEQDKNTQEVFAQVKQIYKTPPIKDFGGFNFSQILPDPSKPSKRSFIEDLLFNKVTLADAGFIKQYGDCLGDIAARDLICAQKFNGLTVLPPLLTDEMIAQYCSALLAGTITSGWTFGAGAALQIPFAMQMAYRFNGIGVTQNVLYENQKLIANQFNSAIGKIQDSLSSTASALGKLQDVVNQNAQALNTLVKQLSSNFGAISSVLNDILSRLDKVEAEVQIDRLITGRLQSLQTYVTQQLIRAAEIRASANLAATKMSECVLGQSKRVDFCGKGYHLMSFPQCAPHGVVFLHVTYVPAQEKNFTTAPAICHDGKAHFPREGVFVSNGTHWFVTQRNFYEPQIITTDNTFVSGNCDVVIGIVNNTVYDPLQPELDSFKEELDKYFKNHTSPDVDLGDISGINASVVNIQKEIDRLNEVAKNLNESLIDLQELGKYEQYIKGGGSGGGQIYEGKLTAEGLRFGIVASRFNHALVDRLVEGAIDAIVRHGGREEDITLVRVPGSWEIPVAAGELARKEDIDAVIAIGVLIRGATPHFDYIASEVSKGLADLSLELRKPITFGVITADTLEQAIERAGTKHGNKGWEAALSAIEMANLFKSLR

SEQ ID NO: 4565 - protein, 1371 aa, Artificial Sequence
  SARS-CoV-2/Guangdong/20SF028/2020__EPI_ISL_403936 spike protein (1-1211)(T874C_S1055C) LumSynth construct
MFVFLVLLPLVSSQCVNLTTRTQLPPAYTNSFTRGVYYPDKVFRSSVLYSTQDLFLPFFSNVTWFHAIHVSGTNGTKRFDNPVLPFNDGVYFASTEKSNIIRGWIFGTTLDSKTQSLLIVNNATNVVIKVCEFQFCNDPFLGVYYHKNNKSWMESEFRVYSSANNCTFEYVSQPFLMDLEGKQGNFKNLREFVFKNIDGYFKIYSKHTPINLVRDLPQGFSALEPLVDLPIGINITRFQTLLALHRSYLTPGDSSSGWTAGAAAYYVGYLQPRTFLLKYNENGTITDAVDCALDPLSETKCTLKSFTVEKGIYQTSNFRVQPTESIVRFPNITNLCPFGEVFNATRFASVYAWNRKRISNCVADYSVLYNSASFSTFKCYGVSPTKLNDLCFTNVYADSFVIRGDEVRQIAPGQTGKIADYNYKLPDDFTGCVIAWNSNNLDSKVGGNYNYLYRLFRKSNLKPFERDISTEIYQAGSTPCNGVEGFNCYFPLQSYGFQPTNGVGYQPYRVVVLSFELLHAPATVCGPKKSTNLVKNKCVNFNFNGLTGTGVLTESNKKFLPFQQFGRDIADTTDAVRDPQTLEILDITPCSFGGVSVITPGTNTSNQVAVLYQDVNCTEVPVAIHADQLTPTWRVYSTGSNVFQTRAGCLIGAEHVNNSYECDIPIGAGICASYQTQTNSPRRARSVASQSIIAYTMSLGAENSVAYSNNSIAIPTNFTISVTTEILPVSMTKTSVDCTMYICGDSTECSNLLLQYGSFCTQLNRALTGIAVEQDKNTQEVFAQVKQIYKTPPIKDFGGFNFSQILPDPSKPSKRSFIEDLLFNKVTLADAGFIKQYGDCLGDIAARDLICAQKFNGLTVLPPLLTDEMIAQYCSALLAGTITSGWTFGAGAALQIPFAMQMAYRFNGIGVTQNVLYENQKLIANQFNSAIGKIQDSLSSTASALGKLQDVVNQNAQALNTLVKQLSSNFGAISSVLNDILSRLDKVEAEVQIDRLITGRLQSLQTYVTQQLIRAAEIRASANLAATKMSECVLGQSKRVDFCGKGYHLMSFPQCAPHGVVFLHVTYVPAQEKNFTTAPAICHDGKAHFPREGVFVSNGTHWFVTQRNFYEPQIITTDNTFVSGNCDVVIGIVNNTVYDPLQPELDSFKEELDKYFKNHTSPDVDLGDISGINASVVNIQKEIDRLNEVAKNLNESLIDLQELGKYEQYIKGGGSGGGQIYEGKLTAEGLRFGIVASRFNHALVDRLVEGAIDAIVRHGGREEDITLVRVPGSWEIPVAAGELARKEDIDAVIAIGVLIRGATPHFDYIASEVSKGLADLSLELRKPITFGVITADTLEQAIERAGTKHGNKGWEAALSAIEMANLFKSLR

SEQ ID NO: 4566 - protein, 1371 aa, Artificial Sequence
  SARS-CoV-2/Shenzhen/SZTH-001/2020__EPI_ISL_406592 spike protein (1-1211)(T874C_S1055C) LumSynth construct
MFVFLVLLPLVSSQCVNLTTRTQLPPAYTNSFTRGVYYPDKVFRSSVLHSTQDLFLPFFSNVTWFHAIHVSGTNGTKRFDNPVLPFNDGVYFASTEKSNIIRGWIFGTTLDSKTQSLLIVNNATNVVIKVCEFQFCNDPFLGVYYHKNNKSWMESEFRVYSSANNCTFEYVSQPFLMDLEGKQGNFKNLREFVFKNIDGYFKIYSKHTPINLVRDLPQGFSALEPLVDLPIGINITRFQTLLALHRSYLTPGDSSSGWTAGAAAYYVGYLQPRTFLLKYNENGTITDAVDCALDPLSETKCTLKSFTVEKGIYQTSNFRVQPTESIVRFPNITNLCPFGEVFNATRFASVYAWNRKRISNCVADYSVLYNSASFSTFKCYGVSPTKLNDLCFTNVYADSFVIRGDEVRQIAPGQTGKIADYNYKLPDDFTGCVIAWNSNNLDSKVGGNYNYLYRLFRKSNLKPFERDISTEIYQAGSTPCNGVEGFNCYFPLQSYGFQPTNGVGYQPYRVVVLSFELLHAPATVCGPKKSTNLVKNKCVNFNFNGLTGTGVLTESNKKFLPFQQFGRDIADTTDAVRDPQTLEILDITPCSFGGVSVITPGTNTSNQVAVLYQDVNCTEVPVAIHADQLTPTWRVYSTGSNVFQTRAGCLIGAEHVNNSYECDIPIGAGICASYQTQTNSPRRARSVASQSIIAYTMSLGAENSVAYSNNSIAIPTNFTISVTTEILPVSMTKTSVDCTMYICGDSTECSNLLLQYGSFCTQLNRALTGIAVEQDKNTQEVFAQVKQIYKTPPIKDFGGFNFSQILPDPSKPSKRSFIEDLLFNKVTLADAGFIKQYGDCLGDIAARDLICAQKFNGLTVLPPLLTDEMIAQYCSALLAGTITSGWTFGAGAALQIPFAMQMAYRFNGIGVTQNVLYENQKLIANQFNSAIGKIQDSLSSTASALGKLQDVVNQNAQALNTLVKQLSSNFGAISSVLNDILSRLDKVEAEVQIDRLITGRLQSLQTYVTQQLIRAAEIRASANLAATKMSECVLGQSKRVDFCGKGYHLMSFPQCAPHGVVFLHVTYVPAQEKNFTTAPAICHDGKAHFPREGVFVSNGTHWFVTQRNFYEPQIITTDNTFVSGNCDVLIGIVNNTVYDPLQPELDSFKEELDKYFKNHTSPDVDLGDISGINASVVNIQKEIDRLNEVAKNLNESLIDLQELGKYEQYIKGGGSGGGQIYEGKLTAEGLRFGIVASRFNHALVDRLVEGAIDAIVRHGGREEDITLVRVPGSWEIPVAAGELARKEDIDAVIAIGVLIRGATPHFDYIASEVSKGLADLSLELRKPITFGVITADTLEQAIERAGTKHGNKGWEAALSAIEMANLFKSLR

SEQ ID NO: 4567 - protein, 1371 aa, Artificial Sequence
  SARS-CoV-2/Shenzhen/SZTH-004/2020__EPI_ISL_406595 spike protein (1-1211)(T874C_S1055C) LumSynth construct
MFVFLVLLPLVSSQCVNLTTRTQLPPAYTNSFTRGVYYPDKVFRSSVLHSTQDLFLPFFSNVTWFHAIHVSGTNGTKRFDNPVLPFNDGVYFASTEKSNIIRGWIFGTTLDSKTQSLLIVNNATNVVIKVCEFQFCNDPFLGVYYHKNNKSWMESEFRVYSSANNCTFEYVSQPFLMDLEGKQGNFKNLREFVFKNIDGYFKIYSKHTPINLVRDLPQGFSALEPLVDLPIGINITRFQTLLALHRSYLTPGDSSSGWTAGAAAYYVGYLQPRTFLLKYNENGTITDAVDCALDPLSETKCTLKSFTVEKGIYQTSNFRVQPTESIVRFPNITNLCPFGEVFNATRFASVYAWDRKRISNCVAYYSVLYNSASFSTFKCYGVSPTKLNDLCFTNVYADSFVIRGDEVRQIAPGQTGKIADYNYKLPDDFTGCVIAWNSNNLDSKVGGNYNYLYRLFRKSNLKPFERDISTEIYQAGSTPCNGVEGFNCYFPLQSYGFQPTNGVGYQPYRVVVLSFELLHAPATVCGPKKSTNLVKNKCVNFNFNGLTGTGVLTESNKKFLPFQQFGRDIADTTDAVRDPQTLEILDITPCSFGGVSVITPGTNTSNQVAVLYQDVNCTEVPVAIHADQLTPTWRVYSTGSNVFQTRAGCLIGAEHVNNSYECDIPIGAGICASYQTQTNSPRRARSVASQSIIAYTMSLGAENSVAYSNNSIAIPTNFTISVTTEILPVSMTKTSVDCTMYICGDSTECSNLLLQYGSFCTQLNRALTGIAVEQDKNTQEVFAQVKQIYKTPPIKDFGGFNFSQILPDPSKPSKRSFIEDLLFNKVTLADAGFIKQYGDCLGDIAARDLICAQKFNGLTVLPPLLTDEMIAQYCSALLAGTITSGWTFGAGAALQIPFAMQMAYRFNGIGVTQNVLYENQKLIANQFNSAIGKIQDSLSSTASALGKLQDVVNQNAQALNTLVKQLSSNFGAISSVLNDILSRLDKVEAEVQIDRLITGRLQSLQTYVTQQLIRAAEIRASANLAATKMSECVLGQSKRVDFCGKGYHLMSFPQCAPHGVVFLHVTYVPAQEKNFTTAPAICHDGKAHFPREGVFVSNGTHWFVTQRNFYEPQIITTDNTFVSGNCDVVIGIVNNTVYDPLQPELDSFKEELDKYFKNHTSPDVDLGDISGINASVVNIQKEIDRLNEVAKNLNESLIDLQELGKYEQYIKGGGSGGGQIYEGKLTAEGLRFGIVASRFNHALVDRLVEGAIDAIVRHGGREEDITLVRVPGSWEIPVAAGELARKEDIDAVIAIGVLIRGATPHFDYIASEVSKGLADLSLELRKPITFGVITADTLEQAIERAGTKHGNKGWEAALSAIEMANLFKSLR

SEQ ID NO: 4568 - protein, 1371 aa, Artificial Sequence
  SARS-CoV-2/France/IDF0372/2020__EPI_ISL_406596 spike protein (1-1211)(T874C_S1055C) LumSynth construct
MFVFLVLLPLVSSQCVNLTTRTQLPPAYTNSFTRGVYYPDKVFRSSVLHSTQDLFLPFFSNVTWFHAIHVSGTNGTKRFDNPVLPFNDGVYFASTEKSNIIRGWIFGTTLDSKTQSLLIVNNATNVVIKVCEFQFCNDPFLGVYYHKNNKSWMESEFRVYSSANNCTFEYVSQPFLMDLEGKQGNFKNLREFVFKNIDGYFKIYSKHTPINLVRDLPQGFSALEPLVDLPIGINITRFQTLLALHRSYLTPGDSSSGWTAGAAAYYVGYLQPRTFLLKYNENGTITDAVDCALDPLSETKCTLKSFTVEKGIYQTSNFRVQPTESIVRFPNITNLCPFGEVFNATRFASVYAWNRKRISNCVADYSFLYNSASFSTFKCYGVSPTKLNDLCFTNVYADSFVIRGDEVRQIAPGQTGKIADYNYKLPDDFTGCVIAWNSNNLDSKVGGNYNYLYRLFRKSNLKPFERDISTEIYQAGSTPCNGVEGFNCYFPLQSYGFQPTNGVGYQPYRVVVLSFELLHAPATVCGPKKSTNLVKNKCVNFNFNGLTGTGVLTESNKKFLPFQQFGRDIADTTDAVRDPQTLEILDITPCSFGGVSVITPGTNTSNQVAVLYQDVNCTEVPVAIHADQLTPTWRVYSTGSNVFQTRAGCLIGAEHVNNSYECDIPIGAGICASYQTQTNSPRRARSVASQSIIAYTMSLGAENSVAYSNNSIAIPTNFTISVTTEILPVSMTKTSVDCTMYICGDSTECSNLLLQYGSFCTQLNRALTGIAVEQDKNTQEVFAQVKQIYKTPPIKDFGGFNFSQILPDPSKPSKRSFIEDLLFNKVTLADAGFIKQYGDCLGDIAARDLICAQKFNGLTVLPPLLTDEMIAQYCSALLAGTITSGWTFGAGAALQIPFAMQMAYRFNGIGVTQNVLYENQKLIANQFNSAIGKIQDSLSSTASALGKLQDVVNQNAQALNTLVKQLSSNFGAISSVLNDILSRLDKVEAEVQIDRLITGRLQSLQTYVTQQLIRAAEIRASANLAATKMSECVLGQSKRVDFCGKGYHLMSFPQCAPHGVVFLHVTYVPAQEKNFTTAPAICHDGKAHFPREGVFVSNGTHWFVTQRNFYEPQIITTDNTFVSGNCDVVIGIVNNTVYDPLQPELDSFKEELDKYFKNHTSPDVDLGDISGINASVVNIQKEIDRLNEVAKNLNESLIDLQELGKYEQYIKGGGSGGGQIYEGKLTAEGLRFGIVASRFNHALVDRLVEGAIDAIVRHGGREEDITLVRVPGSWEIPVAAGELARKEDIDAVIAIGVLIRGATPHFDYIASEVSKGLADLSLELRKPITFGVITADTLEQAIERAGTKHGNKGWEAALSAIEMANLFKSLR

SEQ ID NO: 4569 - protein, 1371 aa, Artificial Sequence
  SARS-CoV-2/Australia/VIC01/2020__EPI_ISL_406844 spike protein (1-1211)(T874C_S1055C) LumSynth construct
MFVFLVLLPLVSSQCVNLTTRTQLPPAYTNSFTRGVYYPDKVFRSSVLHSTQDLFLPFFSNVTWFHAIHVSGTNGTKRFDNPVLPFNDGVYFASTEKSNIIRGWIFGTTLDSKTQSLLIVNNATNVVIKVCEFQFCNDPFLGVYYHKNNKSWMESEFRVYSSANNCTFEYVSQPFLMDLEGKQGNFKNLREFVFKNIDGYFKIYSKHTPINLVRDLPQGFSALEPLVDLPIGINITRFQTLLALHRRYLTPGDSSSGWTAGAAAYYVGYLQPRTFLLKYNENGTITDAVDCALDPLSETKCTLKSFTVEKGIYQTSNFRVQPTESIVRFPNITNLCPFGEVFNATRFASVYAWNRKRISNCVADYSVLYNSASFSTFKCYGVSPTKLNDLCFTNVYADSFVIRGDEVRQIAPGQTGKIADYNYKLPDDFTGCVIAWNSNNLDSKVGGNYNYLYRLFRKSNLKPFERDISTEIYQAGSTPCNGVEGFNCYFPLQSYGFQPTNGVGYQPYRVVVLSFELLHAPATVCGPKKSTNLVKNKCVNFNFNGLTGTGVLTESNKKFLPFQQFGRDIADTTDAVRDPQTLEILDITPCSFGGVSVITPGTNTSNQVAVLYQDVNCTEVPVAIHADQLTPTWRVYSTGSNVFQTRAGCLIGAEHVNNSYECDIPIGAGICASYQTQTNSPRRARSVASQSIIAYTMSLGAENSVAYSNNSIAIPTNFTISVTTEILPVSMTKTSVDCTMYICGDSTECSNLLLQYGSFCTQLNRALTGIAVEQDKNTQEVFAQVKQIYKTPPIKDFGGFNFSQILPDPSKPSKRSFIEDLLFNKVTLADAGFIKQYGDCLGDIAARDLICAQKFNGLTVLPPLLTDEMIAQYCSALLAGTITSGWTFGAGAALQIPFAMQMAYRFNGIGVTQNVLYENQKLIANQFNSAIGKIQDSLSSTASALGKLQDVVNQNAQALNTLVKQLSSNFGAISSVLNDILSRLDKVEAEVQIDRLITGRLQSLQTYVTQQLIRAAEIRASANLAATKMSECVLGQSKRVDFCGKGYHLMSFPQCAPHGVVFLHVTYVPAQEKNFTTAPAICHDGKAHFPREGVFVSNGTHWFVTQRNFYEPQIITTDNTFVSGNCDVVIGIVNNTVYDPLQPELDSFKEELDKYFKNHTSPDVDLGDISGINASVVNIQKEIDRLNEVAKNLNESLIDLQELGKYEQYIKGGGSGGGQIYEGKLTAEGLRFGIVASRFNHALVDRLVEGAIDAIVRHGGREEDITLVRVPGSWEIPVAAGELARKEDIDAVIAIGVLIRGATPHFDYIASEVSKGLADLSLELRKPITFGVITADTLEQAIERAGTKHGNKGWEAALSAIEMANLFKSLR

SEQ ID NO: 4570 - protein, 1371 aa, Artificial Sequence
  SARS-CoV-2/Germany/BavPat1/2020__EPI_ISL_406862 spike protein (1-1211)(T874C_S1055C) LumSynth construct
MFVFLVLLPLVSSQCVNLTTRTQLPPAYTNSFTRGVYYPDKVFRSSVLHSTQDLFLPFFSNVTWFHAIHVSGTNGTKRFDNPVLPFNDGVYFASTEKSNIIRGWIFGTTLDSKTQSLLIVNNATNVVIKVCEFQFCNDPFLGVYYHKNNKSWMESEFRVYSSANNCTFEYVSQPFLMDLEGKQGNFKNLREFVFKNIDGYFKIYSKHTPINLVRDLPQGFSALEPLVDLPIGINITRFQTLLALHRSYLTPGDSSSGWTAGAAAYYVGYLQPRTFLLKYNENGTITDAVDCALDPLSETKCTLKSFTVEKGIYQTSNFRVQPTESIVRFPNITNLCPFGEVFNATRFASVYAWNRKRISNCVADYSVLYNSASFSTFKCYGVSPTKLNDLCFTNVYADSFVIRGDEVRQIAPGQTGKIADYNYKLPDDFTGCVIAWNSNNLDSKVGGNYNYLYRLFRKSNLKPFERDISTEIYQAGSTPCNGVEGFNCYFPLQSYGFQPTNGVGYQPYRVVVLSFELLHAPATVCGPKKSTNLVKNKCVNFNFNGLTGTGVLTESNKKFLPFQQFGRDIADTTDAVRDPQTLEILDITPCSFGGVSVITPGTNTSNQVAVLYQGVNCTEVPVAIHADQLTPTWRVYSTGSNVFQTRAGCLIGAEHVNNSYECDIPIGAGICASYQTQTNSPRRARSVASQSIIAYTMSLGAENSVAYSNNSIAIPTNFTISVTTEILPVSMTKTSVDCTMYICGDSTECSNLLLQYGSFCTQLNRALTGIAVEQDKNTQEVFAQVKQIYKTPPIKDFGGFNFSQILPDPSKPSKRSFIEDLLFNKVTLADAGFIKQYGDCLGDIAARDLICAQKFNGLTVLPPLLTDEMIAQYCSALLAGTITSGWTFGAGAALQIPFAMQMAYRFNGIGVTQNVLYENQKLIANQFNSAIGKIQDSLSSTASALGKLQDVVNQNAQALNTLVKQLSSNFGAISSVLNDILSRLDKVEAEVQIDRLITGRLQSLQTYVTQQLIRAAEIRASANLAATKMSECVLGQSKRVDFCGKGYHLMSFPQCAPHGVVFLHVTYVPAQEKNFTTAPAICHDGKAHFPREGVFVSNGTHWFVTQRNFYEPQIITTDNTFVSGNCDVVIGIVNNTVYDPLQPELDSFKEELDKYFKNHTSPDVDLGDISGINASVVNIQKEIDRLNEVAKNLNESLIDLQELGKYEQYIKGGGSGGGQIYEGKLTAEGLRFGIVASRFNHALVDRLVEGAIDAIVRHGGREEDITLVRVPGSWEIPVAAGELARKEDIDAVIAIGVLIRGATPHFDYIASEVSKGLADLSLELRKPITFGVITADTLEQAIERAGTKHGNKGWEAALSAIEMANLFKSLR

SEQ ID NO: 4571 - protein, 1371 aa, Artificial Sequence
  SARS-CoV-2/Wuhan/HBCDC-HB-02/2020__EPI_ISL_412978 spike protein (1-1211)(T874C_S1055C) LumSynth construct
MFVFLVLLPLVSSQCVNLTTRTQLPPAYTNSFTRGVYYPDKVFRSSVLHSTQDLFLPFFSNVTWFHAIHVSGTNGTKRFDNPVLPFNDGVYFASTEKSNIIRGWIFGTTLDSKTQSLLIVNNATNVVIKVCEFQFCNDPFLGVYYHKNNKSWMESEFRVYSSANNCTFEYVSQPFLMDLEGKQGNFKNLREFVFKNIDGYFKIYSKHTPINLVRDLPQGFSALEPLVDLPIGINITRFQTLLALHRSYLTPGDSSSGWTAGAAAYYVGYLQPRTFLLKYNENGTITDAVDCALDPLSETKCTLKSFTVEKGIYQTSNFRVQPTESIVRFPNITNLCPFGEVFNATRFASVYAWNRKRISNCVADYSVLYNSASFSTFKCYGVSPTKLNDLCFTNVYADSFVIRGDEVRQIAPGQTGKIADYNYKLPDDFTGCVIAWNSNNLDSKVGGNYNYLYRLFRKSNLKPFERDISTEIYQAGSTPCNGVEGFNCYFPLQSYGFQPTNGVGYQPYRVVVLSFELLHAPATVCGPKKSTNLVKNKCVNFNFNGLTGTGVLTESNKKFLPFQQFGRDIADTTDAVRDPQTLEILDITPCSFGGVSVITPGTNTSNQVAVLYQDVNCTEVPVAIHADQLTPTWRVYSTGSNVFQTRAGCLIGAEHVNNSYECDIPIGAGICASYQTQTNSPRRARSVASQSIIAYTMSLGAENSVAYSNNSIAIPTNFTISVTTEILPVSMTKTSVDCTMYICGDSTECSNFLLQYGSFCTQLNRALTGIAVEQDKNTQEVFAQVKQIYKTPPIKDFGGFNFSQILPDPSKPSKRSFIEDLLFNKVTLADAGFIKQYGDCLGDIAARDLICAQKFNGLTVLPPLLTDEMIAQYCSALLAGTITSGWTFGAGAALQIPFAMQMAYRFNGIGVTQNVLYENQKLIANQFNSAIGKIQDSLSSTASALGKLQDVVNQNAQALNTLVKQLSSNFGAISSVLNDILSRLDKVEAEVQIDRLITGRLQSLQTYVTQQLIRAAEIRASANLAATKMSECVLGQSKRVDFCGKGYHLMSFPQCAPHGVVFLHVTYVPAQEKNFTTAPAICHDGKAHFPREGVFVSNGTHWFVTQRNFYEPQIITTDNTFVSGNCDVVIGIVNNTVYDPLQPELDSFKEELDKYFKNHTSPDVDLGDISGINASVVNIQKEIDRLNEVAKNLNESLIDLQELGKYEQYIKGGGSGGGQIYEGKLTAEGLRFGIVASRFNHALVDRLVEGAIDAIVRHGGREEDITLVRVPGSWEIPVAAGELARKEDIDAVIAIGVLIRGATPHFDYIASEVSKGLADLSLELRKPITFGVITADTLEQAIERAGTKHGNKGWEAALSAIEMANLFKSLR

SEQ ID NO: 4572 - protein, 1371 aa, Artificial Sequence
  SARS-CoV-2/Australia/QLD02/2020__EPI_ISL_407896 spike protein (1-1211)(T874C_S1055C) LumSynth construct
MFVFLVLLPLVSSQCVNLTTRTQLPPAYTNSFTRGVYYPDKVFRSSVLHSTQDLFLPFFSNVTWFHAIHVSGTNGTKRFDNPVLPFNDGVYFASTEKSNIIRGWIFGTTLDSKTQSLLIVNNATNVVIKVCEFQFCNDPFLGVYYHKNNKSWMESEFRVYSSANNCTFEYVSQPFLMDLEGKQGNFKNLREFVFKNIDGYFKIYSKHTPINLVRDLPQGFSALEPLVDLPIGINITRFQTLLALHRSYLTPGDSSSGWTAGAAAYYVGYLQPRTFLLKYNENGTITDAVDCALDPLSETKCTLKSFTVEKGIYQTSNFRVQPTESIVRFPNITNLCPFGEVFNATRFASVYAWNRKRISNCVADYSVLYNSASFSTFKCYGVSPTKLNDLCFTNVYADSFVIRGDEVRQIAPGQTGKIADYNYKLPDDFTGCVIAWNSNNLDSKVGGNYNYLYRLFRKSNLKPFERDISTEIYQAGSTPCNGVEGFNCYFPLQSYGFQPTNGVGYQPYRVVVLSFELLHAPATVCGPKKSTNLVKNKCVNFNFNGLTGTGVLTESNKKFLPFQQFGRDIADTTDAVRDPQTLEILDITPCSFGGVSVITPGTNTSNQVAVLYQDVNCTEVPVAIHADQLTPTWRVYSTGSNVFQTRAGCLIGAEHVNNSYECDIPIGAGICASYQTQTNSPRRARSVASQSIIAYTMSLGAENSVAYSNNSIAIPTNFTISVTTEILPVSMTKTSVDCTMYICGDSTECSNLLLQYGSFCTQLNRALTGIAVEQDKNTQEVFAQVKQIYKTPPIKDFGGFNFSQILPDPSKPSKRSFIEDLLFNKVTLADAGFIKQYGDCLGDIAARDLICAQKFNGLTVLPPLLTDEMIAQYCSALLAGTITSGWTFGAGAALQIPFAMQMAYRFNGIGVTQNVLYENQKLIANQFNSAIGKIQDSLSSTASALGKLQDVVNQNAQALNTLVKQLSSNFGAISSVLNDILSRLDKVEAEVQIDRLITGRLQSLQTYVTQQLIRAAEIRASANLAATKMSECVLGQSKRVDFCGKGYHLMSFPQCAPHGVVFLHVTYVPAQEKNFTTAPAICHDGKAHFPREGVFVSNGTHWFVTQRNFYEPQIITTDNTFVSGNCDVVIGIVNNTVYDPLQLELDSFKEELDKYFKNHTSPDVDLGDISGINASVVNIQKEIDRLNEVAKNLNESLIDLQELGKYEQYIKGGGSGGGQIYEGKLTAEGLRFGIVASRFNHALVDRLVEGAIDAIVRHGGREEDITLVRVPGSWEIPVAAGELARKEDIDAVIAIGVLIRGATPHFDYIASEVSKGLADLSLELRKPITFGVITADTLEQAIERAGTKHGNKGWEAALSAIEMANLFKSLR

SEQ ID NO: 4573 - protein, 1371 aa, Artificial Sequence
  SARS-CoV-2/India/1-31/2020__EPI_ISL_413523 spike protein (1-1211)(T874C_S1055C) LumSynth construct
MFVFLVLLPLVSSQCVNLTTRTQLPPAYTNSFTRGVYYPDKVFRSSVLHSTQDLFLPFFSNVTWFHAIHVSGTNGTKRFDNPVLPFNDGVYFASTEKSNIIRGWIFGTTLDSKTQSLLIVNNATNVVIKVCEFQFCNDPFLGVYYHKNNKSWMESEFRVYSSANNCTFEYVSQPFLMDLEGKQGNFKNLREFVFKNIDGYFKIYSKHTPINLVRDLPQGFSALEPLVDLPIGINITRFQTLLALHRSYLTPGDSSSGWTAGAAAYYVGYLQPRTFLLKYNENGTITDAVDCALDPLSETKCTLKSFTVEKGIYQTSNFRVQPTESIVRFPNITNLCPFGEVFNATRFASVYAWNRKRISNCVADYSVLYNSASFSTFKCYGVSPTKLNDLCFTNVYADSFVIRGDEVRQIAPGQTGKIADYNYKLPDDFTGCVIAWNSNNLDSKVGGNYNYLYRLFRKSNLKPFERDISTEIYQAGSTPCNGVEGFNCYFPLQSYGFQPTNGVGYQPYRVVVLSFELLHAPATVCGPKKSTNLVKNKCVNFNFNGLTGTGVLTESNKKFLPFQQFGRDIADTTDAVRDPQTLEILDITPCSFGGVSVITPGTNTSNQVAVLYQDVNCTEVPVAIHADQLTPTWRVYSTGSNVFQTRAGCLIGAEHVNNSYECDIPIGAGICASYQTQTNSPRRARSVASQSIIAYTMSLGAENSVAYSNNSIAIPTNFTISVTTEILPVSMTKTSVDCTMYICGDSTECSNLLLQYGSFCTQLNRALTGIAVEQDKNTQEVFAQVKQIYKTPPIKDFGGFNFSQILPDPSKPSKRSFIEDLLFNKVTLADAGFIKQYGDCLGDIAARDLICAQKFNGLTVLPPLLTDEMIAQYCSALLAGTITSGWTFGAGAALQIPFAMQMAYRFNGIGVTQNVLYENQKLIANQFNSVIGKIQDSLSSTASALGKLQDVVNQNAQALNTLVKQLSSNFGAISSVLNDILSRLDKVEAEVQIDRLITGRLQSLQTYVTQQLIRAAEIRASANLAATKMSECVLGQSKRVDFCGKGYHLMSFPQCAPHGVVFLHVTYVPAQEKNFTTAPAICHDGKAHFPREGVFVSNGTHWFVTQRNFYEPQIITTDNTFVSGNCDVVIGIVNNTVYDPLQPELDSFKEELDKYFKNHTSPDVDLGDISGINASVVNIQKEIDRLNEVAKNLNESLIDLQELGKYEQYIKGGGSGGGQIYEGKLTAEGLRFGIVASRFNHALVDRLVEGAIDAIVRHGGREEDITLVRVPGSWEIPVAAGELARKEDIDAVIAIGVLIRGATPHFDYIASEVSKGLADLSLELRKPITFGVITADTLEQAIERAGTKHGNKGWEAALSAIEMANLFKSLR

SEQ ID NO: 4574 - protein, 1371 aa, Artificial Sequence
  SARS-CoV-2/Guangdong/GD2020087-P0008/2020__EPI_ISL_413863 spike protein (1-1211)(T874C_S1055C) LumSynth construct
MFVFLVLLPLVSSQCVNLTTRTQLPPAYTNSFTRGVYYPDKVFRSSVLHSTQDLFLPFFSNVTWFHAIHVSGTNGTKRFDNPVLPFNDGVYFASTEKSNIIRGWIFGTTLDSKTQSLLIVNNATNVVIKVCEFQFCNDPFLGVYYHKNNKSWMESEFRVYSSANNCTFEYVSQPFLMDLEGKQGNFKNLREFVFKNIDGYFKIYSKHTPINLVRDLPQGFSALEPLVDLPIGINITRFQTLLALHRSYLTPGDSSSGWTAGAAAYYVGYLQPRTFLLKYNENGTITDAVDCALDPLSETKCTLKSFTVEKGIYQTSNFRVQPTESIVRFPNITNLCPFGEVFNATRFASVYAWNRKRISNCVADYSVLYNSASFSTFKCYGVSPTKLNDLCFTNVYADSFVIRGDEVREIAPGQTGKIADYNYKLPDDFTGCVIAWNSNNLDSKVGGNYNYLYRLFRKSNLKPFERDISTEIYQAGSTPCNGVEGFNCYFPLQSYGFQPTNGVGYQPYRVVVLSFELLHAPATVCGPKKSTNLVKNKCVNFNFNGLTGTGVLTESNKKFLPFQQFGRDIADTTDAVRDPQTLEILDITPCSFGGVSVITPGTNTSNQVAVLYQDVNCTEVPVAIHADQLTPTWRVYSTGSNVFQTRAGCLIGAEHVNNSYECDIPIGAGICASYQTQTNSPRRARSVASQSIIAYTMSLGAENSVAYSNNSIAIPTNFTISVTTEILPVSMTKTSVDCTMYICGDSTECSNLLLQYGSFCTQLNRALTGIAVEQDKNTQEVFAQVKQIYKTPPIKDFGGFNFSQILPDPSKPSKRSFIEDLLFNKVTLADAGFIKQYGDCLGDIAARDLICAQKFNGLTVLPPLLTDEMIAQYCSALLAGTITSGWTFGAGAALQIPFAMQMAYRFNGIGVTQNVLYENQKLIANQFNSAIGKIQDSLSSTASALGKLQDVVNQNAQALNTLVKQLSSNFGAISSVLNDILSRLDKVEAEVQIDRLITGRLQSLQTYVTQQLIRAAEIRASANLAATKMSECVLGQSKRVDFCGKGYHLMSFPQCAPHGVVFLHVTYVPAQEKNFTTAPAICHDGKAHFPREGVFVSNGTHWFVTQRNFYEPQIITTDNTFVSGNCDVVIGIVNNTVYDPLQPELDSFKEELDKYFKNHTSPDVDLGDISGINASVVNIQKEIDRLNEVAKNLNESLIDLQELGKYEQYIKGGGSGGGQIYEGKLTAEGLRFGIVASRFNHALVDRLVEGAIDAIVRHGGREEDITLVRVPGSWEIPVAAGELARKEDIDAVIAIGVLIRGATPHFDYIASEVSKGLADLSLELRKPITFGVITADTLEQAIERAGTKHGNKGWEAALSAIEMANLFKSLR

SEQ ID NO: 4575 - protein, 1371 aa, Artificial Sequence
  SARS-CoV-2/Sweden/01/2020__EPI_ISL_411951 spike protein (1-1211)(T874C_S1055C) LumSynth construct
MFVFLVLLPLVSSQCVNLTTRTQLPPAYTNSFTRGVYYPDKVFRSSVLHSTQDLFLPFFSNVTWFHAIHVSGTNGTKRFDNPVLPFNDGVYFASTEKSNIIRGWIFGTTLDSKTQSLLIVNNATNVVIKVCEFQFCNDPFLGVYYHKNNKSWMESEFRVYSSANNCTFEYVSQPFLMDLEGKQGNFKNLREFVFKNIDGYFKIYSKHTPINLVRDLPQGFSALEPLVDLPIGINITRFQTLLALHRSYLTPGDSSSGWTAGAAAYYVGYLQPRTFLLKYNENGTITDAVDCALDPLSETKCTLKSFTVEKGIYQTSNFRVQPTESIVRFPNITNLCPFGEVFNATRFASVYAWNRKRISNCVADYSVLYNSASFSTFKCYGVSPTKLNDLCFTNVYADSFVIRGDEVRQIAPGQTGKIADYNYKLPDDFTGCVIAWNSNNLDSKVGGNYNYLYRLFRKSNLKPFERDISTEIYQAGSTPCNGVEGFNCYFPLQSYGFQPTNGVGYQPYRVVVLSFELLHAPATVCGPKKSTNLVKNKCVNFNFNGLTGTGVLTESNKKFLPFQQFGRDIADTTDAVRDPQTLEILDITPCSFGGVSVITPGTNTSNQVAVLYQDVNCTEVPVAIHADQLTPTWRVYSTGSNVFQTRAGCLIGAEHVNNSYECDIPIGAGICASYQTQTNSPRRARSVASQSIIAYTMSLGAENSVAYSNNSIAIPTNFTISVTTEILPVSMTKTSVDCTMYICGDSTECSNLLLQYGSFCTQLNRALTGIAVEQDKNTQEVFAQVKQIYKTPPIKDCGGFNFSQILPDPSKPSKRSFIEDLLFNKVTLADAGFIKQYGDCLGDIAARDLICAQKFNGLTVLPPLLTDEMIAQYCSALLAGTITSGWTFGAGAALQIPFAMQMAYRFNGIGVTQNVLYENQKLIANQFNSAIGKIQDSLSSTASALGKLQDVVNQNAQALNTLVKQLSSNFGAISSVLNDILSRLDKVEAEVQIDRLITGRLQSLQTYVTQQLIRAAEIRASANLAATKMSECVLGQSKRVDFCGKGYHLMSFPQCAPHGVVFLHVTYVPAQEKNFTTAPAICHDGKAHFPREGVFVSNGTHWFVTQRNFYEPQIITTDNTFVSGNCDVVIGIVNNTVYDPLQPELDSFKEELDKYFKNHTSPDVDLGDISGINASVVNIQKEIDRLNEVAKNLNESLIDLQELGKYEQYIKGGGSGGGQIYEGKLTAEGLRFGIVASRFNHALVDRLVEGAIDAIVRHGGREEDITLVRVPGSWEIPVAAGELARKEDIDAVIAIGVLIRGATPHFDYIASEVSKGLADLSLELRKPITFGVITADTLEQAIERAGTKHGNKGWEAALSAIEMANLFKSLR

SEQ ID NO: 4576 - protein, 1371 aa, Artificial Sequence
  SARS-CoV-2/Tianmen/HBCDC-HB-07/2020__EPI_ISL_412983 spike protein (1-1211)(T874C_S1055C) LumSynth construct
MFVFLVLLPLVSSQCVNLTTRTQLPPAYTNSFTRGVYYPDKVFRSSVLHSTQDLFLPFFSNVTWFHAIHVSGTNGTKRFDNPVLPFNDGVYFASTEKSNIIRGWIFGTTLDSKTQSLLIVNNATNVVIKVCEFQFCNDPFLGVYYHKNNKSWMESEFRVYSSANNCTFEYVSQPFLMDLEGKQGNFKNLREFVFKNIDGYFKIYSKHTPINLVRDLPQGFSALEPLVDLPIGINITRFQTLLALHRSYLTPGDSSSGWTAGAAAYYVGYLQPRTFLLKYNENGTITDAVDCALDPLSETKCTLKSFTVEKGIYQTSNFRVQPTESIVRFPNITNLCPFGEVFNATRFASVYAWNRKRISNCVADYSVLYNSASFSTFKCYGVSPTKLNDLCFTNVYADSFVIRGDEVRQIAPGQTGKIADYNYKLPDDFTGCVIAWNSNNLDSKVGGNYNYLYRLFRKSNLKPFERDISTEIYQAGSTPCNGVEGFNCYFPLQSYGFQPTNGVGYQPYRVVVLSFELLHAPATVCGPKKSTNLVKNKCVNFNFNGLTGTGVLTESNKKFLPFQQFGRDIADTTDAVRDPQTLEILDITPCSFGGVSVITPGTNTSNQVAVLYQDLNCTEVPVAIHADQLTPTWRVYSTGSNVFQTRAGCLIGAEHVNNSYECDIPIGAGICASYQTQTNSPRRARSVASQSIIAYTMSLGAENSVAYSNNSIAIPTNFTISVTTEILPVSMTKTSVDCTMYICGDSTECSNLLLQYGSFCTQLNRALTGIAVEQDKNTQEVFAQVKQIYKTPPIKDFGGFNFSQILPDPSKPSKRSFIEDLLFNKVTLADAGFIKQYGDCLGDIAARDLICAQKFNGLTVLPPLLTDEMIAQYCSALLAGTITSGWTFGAGAALQIPFAMQMAYRFNGIGVTQNVLYENQKLIANQFNSAIGKIQDSLSSTASALGKLQDVVNQNAQALNTLVKQLSSNFGAISSVLNDILSRLDKVEAEVQIDRLITGRLQSLQTYVTQQLIRAAEIRASANLAATKMSECVLGQSKRVDFCGKGYHLMSFPQCAPHGVVFLHVTYVPAQEKNFTTAPAICHDGKAHFPREGVFVSNGTHWFVTQRNFYEPQIITTDNTFVSGNCDVVIGIVNNTVYDPLQPELDSFKEELDKYFKNHTSPDVDLGDISGINASVVNIQKEIDRLNEVAKNLNESLIDLQELGKYEQYIKGGGSGGGQIYEGKLTAEGLRFGIVASRFNHALVDRLVEGAIDAIVRHGGREEDITLVRVPGSWEIPVAAGELARKEDIDAVIAIGVLIRGATPHFDYIASEVSKGLADLSLELRKPITFGVITADTLEQAIERAGTKHGNKGWEAALSAIEMANLFKSLR

SEQ ID NO: 4577 - protein, 1371 aa, Artificial Sequence
  SARS-CoV-2/Hong Kong/case42_VM20002493/2020__EPI_ISL_414527 spike protein (1-1211)(T874C_S1055C) LumSynth construct
MFVFLVLLPLVSSQCVNLTTRTQLPPAYTNSFTRGVYYPDKVFRSSVLHSTQDLFLPFFSNVTWFHAIHVSGTNGTKRFDNPVLPFNDGVYFASTEKSNIIRGWIFGTTLDSKTQSLLIVNNATNVVIKVCEFQFCNDPFLGVYYHKNNKSWMESEFRVYSSANNCTFEYVSQPFLMDLEGKQGNFKNLREFVFKNIDGYFKIYSKHTPINLVRDLPQGFSALEPLVDLPIGINITRFQTLLALHRSYLTPGDSSSGWTAGAAAYYVGYLQPRTFLLKYNENGTITDAVDCALDPLSETKCTLKSFTVEKGIYQTSNFRVQPTESIVRFPNITNLCPFGEVFNATRFASVYAWNRKRISNCVADYSVLYNSASFSTFKCYGVSPTKLNDLCFTNVYADSFVIRGDEVRQIAPGQTGKIADYNYKLPDDFTGCVIAWNSNNLDSKVGGNYNYLYRLFRKSNLKPFERDISTEIYQAGSTPCNGVEGFNCYFPLQSYGFQPTNGVGYQPYRVVVLSFELLHAPATVCGPKKSTNLVKNKCVNFNFNGLTGTGVLTESNKKFLPFQQFGRDIADTTDAVRDPQTLEILDITPCSFGGVSVITPGTNTSNQVAVLYQDVNCTEVPVAIHADQLTPTWRVYSTGSNVFQTRAGCLIGAEHVNNSYECDIPIGAGICASYQTQTNSPRRARSVASQSIIAYTMSLGAENSVAYSNNSIAIPTNFAISVTTEILPVSMTKTSVDCTMYICGDSTECSNLLLQYGSFCTQLNRALTGIAVEQDKNTQEVFAQVKQIYKTPPIKDFGGFNFSQILPDPSKPSKRSFIEDLLFNKVTLADAGFIKQYGDCLGDIAARDLICAQKFNGLTVLPPLLTDEMIAQYCSALLAGTITSGWTFGAGAALQIPFAMQMAYRFNGIGVTQNVLYENQKLIANQFNSAIGKIQDSLSSTASALGKLQDVVNQNAQALNTLVKQLSSNFGAISSVLNDILSRLDKVEAEVQIDRLITGRLQSLQTYVTQQLIRAAEIRASANLAATKMSECVLGQSKRVDFCGKGYHLMSFPQCAPHGVVFLHVTYVPAQEKNFTTAPAICHDGKAHFPREGVFVSNGTHWFVTQRNFYEPQIITTDNTFVSGNCDVVIGIVNNTVYDPLQPELDSFKEELDKYFKNHTSPDVDLGDISGINASVVNIQKEIDRLNEVAKNLNESLIDLQELGKYEQYIKGGGSGGGQIYEGKLTAEGLRFGIVASRFNHALVDRLVEGAIDAIVRHGGREEDITLVRVPGSWEIPVAAGELARKEDIDAVIAIGVLIRGATPHFDYIASEVSKGLADLSLELRKPITFGVITADTLEQAIERAGTKHGNKGWEAALSAIEMANLFKSLR

SEQ ID NO: 4578 - protein, 1371 aa, Artificial Sequence
  SARS-CoV-2/USA/CruiseA-23/2020__EPI_ISL_414482 spike protein (1-1211)(T874C_S1055C) LumSynth construct
MFVFLVLLPLVSSQCVNLTTRTQLPPAYTNSFTRGVYYPDKVFRSSVLHSTQDLFLPFFSNVTWFHAIHVSGTNGTKRFDNPVLPFNDGVYFASTEKSNIIRGWIFGTTLDSKTQSLLIVNNATNVVIKVCEFQFCNDPFLGVYYHKNNKSWMESEFRVYSSANNCTFEYVSQPFLMDLEVKQGNFKNLREFVFKNIDGYFKIYSKHTPINLVRDLPQGFSALEPLVDLPIGINITRFQTLLALHRSYLTPGDSSSGWTAGAAAYYVGYLQPRTFLLKYNENGTITDAVDCALDPLSETKCTLKSFTVEKGIYQTSNFRVQPTESIVRFPNITNLCPFGEVFNATRFASVYAWNRKRISNCVADYSVLYNSASFSTFKCYGVSPTKLNDLCFTNVYADSFVIRGDEVRQIAPGQTGKIADYNYKLPDDFTGCVIAWNSNNLDSKVGGNYNYLYRLFRKSNLKPFERDISTEIYQAGSTPCNGVEGFNCYFPLQSYGFQPTNGVGYQPYRVVVLSFELLHAPATVCGPKKSTNLVKNKCVNFNFNGLTGTGVLTESNKKFLPFQQFGRDIADTTDAVRDPQTLEILDITPCSFGGVSVITPGTNTSNQVAVLYQDVNCTEVPVAIHADQLTPTWRVYSTGSNVFQTRAGCLIGAEHVNNSYECDIPIGAGICASYQTQTNSPRRARSVASQSIIAYTMSLGAENSVAYSNNSIAIPTNFTISVTTEILPVSMTKTSVDCTMYICGDSTECSNLLLQYGSFCTQLNRALTGIAVEQDKNTQEVFAQVKQIYKTPPIKDFGGFNFSQILPDPSKPSKRSFIEDLLFNKVTLADAGFIKQYGDCLGDIAARDLICAQKFNGLTVLPPLLTDEMIAQYCSALLAGTITSGWTFGAGAALQIPFAMQMAYRFNGIGVTQNVLYENQKLIANQFNSAIGKIQDSLSSTASALGKLQDVVNQNAQALNTLVKQLSSNFGAISSVLNDILSRLDKVEAEVQIDRLITGRLQSLQTYVTQQLIRAAEIRASANLAATKMSECVLGQSKRVDFCGKGYHLMSFPQCAPHGVVFLHVTYVPAQEKNFTTAPAICHDGKAHFPREGVFVSNGTHWFVTQRNFYEPQIITTDNTFVSGNCDVVIGIVNNTVYDPLQPELDSFKEELDKYFKNHTSPDVDLGDISGINASVVNIQKEIDRLNEVAKNLNESLIDLQELGKYEQYIKGGGSGGGQIYEGKLTAEGLRFGIVASRFNHALVDRLVEGAIDAIVRHGGREEDITLVRVPGSWEIPVAAGELARKEDIDAVIAIGVLIRGATPHFDYIASEVSKGLADLSLELRKPITFGVITADTLEQAIERAGTKHGNKGWEAALSAIEMANLFKSLR

SEQ ID NO: 4579 - protein, 1371 aa, Artificial Sequence
  SARS-CoV-2/Hong Kong/case85_VM20002868/2020__EPI_ISL_414519 spike protein (1-1211)(T874C_S1055C) LumSynth construct
MFVFLVLVPLVSSQCVNLTTRTQLPPAYTNSFTRGVYYPDKVFRSSVLHSTQDLFLPFFSNVTWFHAIHVSGTNGTKRFDNPVLPFNDGVYFASTEKSNIIRGWIFGTTLDSKTQSLLIVNNATNVVIKVCEFQFCNDPFLGVYYHKNNKSWMESEFRVYSSANNCTFEYVSQPFLMDLEGKQGNFKNLREFVFKNIDGYFKIYSKHTPINLVRDLPQGFSALEPLVDLPIGINITRFQTLLALHRSYLTPGDSSSGWTAGAAAYYVGYLQPRTFLLKYNENGTITDAVDCALDPLSETKCTLKSFTVEKGIYQTSNFRVQPTESIVRFPNITNLCPFGEVFNATRFASVYAWNRKRISNCVADYSVLYNSASFSTFKCYGVSPTKLNDLCFTNVYADSFVIRGDEVRQIAPGQTGKIADYNYKLPDDFTGCVIAWNSNNLDSKVGGNYNYLYRLFRKSNLKPFERDISTEIYQAGSTPCNGVEGFNCYFPLQSYGFQPTNGVGYQPYRVVVLSFELLHAPATVCGPKKSTNLVKNKCVNFNFNGLTGTGVLTESNKKFLPFQQFGRDIADTTDAVRDPQTLEILDITPCSFGGVSVITPGTNTSNQVAVLYQDVNCTEVPVAIHADQLTPTWRVYSTGSNVFQTRAGCLIGAEHVNNSYECDIPIGAGICASYQTQTNSPRRARSVASQSIIAYTMSLGAENSVAYSNNSIAIPTNFTISVTTEILPVSMTKTSVDCTMYICGDSTECSNLLLQYGSFCTQLNRALTGIAVEQDKNTQEVFAQVKQIYKTPPIKDFGGFNFSQILPDPSKPSKRSFIEDLLFNKVTLADAGFIKQYGDCLGDIAARDLICAQKFNGLTVLPPLLTDEMIAQYCSALLAGTITSGWTFGAGAALQIPFAMQMAYRFNGIGVTQNVLYENQKLIANQFNSAIGKIQDSLSSTASALGKLQDVVNQNAQALNTLVKQLSSNFGAISSVLNDILSRLDKVEAEVQIDRLITGRLQSLQTYVTQQLIRAAEIRASANLAATKMSECVLGQSKRVDFCGKGYHLMSFPQCAPHGVVFLHVTYVPAQEKNFTTAPAICHDGKAHFPREGVFVSNGTHWFVTQRNFYEPQIITTDNTFVSGNCDVVIGIVNNTVYDPLQPELDSFKEELDKYFKNHTSPDVDLGDISGINASVVNIQKEIDRLNEVAKNLNESLIDLQELGKYEQYIKGGGSGGGQIYEGKLTAEGLRFGIVASRFNHALVDRLVEGAIDAIVRHGGREEDITLVRVPGSWEIPVAAGELARKEDIDAVIAIGVLIRGATPHFDYIASEVSKGLADLSLELRKPITFGVITADTLEQAIERAGTKHGNKGWEAALSAIEMANLFKSLR

SEQ ID NO: 4580 - protein, 1371 aa, Artificial Sequence; identical to SEQ ID NO: 4570
  SARS-CoV-2/England/200990660/2020__EPI_ISL_414523 spike protein (1-1211)(T874C_S1055C) LumSynth construct

SEQ ID NO: 4581 - protein, 1371 aa, Artificial Sequence
  SARS-CoV-2/Australia/NSW09/2020__EPI_ISL_413595 spike protein (1-1211)(T874C_S1055C) LumSynth construct
MFVFLVLLPLVSSQCVNLTTRTQLPPAYTNSFTRGVYYPDKVFRSSVLHSTQDLFLPFFSNVTWFHAIHVSGTNGTKRFDNPVLPFNDGVYFASTEKSNIIRGWIFGTTLDSKTQSLLIVNNATNVVIKVCEFQFCNDPFLGVYYHKNNKSWMESEFRVYSSANNCTFEYVSQPFLMDLEGKQGNFKNLREFVFKNIDGYFKIYSKHTPINLVRDLPQGFSALEPLVDLPIGINITRFQTLLALHRSYLTPGDSSSGWTAGAAAYYVGYLQPRTFLLKYNENGTITDAVDCALDPLSETKCTLKSFTVEKGIYQTSNFRVQPTESIVRFPNITNLCPFGEVFNATRFASVYAWNRKRISNCVADYSVLYNSASFSTFKCYGVSPTKLNDLCFTNVYADSFVIRGDEVRQIAPGQTGKIADYNYKLPDDFTGCVIAWNSNNLDSKVGGNYNYLYRLFRKSNLKPFERDISTEIYQAGSTPCNGVEGFNCYFPLQSYGFQPTNGVGYQPYRVVVLSFELLHAPATVCGPKKSTNLVKNKCVNFNFNGLTGTGVLTESNKKFLPFQQFGRDIADTTDAVRDPQTLEILDITPCSFGGVSVITPGTNTSNQVAVLYQDVNCTEVPVAIHADQLTPTWRVYSTGSNVFQTRAGCLIGAEHVNNSYECDIPIGAGICASYQTQTNSPRRARSVASQSIIAYTMSLGAENSVAYSNNSIAIPTNFTISVTTEILPVSMTKTSVDCTMYICGDSTECSNLLLQYGSFCTQLNRALTGIAVEQDKNTQEVFAQVKQIYKTPPIKDFGGFNFSQILPDPSKPSKRSFIEDLLFNKVTLADAGFIKQYGDCLGDIAARDLICAQKFNGLTVLPPLLTDEMIAQYCSALLAGTITSGWTFGAGAALQIPFAMQMAYRFNGIGVTQNVLYENQKLIANQFNSAIGKIQDSLSFTASALGKLQDVVNQNAQALNTLVKQLSSNFGAISSVLNDILSRLDKVEAEVQIDRLITGRLQSLQTYVTQQLIRAAEIRASANLAATKMSECVLGQSKRVDFCGKGYHLMSFPQCAPHGVVFLHVTYVPAQEKNFTTAPAICHDGKAHFPREGVFVSNGTHWFVTQRNFYEPQIITTDNTFVSGNCDVVIGIVNNTVYDPLQPELDSFKEELDKYFKNHTSPDVDLGDISGINASVVNIQKEIDRLNEVAKNLNESLIDLQELGKYEQYIKGGGSGGGQIYEGKLTAEGLRFGIVASRFNHALVDRLVEGAIDAIVRHGGREEDITLVRVPGSWEIPVAAGELARKEDIDAVIAIGVLIRGATPHFDYIASEVSKGLADLSLELRKPITFGVITADTLEQAIERAGTKHGNKGWEAALSAIEMANLFKSLR

SEQ ID NO: 4582 - protein, 1371 aa, Artificial Sequence; identical to SEQ ID NO: 4562
  SARS-CoV-2/Australia/NSW10/2020__EPI_ISL_413596 spike protein (1-1211)(T874C_S1055C) LumSynth construct

SEQ ID NO: 4583 - protein, 1371 aa, Artificial Sequence
  SARS-CoV-2/Switzerland/1000477797/2020__EPI_ISL_413023 spike protein (1-1211)(T874C_S1055C) LumSynth construct
MFVFLVLLPLVSSQCVNLTTRTQLPPAYTNSFTRGVYYPDKVFRSSVLHSTQDLFLPFFSNVTWFHAIHVSGTNGTKRFDNPVLPFNDGVYFASTEKSNIIRGWIFGTTLDSKTQSLLIVNNATNVVIKVCEFQFCNDPFLGVYYHKNNKSWMESEFRVYSSANNCTFEYVSQPFLMDLEGKQGNFKNLREFVFKNIDGYFNIYSKHTPINLVRDLPQGFSALEPLVDLPIGINITRFQTLLALHRSYLTPGDSSSGWTAGAAAYYVGYLQPRTFLLKYNENGTITDAVDCALDPLSETKCTLKSFTVEKGIYQTSNFRVQPTESIVRFPNITNLCPFGEVFNATRFASVYAWNRKRISNCVADYSVLYNSASFSTFKCYGVSPTKLNDLCFTNVYADSFVIRGDEVRQIAPGQTGKIADYNYKLPDDFTGCVIAWNSNNLDSKVGGNYNYLYRLFRKSNLKPFERDISTEIYQAGSTPCNGVEGFNCYFPLQSYGFQPTNGVGYQPYRVVVLSFELLHAPATVCGPKKSTNLVKNKCVNFNFNGLTGTGVLTESNKKFLPFQQFGRDIADTTDAVRDPQTLEILDITPCSFGGVSVITPGTNTSNQVAVLYQGVNCTEVPVAIHADQLTPTWRVYSTGSNVFQTRAGCLIGAEHVNNSYECDIPIGAGICASYQTQTNSPRRARSVASQSIIAYTMSLGAENSVAYSNNSIAIPTNFTISVTTEILPVSMTKTSVDCTMYICGDSTECSNLLLQYGSFCTQLNRALTGIAVEQDKNTQEVFAQVKQIYKTPPIKDFGGFNFSQILPDPSKPSKRSFIEDLLFNKVTLADAGFIKQYGDCLGDIAARDLICAQKFNGLTVLPPLLTDEMIAQYCSALLAGTITSGWTFGAGAALQIPFAMQMAYRFNGIGVTQNVLYENQKLIANQFNSAIGKIQDSLSSTASALGKLQDVVNQNAQALNTLVKQLSSNFGAISSVLNDILSRLDKVEAEVQIDRLITGRLQSLQTYVTQQLIRAAEIRASANLAATKMSECVLGQSKRVDFCGKGYHLMSFPQCAPHGVVFLHVTYVPAQEKNFTTAPAICHDGKAHFPREGVFVSNGTHWFVTQRNFYEPQIITTDNTFVSGNCDVVIGIVNNTVYDPLQPELDSFKEELDKYFKNHTSPDVDLGDISGINASVVNIQKEIDRLNEVAKNLNESLIDLQELGKYEQYIKGGGSGGGQIYEGKLTAEGLRFGIVASRFNHALVDRLVEGAIDAIVRHGGREEDITLVRVPGSWEIPVAAGELARKEDIDAVIAIGVLIRGATPHFDYIASEVSKGLADLSLELRKPITFGVITADTLEQAIERAGTKHGNKGWEAALSAIEMANLFKSLR

SEQ ID NO: 4584 - protein, 1371 aa, Artificial Sequence
  SARS-CoV-2/Belgium/BA-02291/2020__EPI_ISL_415159 spike protein (1-1211)(T874C_S1055C) LumSynth construct
MFVFLVLLPLVSSQCVNLTTRTQLPPAYTNSFTRGVYYPDKVFRSSVLHSTQDLFLPFFSNVTWFHAIHVSGTNGTKRFDNPVLPFNDGVYFASTEKSNIIRGWIFGTTLDSKTQSLLIVNNATNVVIKVCEFQFCNDPFLGVYYHKNNKSWMESEFRVYSSANNCTFEYVSQPFLMDLEGKQGNFKNLREFVFKNIDGYFKIYSKHTPINLVRDLPQGFSALEPLVDLPIGINITRFQTLLALHRSYLTPGDSSSGWTAGAAAYYVGYLQPRTFLLKYNENGTITDAVDCALDPLSETKCTLKSFTVEKGIYQTSNFRVQPTESIVRFPNITNLCPFGEVFNATRFASVYAWNRKRISNCVADYSVLYNSASFSTFKCYGVSPTKLNDLCFTNVYADSFVIRGDEVRQIAPGQTGKIADYNYKLPDDFTGCVIAWNSNNLDSKVGGNYNYLYRLFRRSNLKPFERDISTEIYQAGSTPCNGVEGFNCYFPLQSYGFQPTNGVGYQPYRVVVLSFELLPAPATVCGPKKSTNLVKNKCVNFNFNGLTGTGVLTESNKKFLPFQQFGRDIADTTDAVRDPQTLEILDITPCSFGGVSVITPGTNTSNQVAVLYQGVNCTEVPVAIHADQLTPTWRVYSTGSNVFQTRAGCLIGAEHVNNSYECDIPIGAGICASYQTQTNSPRRARSVASQSIIAYTMSLGAENSVAYSNNSIAIPTNFTISVTTEILPVSMTKTSVDCTMYICGDSTECSNLLLQYGSFCTQLNRALTGIAVEQDKNTQEVFAQVKQIYKTPPIKDFGGFNFSQILPDPSKPSKRSFIEDLLFNKVTLADAGFIKQYGDCLGDIAARDLICAQKFNGLTVLPPLLTDEMIAQYCSALLAGTITSGWTFGAGAALQIPFAMQMAYRFNGIGVTQNVLYENQKLIANQFNSAIGKIQDSLSSAAPALGKLQDVVNQNAQALNTLVKQLSSNFGAISSVLNDILSRLDKVEAEVQIDRLITGRLQSLQTYVTQQLIRAAEIRASANLAATKMSECVLGQSKRVDFCGKGYHLMSFPQCAPHGVVFLHVTYVPAQEKNFTTAPAICHDGKAHFPREGVFVSNGTHWFVTQRNFYEPQIITTDNTFVSGNCDVVIGIVNNTVYDPLQPELDSFKEELDKYFKNHTSPDVDLGDISGINASVVNIQKEIDRLNEVAKNLNESLIDLQELGKYEQYIKGGGSGGGQIYEGKLTAEGLRFGIVASRFNHALVDRLVEGAIDAIVRHGGREEDITLVRVPGSWEIPVAAGELARKEDIDAVIAIGVLIRGATPHFDYIASEVSKGLADLSLELRKPITFGVITADTLEQAIERAGTKHGNKGWEAALSAIEMANLFKSLR

SEQ ID NO: 4585 - protein, 1371 aa, Artificial Sequence
  SARS-CoV-2/USA/WA8-UW5/2020__EPI_ISL_413486 spike protein (1-1211)(T874C_S1055C) LumSynth construct
MFVFLVLLPLVSSQCVNLTTRTQLPPAYTNSFTRGVYYPDKVFRSSVLHSTQDLFLPFFSNVTWFHAIHVSGTNGTKRFDNPVLPFNDGVYFASTEKSNIIRGWIFGTTLDSKTQSLLIVNNATNVVIKVCEFQFCNDPFLGVYYHKNNKSWMESEFRVYSSANNCTFEYVSQPFLMDLEGKQGNFKNLREFVFKNIDGYFKIYSKHTPINLVRDLPQGFSALEPLVDLPIGINITRFQTLLALHRSYLTPGDSSSGWTAGAAAYYVGYLQPRTFLLKYNENGTITDAVDCALDPLSETKCTLKSFTVEKGIYQTSNFRVQPTESIVRFPNITNLCPFGEVFNATRFASVYAWNRKRISNCVADYSVLYNSASFSTFKCYGVSPTKLNDLCFTNVYADSFVIRGDEVRQIAPGQTGKIADYNYKLPDDFTGCVIAWNSNNLDSKVGGNYNYLYRLFRKSNLKPFERDISTEIYQAGSTPCNGVEGFNCYFPLQSYGFQPTNGVGYQPYRVVVLSFELLHAPATVCGPKKSTNLVKNKCVNFNFNGLTGTGVLTESNKKFLPFQQFGRDIADTTDAVRDPQTLEILDITPCSFGGVSVITPGTNTSNQVAVLYQDVNCTEVPVAIHADQLTPTWRVYSTGSNVFQTRAGCLIGAEYVNNSYECDIPIGAGICASYQTQTNSPRRARSVASQSIIAYTMSLGAENSVAYSNNSIAIPTNFTISVTTEILPVSMTKTSVDCTMYICGDSTECSNLLLQYGSFCTQLNRALTGIAVEQDKNTQEVFAQVKQIYKTPPIKDFGGFNFSQILPDPSKPSKRSFIEDLLFNKVTLADAGFIKQYGDCLGDIAARDLICAQKFNGLTVLPPLLTDEMIAQYCSALLAGTITSGWTFGAGAALQIPFAMQMAYRFNGIGVTQNVLYENQKLIANQFNSAIGKIQDSLSSTASALGKLQDVVNQNAQALNTLVKQLSSNFGAISSVLNDILSRLDKVEAEVQIDRLITGRLQSLQTYVTQQLIRAAEIRASANLAATKMSECVLGQSKRVDFCGKGYHLMSFPQCAPHGVVFLHVTYVPAQEKNFTTAPAICHDGKAHFPREGVFVSNGTHWFVTQRNFYEPQIITTDNTFVSGNCDVVIGIVNNTVYDPLQPELDSFKEELDKYFKNHTSPDVDLGDISGINASVVNIQKEIDRLNEVAKNLNESLIDLQELGKYEQYIKGGGSGGGQIYEGKLTAEGLRFGIVASRFNHALVDRLVEGAIDAIVRHGGREEDITLVRVPGSWEIPVAAGELARKEDIDAVIAIGVLIRGATPHFDYIASEVSKGLADLSLELRKPITFGVITADTLEQAIERAGTKHGNKGWEAALSAIEMANLFKSLR

SEQ ID NO: 4586 - protein, 1371 aa, Artificial Sequence
  SARS-CoV-2/England/20102000506/2020__EPI_ISL_415147 spike protein (1-1211)(T874C_S1055C) LumSynth construct
MFVFLVLLPLVSSQCVNLTTRTQLPPAYTNSFTRGVYYPDKVFRSSVLHSTQDLFLPFFSNVTWFHAIHVSGTNGTKRFDNPVLPFNDGVYFASTEKSNIIRGWIFGTTLDSKTQSLLIVNNATNVVIKVCEFQFCNDPFLGVYYHKNNKSWMESEFRVYSSANNCTFEYVSQPFLMDLEGKQGNFKNLREFVFKNIDGYFKIYSKHTPINLVRDLPQGFSALEPLVDLPIGINITRFQTLLALHRSYLTPGDSSSGWTAGAAAYYVGYLQPRTFLLKYNENGTITDAVDCALDPLSETKCTLKSFTVEKGIYQTSNFRVQPTESIVRFPNITNLCPFGEVFNATRFASVYAWNRKRISNCVADYSVLYNSASFSTFKCYGVSPTKLNDLCFTNVYADSFVIRGDEVRQIAPGQTGKIADYNYKLPDDFTGCVIAWNSNNLDSKVGGNYNYLYRLFRKSNLKPFERDISTEIYQAGSTPCNGVEGFNCYFPLQSYGFQPTNGVGYQPYRVVVLSFELLHAPATVCGPKKSTNLVKNKCVNFNFNGLTGTGVLTESNKKFLPFQQFGRDIADTTDAVRDPQTLEILDITPCSFGGVSVITPGTNTSNQVAVLYQGVNCTEVPVAIHADQLTPTWRVYSTGSNVFQTRAGCLIGAEHVNNSYECDIPIGAGICASYQTQTNSPRRARSVASQSIIAYTMSLGAENSVAYSNNSIAIPTNFTISVTTEILPVSMTKTSVDCTMYICGDSTECSNLLLQYGSFCTQLNRALTGIAVEQDKNTQEVFAQVKQIYKTPPIKDFGGFNFSQILPDPSKPSKRSFIEDLLFNKVTLADAGFIKQYGYCLGDIAARDLICAQKFNGLTVLPPLLTDEMIAQYCSALLAGTITSGWTFGAGAALQIPFAMQMAYRFNGIGVTQNVLYENQKLIANQFNSAIGKIQDSLSSTASALGKLQDVVNQNAQALNTLVKQLSSNFGAISSVLNDILSRLDKVEAEVQIDRLITGRLQSLQTYVTQQLIRAAEIRASANLAATKMSECVLGQSKRVDFCGKGYHLMSFPQCAPHGVVFLHVTYVPAQEKNFTTAPAICHDGKAHFPREGVFVSNGTHWFVTQRNFYEPQIITTDNTFVSGNCDVVIGIVNNTVYDPLQPELDSFKEELDKYFKNHTSPDVDLGDISGINASVVNIQKEIDRLNEVAKNLNESLIDLQELGKYEQYIKGGGSGGGQIYEGKLTAEGLRFGIVASRFNHALVDRLVEGAIDAIVRHGGREEDITLVRVPGSWEIPVAAGELARKEDIDAVIAIGVLIRGATPHFDYIASEVSKGLADLSLELRKPITFGVITADTLEQAIERAGTKHGNKGWEAALSAIEMANLFKSLR

SEQ ID NO: 4587 - protein, 1371 aa, Artificial Sequence
  SARS-CoV-2/Belgium/VAG-03013/2020__EPI_ISL_415155 spike protein (1-1211)(T874C_S1055C) LumSynth construct
MFVFLVLLPLVSSQCVNLTTRTQLPPAYTNSFTRGVYYPDKVFRSSVLHSTQDLFLPFFSNVTWFHAIHVSGTNGTKRFDNPVLPFNDGVYFASTEKSNIIRGWIFGTTLDSKTQSLLIVNNATNVVIKVCEFQFCNDPFLGVYYHKNNKSWMESEFRVYSSANNCTFEYVSQPFLMDLEGKQGNFKNLREFVFKNIDGYFKIYSKHTPINLVRDLPQGFSALEPLVDLPIGINITRFQTLLALHRSYLTPGDSSSGWTAGAAAYYVGYLQPRTFLLKYNENGTITDAVDCALDPLSETKCTLKSFTVEKGIYQTSNFRVQPTESIVRFPNITNLCPFGEVFNATRFASVYAWNRKRISNCVADYSVLYNSASFSTFKCYGVSPTKLNDLCFTNVYADSFVIRGDEVRQIAPGQTGKIADYNYKLPDDFTGCVIAWNSNNLDSKVGGNYNYLYRLFRKSNLKPFERDISTEIYQAGSTPCNGVEGFNCYFPLQSYGFQPTNGVGYQPYRVVVLSFELLHAPATVCGPKKSTNLVKNKCVNFNFNGLTGTGVLTESNKKFLPFQQFGRDIADTTDAVRDPQTLEILDITPCSFGGVSVITPGTNTSNQVAVLYQGVNCTEVPVAIHADQLTPTWRVYSTGSNVFQTRAGCLIGAEHVNNSYECDIPIGAGICASYQTQTNSPRRARSVASQSIIAYTMSLGAENSVAYSNNSIAIPTNFTISVTTEILPVSMTKTSVDCTMYICGDSTECSNLLLQYGSFCTQLNRALTGIAVEQDKNTQEVFAQVKQIYKTPPIKDFGGFNFSQILPDPSKPSKRSFIEDLLFNKVTLADAGFIKQYGDCLGDIAARDLICAQKFNGLTVLPPLLTDEMIAQYCSALLAGTITSGWTFGAGAALQIPFAMQMAYRFNGIGVTQNVLYENQKLIANQFNSAIGKIQDSLSSTATALGKLQDVVNQNAQALNTLVKQLSSNFGAISSVLNDILSRLDKVEAEVQIDRLITGRLQSLQTYVTQQLIRAAEIRASANLAATKMSECVLGQSKRVDFCGKGYHLMSFPQCAPHGVVFLHVTYVPAQEKNFTTAPAICHDGKAHFPREGVFVSNGTHWFVTQRNFYEPQIITTDNTFVSGNCDVVIGIVNNTVYDPLQPELDSFKEELDKYFKNHTSPDVDLGDISGINASVVNIQKEIDRLNEVAKNLNESLIDLQELGKYEQYIKGGGSGGGQIYEGKLTAEGLRFGIVASRFNHALVDRLVEGAIDAIVRHGGREEDITLVRVPGSWEIPVAAGELARKEDIDAVIAIGVLIRGATPHFDYIASEVSKGLADLSLELRKPITFGVITADTLEQAIERAGTKHGNKGWEAALSAIEMANLFKSLR

SEQ ID NO: 4588 - protein, 1371 aa, Artificial Sequence
  SARS-CoV-2/Belgium/BC-03016/2020__EPI_ISL_415157 spike protein (1-1211)(T874C_S1055C) LumSynth construct
MFVFLVLLPLVSSQCVNLTTRTQLPPAYTNSFTRGVYYPDKVFRSSVLHSTQDLFLPFFSNVTWFHAIHVSGTNGTKRFDNPVLPFNDGVYFASTEKSNIIRGWIFGTTLDSKTQSLLIVNNATNVVIKVCEFQFCNDPFLGVYYHKNNKSWMESEFRVYSSANNCTFEYVSQPFLMDLEGKQGNFKNLREFVFKNIDGYFKIYSKHTPINLVRDLPQGFSALEPLVDLPIGINITRFQTLLALHRSYLTPGDSSSGWTAGAAAYYVGYLQPRTFLLKYNENGTITDAVDCALDPLSETKCTLKSFTVEKGIYQTSNFRVQPTESIVRFPNITNLCPFGEVFNATRFASVYAWNRKRISNCVADYSVLYNSASFSTFKCYGVSPTKLNDLCFTNVYADSFVIRGDEVRQIAPGQTGKIADYNYKLPDDFTGCVIAWNSNNLDSKVGGNYNYLYRLFRKSNLKPFERDISTEIYQAGSTPCNGVEGFNCYFPLQSYGFQPTNGVGYQPYRVVVLSFELLHAPATVCGPKKSTNLVKNKCVNFNFNGLTGTGVLTESNKKFLPFQQFGRDIADTTDAVRDPQTLEILDITPCSFGGVSVITPGTNTSNQVAVLYQGVNCTEVPVAIHADQLTPTWRVYSTGSNVFQTRAGCLIGAEHVNNSYECDIPIGAGICASYQTQTNSPRRARSVASQSIIAYTMSLGAENSVAYSNNSIAIPTNFTISVTTEILPVSMTKTSVDCTMYICGDSTECSNLLLQYGSFCTQLNRALTGIAVEQDKNTQEVFAQVKQIYKTPPIKDFGGFNFSQILPDPSKPSKRSFIEDLLFNKVTLADAGFIKQYGDCLGDIAARDLICAQKFNGLTVLPPLLTDEMIAQYCSALLAGTITSGWTFGAGAALQIPFAMQMAYRFNGIGVTQNVLYENQKLIANQFNSAIGKIQDSLSSTAPALGKLQDVVNQNAQALNTLVKQLSSNFGAISSVLNDILSRLDKVEAEVQIDRLITGRLQSLQTYVTQQLIRAAEIRASANLAATKMSECVLGQSKRVDFCGKGYHLMSFPQCAPHGVVFLHVTYVPAQEKNFTTAPAICHDGKAHFPREGVFVSNGTHWFVTQRNFYEPQIITTDNTFVSGNCDVVIGIVNNTVYDPLQPELDSFKEELDKYFKNHTSPDVDLGDISGINASVVNIQKEIDRLNEVAKNLNESLIDLQELGKYEQYIKGGGSGGGQIYEGKLTAEGLRFGIVASRFNHALVDRLVEGAIDAIVRHGGREEDITLVRVPGSWEIPVAAGELARKEDIDAVIAIGVLIRGATPHFDYIASEVSKGLADLSLELRKPITFGVITADTLEQAIERAGTKHGNKGWEAALSAIEMANLFKSLR

SEQ ID NO: 4589 - protein, 1371 aa, Artificial Sequence
  SARS-CoV-2/Germany/BavPat3/2020__EPI_ISL_414521 spike protein (1-1211)(T874C_S1055C) LumSynth construct
MFVFLVLLPLVSSQCVNLTTRTQLPPAYTNSFTRGVYYPDKVFRSSVLHSTQDLFLPFFSNVTWFHAIHVSGTNGTKRFDNPVLPFNDGVYFASTEKSNIIRGWIFGTTLDSKTQSLLIVNNATNVVIKVCEFQFCNDPFLGVYYHKNNKSWMESEFRVYSSANNCTFEYVSQPFLMDLEGKQGNFKNLREFVFKNIDGYFKIYSKHTPINLVRDLPQGFSALEPLVDLPIGINITRFQTLLALHRSYLTPGDSSSGWTAGAAAYYVGYLQPRTFLLKYNENGTITDAVDCALDPLSETKCTLKSFTVEKGIYQTSNFRVQPTESIVRFPNITNLCPFGEVFNATRFASVYAWNRKRISNCVADYSVLYNSASFSTFKCYGVSPTKLNDLCFTNVYADSFVIRGDEVRQIAPGQTGKIADYNYKLPDDFTGCVIAWNSNNLDSKVGGNYNYLYRLFRKSNLKPFERDISTEIYQAGSTPCNGVEGFNCYFPLQSYGFQPTNGVGYQPYRVVVLSFELLHAPATVCGPKKSTNLVKNKCVNFNFNGLTGTGVLTESNKKFLPFQQFGRDIADTTDAVRDPQTLEILDITPCSFGGVSVITPGTNTSNQVAVLYQDVNCTEVPVAIHADQLTPTWRVYSTGSNVFQTRAGCLIGAEHVNNSYECDIPIGAGICASYQTQTNSPRRARSVASQSIIAYTMSLGAENSVAYSNNSIAIPTNFTISVTTEILPVSMTKTSVDCTMYICGDSTECSNLLLQYGSFCTQLNRALTGIAVEQDKNTQQVFAQVKQIYKTPPIKDFGGFNFSQILPDPSKPSKRSFIEDLLFNKVTLADAGFIKQYGDCLGDIAARDLICAQKFNGLTVLPPLLTDEMIAQYCSALLAGTITSGWTFGAGAALQIPFAMQMAYRFNGIGVTQNVLYENQKLIANQFNSAIGKIQDSLSSTASALGKLQDVVNQNAQALNTLVKQLSSNFGAISSVLNDILSRLDKVEAEVQIDRLITGRLQSLQTYVTQQLIRAAEIRASANLAATKMSECVLGQSKRVDFCGKGYHLMSFPQCAPHGVVFLHVTYVPAQEKNFTTAPAICHDGKAHFPREGVFVSNGTHWFVTQRNFYEPQIITTDNTFVSGNCDVVIGIVNNTVYDPLQPELDSFKEELDKYFKNHTSPDVDLGDISGINASVVNIQKEIDRLNEVAKNLNESLIDLQELGKYEQYIKGGGSGGGQIYEGKLTAEGLRFGIVASRFNHALVDRLVEGAIDAIVRHGGREEDITLVRVPGSWEIPVAAGELARKEDIDAVIAIGVLIRGATPHFDYIASEVSKGLADLSLELRKPITFGVITADTLEQAIERAGTKHGNKGWEAALSAIEMANLFKSLR

SEQ ID NO: 4590 - protein, 1371 aa, Artificial Sequence
  SARS-CoV-2/France/HF1805/2020__EPI_ISL_414628 spike protein (1-1211)(T874C_S1055C) LumSynth construct
MFVFLVLLPLVSSQCVNLTTRTQLPPAYTNSFTRGVYYPDKVFRSSVLHSTQDLFLPFFSNVTWFHAIHVSGTNGTKRFDNPVLPFNDGVYFASTEKSNIIRGWIFGTTLDSKTQSLLIVNNATNVVIKVCEFQFCNDPFLGVYYHKNNKSWMESEFRVYSSANNCTFEYVSQPFLMDLEGKQGNFKNLREFVFKNIDGYFKIYSKHTPINLVRDLPQGFSALEPLVDLPIGINITRFQTLLALHRSYLTPGDSSSGWTAGAAAYYVGYLQPRTFLLKYNENGTITDAVDCALDPLSETKCTLKSFTVEKGIYQTSNFRVQPTESIVRFPNITNLCPFGEVFNATRFASVYAWNRKRISNCVADYSVLYNSASFSTFKCYGVSPTKLNDLCFTNVYADSFVIRGDEVRQIAPGQTGKIADYNYKLPDDFTGCVIAWNSNNLDSKVGGNYNYLYRLFRKSNLKPFERDISTEIYQAGSTPCNGVEGFNCYFPLQSYGFQPTNGVGYQPYRVVVLSFELLHAPATVCGPKKSTNLVKNKCVNFNFNGLTGTGVLTESNKKFLPFQQFGRDIADTTDAVRDPQTLEILDITPCSFGGVSVITPGTNTSNQVAVLYQGVNCTEVPVAIHADQLTPTWRVYSTGSNVFQTRAGCLIGAEHVNNSYECDIPIGAGICASYQTQTNSPRRARSVASQSIIAYTMSLGAENSVAYSNNSIAIPTNFTISVTTEILPVSMTKTSVDCTMYICGDSTECSNLLLQYGSFCTQLNRALTGIAVEQDKNTQEVFAQVKQIYKTPPIKDFGGFNFSQILPDPSKPSKRSFIEDLLFNKVTLADAGFIKQYGDCLGDIAARDLICAQKFNGLTVLPPLLTDEMIAQYCSALLAGTITSGWTFGAGAALQIPFAMQMAYRFNGIGVTQNVLYENQKLIANQFNSAIGKIQDSLSSTASALGKLQDVVNQNAQALNTLVKQLSSNFGAISSVLNDILSRLDKVEAEVQIDRLITGRLQSLQTYVTQQLIRAAEIRASANLAATKMSECVLGQSKRVDFCGKGYHLMSFPQCAPHGVVFLHVTYVPAQEKNFTTAPAICHDGKAHFPREGVFVSNGTHWFVTQRNFYEPQIITTDNTFVSGNCDVVIGVVNNTVYDPLQPELDSFKEELDKYFKNHTSPDVDLGDISGINASVVNIQKEIDRLNEVAKNLNESLIDLQELGKYEQYIKGGGSGGGQIYEGKLTAEGLRFGIVASRFNHALVDRLVEGAIDAIVRHGGREEDITLVRVPGSWEIPVAAGELARKEDIDAVIAIGVLIRGATPHFDYIASEVSKGLADLSLELRKPITFGVITADTLEQAIERAGTKHGNKGWEAALSAIEMANLFKSLR

SEQ ID NO: 4591 - protein, 1371 aa, Artificial Sequence
  SARS-CoV-2/Netherlands/ZuidHolland_9/2020__EPI_ISL_414445 spike protein (1-1211)(T874C_S1055C) LumSynth construct
MFVFLVLLPLVSSQCVNLTTRTQLPPAYTNSFTRGVYYPDKVFRSSVLHSTQDLFLPFFSNVTWFHAIHVSGTNGTKRFDNPVLPFNDGVYFASTEKSNIIRGWIFGTTLDSKTQSLLIVNNATNVVIKVCEFQFCNDPFLGVYYHKNNKSWMESEFRVYSSANNCTFEYVSQPFLMDLEGKQGNFKNLREFVFKNIDGYFKIYSKHTPINLVRDLPQGFSALEPLVDLPIGINITRFQTLLALHRSYLTPGDSSSGWTAGAAAYYVGYLQPRTFLLKYNENGTITDAVDCALDPLSETKCTLKSFTVEKGIYQTSNFRVQPTESIVRFPNITNLCPFGEVFNATRFASVYAWNRKRISNCVADYSVLYNSASFSTFKCYGVSPTKLNDLCFTNVYADSFVIRGDEVRQIAPGQTGKIADYNYKLPDDFTGCVIAWNSNNLDSKVGGNYNYLYRLFRKSNLKPFERDISTEIYQAGSTPCNGVEGFNCYFPLQSYGFQPTNGVGYQPYRVVVLSFELLHAPATVCGPKKSTNLVKNKCVNFNFNGLTGTGVLTESNKKFLPFQQFGRDIADTTDAVRDPQTLEILDITPCSFGGVSVITPGTNTSNQVAVLYQGVNCTEVPVAIHADQLTPTWRVYSTGSNVFQTRAGCLIGAEHVNNSYECDIPIGAGICASYQTQTNSPRRARSVASQSIIAYTMSLGAENSVAYSNNSIAIPTNFTISVTTEILPVSMTKTSVDCTMYICGDSTECSNLLLQYGSFCTQLNRALTGIAVEQDKNTQEVFAQVKQIYKTPPIKDFGGFNFSQILPDPSKPSKRSFIEDLLFNKVTLADAGFIKQYGDCLGDIAARDLICVQKFNGLTVLPPLLTDEMIAQYCSALLAGTITSGWTFGAGAALQIPFAMQMAYRFNGIGVTQNVLYENQKLIANQFNSAIGKIQDSLSSTASALGKLQDVVNQNAQALNTLVKQLSSNFGAISSVLNDILSRLDKVEAEVQIDRLITGRLQSLQTYVTQQLIRAAEIRASANLAATKMSECVLGQSKRVDFCGKGYHLMSFPQCAPHGVVFLHVTYVPAQEKNFTTAPAICHDGKAHFPREGVFVSNGTHWFVTQRNFYEPQIITTDNTFVSGNCDVVIGIVNNTVYDPLQPELDSFKEELDKYFKNHTSPDVDLGDISGINASVVNIQKEIDRLNEVAKNLNESLIDLQELGKYEQYIKGGGSGGGQIYEGKLTAEGLRFGIVASRFNHALVDRLVEGAIDAIVRHGGREEDITLVRVPGSWEIPVAAGELARKEDIDAVIAIGVLIRGATPHFDYIASEVSKGLADLSLELRKPITFGVITADTLEQAIERAGTKHGNKGWEAALSAIEMANLFKSLR

SEQ ID NO: 4592 - protein, 1371 aa, Artificial Sequence
  SARS-CoV-2/Finland/FIN03032020A/2020__EPI_ISL_413602 spike protein (1-1211)(T874C_S1055C) LumSynth construct
MFVFLVLLPLVSSQCVNLTTRTQLPPAYTNSFTRGVYYPDKVFRSSVLHSTQDLFLPFFSNVTWFHAIHVSGTNGTKRFDNPVLPFNDGVYFASTEKSNIIRGWIFGTTLDSKTQSLLIVNNATNVVIKVCEFQFCNDPFLGVYYHKNNKSWMESEFRVYSSANNCTFEYVSQPFLMDLEGKQGNFKNLREFVFKNIDGYFKIYSKHTPINLVRDLPQGFSALEPLVDLPIGINITRFQTLLALHRSYLTPGDSSSGWTAGAAAYYVGYLQPRTFLLKYNENGTITDAVDCALDPLSETKCTLKSFTVEKGIYQTSNFRVQPTESIVRFPNITNLCPFGEVFNATRFASVYAWNRKRISNCVADYSVLYNSASFSTFKCYGVSPTKLNDLCFTNVYADSFVIRGDEVRQIAPGQTGKIADYNYKLPDDFTGCVISWNSNNLDSKVGGNYNYLYRLFRKSNLKPFERDISTEIYQAGSTPCNGVEGFNCYFPLQSYGFQPTNGVGYQPYRVVVLSFELLHAPATVCGPKKSTNLVKNKCVNFNFNGLTGTGVLTESNKKFLPFQQFGRDIADTTDAVRDPQTLEILDITPCSFGGVSVITPGTNTSNQVAVLYQGVNCTEVPVAIHADQLTPTWRVYSTGSNVFQTRAGCLIGAEHVNNSYECDIPIGAGICASYQTQTNSPRRARSVASQSIIAYTMSLGAENSVAYSNNSIAIPTNFTISVTTEILPVSMTKTSVDCTMYICGDSTECSNLLLQYGSFCTQLNRALTGIAVEQDKNTQEVFAQVKQIYKTPPIKDFGGFNFSQILPDPSKPSKRSFIEDLLFNKVTLADAGFIKQYGDCLGDIAARDLICAQKFNGLTVLPPLLTDEMIAQYCSALLAGTITSGWTFGAGAALQIPFAMQMAYRFNGIGVTQNVLYENQKLIANQFNSAIGKIQDSLSSTASALGKLQDVVNQNAQALNTLVKQLSSNFGAISSVLNDILSRLDKVEAEVQIDRLITGRLQSLQTYVTQQLIRAAEIRASANLAATKMSECVLGQSKRVDFCGKGYHLMSFPQCAPHGVVFLHVTYVPAQEKNFTTAPAICHDGKAHFPREGVFVSNGTHWFVTQRNFYEPQIITTDNTFVSGNCDVVIGIVNNTVYDPLQPELDSFKEELDKYFKNHTSPDVDLGDISGINASVVNIQKEIDRLNEVAKNLNESLIDLQELGKYEQYIKGGGSGGGQIYEGKLTAEGLRFGIVASRFNHALVDRLVEGAIDAIVRHGGREEDITLVRVPGSWEIPVAAGELARKEDIDAVIAIGVLIRGATPHFDYIASEVSKGLADLSLELRKPITFGVITADTLEQAIERAGTKHGNKGWEAALSAIEMANLFKSLR

SEQ ID NO: 4593 - protein, 1371 aa, Artificial Sequence
  SARS-CoV-2/France/GE1977/2020__EPI_ISL_414632 spike protein (1-1211)(T874C_S1055C) LumSynth construct
MFVFLVLLPLVSSQCVNLTTRTQLPPAYTNSFTRGVYYPDKVFRSSVLHSTQDLFLPFFSNVTWFHAIHVSGTNGTKRFDNPVLPFNDGVYFASTEKSNIIRGWIFGTTLDSKTQSLLIVNNATNVVIKVCEFQFCNDPFLGVYYHKNNKSWMESEFRVYSSANNCTFEYVSQPFLMDLEGKQGNFKNLREFVFKNIDGYFKIYSKHTPINLVRDLPQGFSALEPLVDLPIGINITRFQTLLALHRSYLTPGDSSSGWTAGAAAYYVGYLQPRTFLLKYNENGTITDAVDCALDPLSETKCTLKSFTVEKGIYQTSNFRVQPTESIVRFPNITNLCPFGEVFNATRFASVYAWNRKRISNCVADYSVLYNSASFSTFKCYGVSPTKLNDLCFTNVYADSFVIRGDEVRQIAPGQTGKIADYNYKLPDDFTGCVIAWNSNNLDSKVGGNYNYLYRLFRKSNLKPFERDISTEIYQAGSTPCNGVEGFNCYFPLQSYGFQPTNGVGYQPYRVVVLSFELLHAPATVCGPKKSTNLVKNKCVNFNFNGLTGTGVLTESNKKFLPFQQFGRDIADTTDAVRDPQTLEILDITPCSFGGVSVITPGTNTSNQVAVLYQGVNCTEVPVAIHADQLTPTWRVYSTGSNVFQTRAGCLIGAEHVNNSYECDIPIGAGICASYQTQTNSPRRARSVASQSIIAYTMSLGAENSVAYSNNSIAIPTNFTISVTTEILPVSMTKTSVDCTMYICGDSTECSNLLLQYGSFCTQLNRALTGIAVEQDKNTQEVFAQVKQIYKTPPIKDFGGFNFSQILPDPSKPSKRSFIEDLLFNKVTLADAGFIKQYGDCLGDIAARDLICAQKFNGLTVLPPLLTDEMIAQYCSALLAGTITSGWTFGAGAALQIPFAMQMAYRFNGIGVTQNVLYENQKLIANQFNSAIGKIQDSLFSTASALGKLQDVVNQNAQALNTLVKQLSSNFGAISSVLNDILSRLDKVEAEVQIDRLITGRLQSLQTYVTQQLIRAAEIRASANLAATKMSECVLGQSKRVDFCGKGYHLMSFPQCAPHGVVFLHVTYVPAQEKNFTTAPAICHDGKAHFPREGVFVSNGTHWFVTQRNFYEPQIITTDNTFVSGNCDVVIGIVNNTVYDPLQPELDSFKEELDKYFKNHTSPDVDLGDISGINASVVNIQKEIDRLNEVAKNLNESLIDLQELGKYEQYIKGGGSGGGQIYEGKLTAEGLRFGIVASRFNHALVDRLVEGAIDAIVRHGGREEDITLVRVPGSWEIPVAAGELARKEDIDAVIAIGVLIRGATPHFDYIASEVSKGLADLSLELRKPITFGVITADTLEQAIERAGTKHGNKGWEAALSAIEMANLFKSLR

SEQ ID NO: 4594 - protein, 1371 aa, Artificial Sequence
  SARS-CoV-2/Finland/FIN-313/2020__EPI_ISL_414641 spike protein (1-1211)(T874C_S1055C) LumSynth construct
MFVFLVLLPLVSSQCVNLTTRTQLPPAYTNSFTRGVYYPDKVFRSSVLHSTQDLFLPFFSNVTWFHAIHVSGTNGTKRFDNPVLPFNDGVYFASTEKSNIIRGWIFGTTLDSKTQSLLIVNNATNVVIKVCEFQFCNDPFLGVYYHKNNKSWMESEFRVYSSANNCTFEYVSQPFLMDLEGKQGNFKNLREFVFKNIDGYFKIYSKHTPINLVRDLPQGFSALEPLVDLPIGINITRFKTLLALHRSYLTPGDSSSGWTAGAAAYYVGYLQPRTFLLKYNENGTITDAVDCALDPLSETKCTLKSFTVEKGIYQTSNFRVQPTESIVRFPNITNLCPFGEVFNATRFASVYAWNRKRISNCVADYSVLYNSASFSTFKCYGVSPTKLNDLCFTNVYADSFVIRGDEVRQIAPGQTGKIADYNYKLPDDFTGCVIAWNSNNLDSKVGGNYNYLYRLFRKSNLKPFERDISTEIYQAGSTPCNGVEGFNCYFPLQSYGFQPTNGVGYQPYRVVVLSFELLHAPATVCGPKKSTNLVKNKCVNFNFNGLTGTGVLTESNKKFLPFQQFGRDIADTTDAVRDPQTLEILDITPCSFGGVSVITPGTNTSNQVAVLYQGVNCTEVPVAIHADQLTPTWRVYSTGSNVFQTRAGCLIGAEHVNNSYECDIPIGAGICASYQTQTNSPRRARSVASQSIIAYTMSLGAENSVAYSNNSIAIPTNFTISVTTEILPVSMTKTSVDCTMYICGDSTECSNLLLQYGSFCTQLNRALTGIAVEQDKNTQEVFAQVKQIYKTPPIKDFGGFNFSQILPDPSKPSKRSFIEDLLFNKVTLADAGFIKQYGDCLGDIAARDLICAQKFNGLTVLPPLLTDEMIAQYCSALLAGTITSGWTFGAGAALQIPFAMQMAYRFNGIGVTQNVLYENQKLIANQFNSAIGKIQDSLSSTASALGKLQDVVNQNAQALNTLVKQLSSNFGAISSVLNDILSRLDKVEAEVQIDRLITGRLQSLQTYVTQQLIRAAEIRASANLAATKMSECVLGQSKRVDFCGKGYHLMSFPQCAPHGVVFLHVTYVPAQEKNFTTAPAICHDGKAHFPREGVFVSNGTHWFVTQRNFYEPQIITTDNTFVSGNCDVVIGIVNNTVYDPLQPELDSFKEELDKYFKNHTSPDVDLGDISGINASVVNIQKEIDRLNEVAKNLNESLIDLQELGKYEQYIKGGGSGGGQIYEGKLTAEGLRFGIVASRFNHALVDRLVEGAIDAIVRHGGREEDITLVRVPGSWEIPVAAGELARKEDIDAVIAIGVLIRGATPHFDYIASEVSKGLADLSLELRKPITFGVITADTLEQAIERAGTKHGNKGWEAALSAIEMANLFKSLR

SEQ ID NO: 4595 - protein, 1371 aa, Artificial Sequence
  SARS-CoV-2/Netherlands/ZuidHolland_2/2020__EPI_ISL_414556 spike protein (1-1211)(T874C_S1055C) LumSynth construct
MFVFLVLLPLVSSQCVNLTTRTQLPPAYTNSFTRGVYYPDKVFRSSVLHSTQDLFLPFFSNVTWFHAIHVSGTNGTKRFDNPVLPFNDGVYFASTEKSNIIRGWIFGTTLDSKTQSLLIVNNATNVVIKVCEFQFCNDPFLGVYYHKNNKSWMESEFRVYSSANNCTFEYVSQPFLMDLEGKQGNFKNLREFVFKNIDGYFKIYSKHTPINLVRDLPQGFSALEPLVDLPIGINITRFQTLLALHRSYLTPGDSSSGWTAGAAAYYVGYLQPRTFLLKYNENGTITDAVDCALDPLSETKCTLKSFTVEKGIYQTSNFRVQPTESIVRFPNITNLCPFGEVFNATRFASVYAWNRKRISNCVADYSVLYNSASFSTFKCYGVSPTKLNDLCFTNVYADSFVIRGDEVRQIAPGQTGKIADYNYKLPDDFTGCVIAWNSNNLDSKVGGNYNYLYRLFRKSNLKPFERDISTEIYQAGSTPCNGVEGFNCYFPLQSYGFQPTNGVGYQPYRVVVLSFELLHAPATVCGPKKSTNLVKNKCVNFNFNGLTGTGVLTESNKKFLPFQQFGRDIADTTDAVRDPQTLEILDITPCSFGGVSVITPGTNTSNQVAVLYQGVNCTEVPVAIHADQLTPTWRVYSTGSNVFQTRAGCLIGAEHVNNSYECDIPIGAGICASYQTQTNSPRRARSVASQSIIAYTMSLGAENSVAYSNNSIAIPTNFTISVTTEILPVSMTKTSVDCTMYICGDSTECSNLLLQYGSFCTQLNRALTGIALEQDKNTQEVFAQVKQIYKTPPIKDFGGFNFSQILPDPSKPSKRSFIEDLLFNKVTLADAGFIKQYGDCLGDIAARDLICAQKFNGLTVLPPLLTDEMIAQYCSALLAGTITSGWTFGAGAALQIPFAMQMAYRFNGIGVTQNVLYENQKLIANQFNSAIGKIQDSLSSTASALGKLQDVVNQNAQALNTLVKQLSSNFGAISSVLNDILSRLDKVEAEVQIDRLITGRLQSLQTYVTQQLIRAAEIRASANLAATKMSECVLGQSKRVDFCGKGYHLMSFPQCAPHGVVFLHVTYVPAQEKNFTTAPAICHDGKAHFPREGVFVSNGTHWFVTQRNFYEPQIITTDNTFVSGNCDVVIGIVNNTVYDPLQPELDSFKEELDKYFKNHTSPDVDLGDISGINASVVNIQKEIDRLNEVAKNLNESLIDLQELGKYEQYIKGGGSGGGQIYEGKLTAEGLRFGIVASRFNHALVDRLVEGAIDAIVRHGGREEDITLVRVPGSWEIPVAAGELARKEDIDAVIAIGVLIRGATPHFDYIASEVSKGLADLSLELRKPITFGVITADTLEQAIERAGTKHGNKGWEAALSAIEMANLFKSLR

SEQ ID NO: 4596 - protein, 1371 aa, Artificial Sequence
  SARS-CoV-2/USA/WA-UW31/2020__EPI_ISL_414618 spike protein (1-1211)(T874C_S1055C) LumSynth construct
MFVFLVLLPLVSSQCVNLTTRTQLPPAYTNSFTRGVYYPDKVFRSSVLHSTQDLFLPFFSNVTWFHAIHVSGTNGTKRFDNPVLPFNDGVYFASTEKSNIIRGWIFGTTLDSKTQSLLIVNNATNVVIKVCEFQFCNDPFLGVYYHKNNKSWMESEFRVYSSANNCTFEYVSQPFLMDLEGKQGNFKNLREFVFKNIDGYFKIYSKHTPINLVRDLPQGFSALEPLVDLPIGINITRFQTLLALHRSYLTPGDSSSGWTAGAAAYYVGYLQPRTFLLKYNENGTITDAVDCALDPLSETKCTLKSFTVEKGIYQTSNFRVQPTESIVRFPNITNLCPFGEVFNATRFASVYAWNRKRISNCVADYSVLYNSASFSTFKCYGVSPTKLNDLCFTNVYADSFVIRGDEVRQIAPGQTGKIADYNYKLPDDFTGCVIAWNSNNLDSKVGGNYNYLYRLFRKSNLKPFERDISTEIYQAGSTPCNGAEGFNCYFPLQSYGFQPTNGVGYQPYRVVVLSFELLHAPATVCGPKKSTNLVKNKCVNFNFNGLTGTGVLTESNKKFLPFQQFGRDIADTTDAVRDPQTLEILDITPCSFGGVSVITPGTNTSNQVAVLYQDVNCTEVPVAIHADQLTPTWRVYSTGSNVFQTRAGCLIGAEHVNNSYECDIPIGAGICASYQTQTNSPRRARSVASQSIIAYTMSLGAENSVAYSNNSIAIPTNFTISVTTEILPVSMTKTSVDCTMYICGDSTECSNLLLQYGSFCTQLNRALTGIAVEQDKNTQEVFAQVKQIYKTPPIKDFGGFNFSQILPDPSKPSKRSFIEDLLFNKVTLADAGFIKQYGDCLGDIAARDLICAQKFNGLTVLPPLLTDEMIAQYCSALLAGTITSGWTFGAGAALQIPFAMQMAYRFNGIGVTQNVLYENQKLIANQFNSAIGKIQDSLSSTASALGKLQDVVNQNAQALNTLVKQLSSNFGAISSVLNDILSRLDKVEAEVQIDRLITGRLQSLQTYVTQQLIRAAEIRASANLAATKMSECVLGQSKRVDFCGKGYHLMSFPQCAPHGVVFLHVTYVPAQEKNFTTAPAICHDGKAHFPREGVFVSNGTHWFVTQRNFYEPQIITTDNTFVSGNCDVVIGIVNNTVYDPLQPELDSFKEELDKYFKNHTSPDVDLGDISGINASVVNIQKEIDRLNEVAKNLNESLIDLQELGKYEQYIKGGGSGGGQIYEGKLTAEGLRFGIVASRFNHALVDRLVEGAIDAIVRHGGREEDITLVRVPGSWEIPVAAGELARKEDIDAVIAIGVLIRGATPHFDYIASEVSKGLADLSLELRKPITFGVITADTLEQAIERAGTKHGNKGWEAALSAIEMANLFKSLR

SEQ ID NO: 4597 - protein, 1371 aa, Artificial Sequence
  SARS-CoV-2/South Korea/SNU01/2020__EPI_ISL_411929 spike protein (1-1211)(T874C_S1055C) LumSynth construct
MFVFLVLLPLVSSQCVNLTTRTQLPPAYTNSFTRGVYYPDKVFRSSVLHSTQDLFLPFFSNVTWFHAIHVSGTNGTKRFDNPVLPFNDGVYFASTEKSNIIRGWIFGTTLDSKTQSLLIVNNATNVVIKVCEFQFCNDPFLGVYYHKNNKSWMESEFRVYSSANNCTFEYVSQPFLMDLEGKQGNFKNLREFVFKNIDGYFKIYSKHTPINLVRDLPQGFWALEPLVDLPIGINITRFQTLLALHRSYLTPGDSSSGWTAGAAAYYVGYLQPRTFLLKYNENGTITDAVDCALDPLSETKCTLKSFTVEKGIYQTSNFRVQPTESIVRFPNITNLCPFGEVFNATRFASVYAWNRKRISNCVADYSVLYNSASFSTFKCYGVSPTKLNDLCFTNVYADSFVIRGDEVRQIAPGQTGKIADYNYKLPDDFTGCVIAWNSNNLDSKVGGNYNYLYRLFRKSNLKPFERDISTEIYQAGSTPCNGVEGFNCYFPLQSYGFQPTNGVGYQPYRVVVLSFELLHAPATVCGPKKSTNLVKNKCVNFNFNGLTGTGVLTESNKKFLPFQQFGRDIADTTDAVRDPQTLEILDITPCSFGGVSVITPGTNTSNQVAVLYQDVNCTEVPVAIHADQLTPTWRVYSTGSNVFQTRAGCLIGAEHVNNSYECDIPIGAGICASYQTQTNSPRRARSVASQSIIAYTMSLGAENSVAYSNNSIAIPTNFTISVTTEILPVSMTKTSVDCTMYICGDSTECSNLLLQYGSFCTQLNRALTGIAVEQDKNTQEVFAQVKQIYKTPPIKDFGGFNFSQILPDPSKPSKRSFIEDLLFNKVTLADAGFIKQYGDCLGDIAARDLICAQKFNGLTVLPPLLTDEMIAQYCSALLAGTITSGWTFGAGAALQIPFAMQMAYRFNGIGVTQNVLYENQKLIANQFNSAIGKIQDSLSSTASALGKLQDVVNQNAQALNTLVKQLSSNFGAISSVLNDILSRLDKVEAEVQIDRLITGRLQSLQTYVTQQLIRAAEIRASANLAATKMSECVLGQSKRVDFCGKGYHLMSFPQCAPHGVVFLHVTYVPAQEKNFTTAPAICHDGKAHFPREGVFVSNGTHWFVTQRNFYEPQIITTDNTFVSGNCDVVIGIVNNTVYDPLQPELDSFKEELDKYFKNHTSPDVDLGDISGINASVVNIQKEIDRLNEVAKNLNESLIDLQELGKYEQYIKGGGSGGGQIYEGKLTAEGLRFGIVASRFNHALVDRLVEGAIDAIVRHGGREEDITLVRVPGSWEIPVAAGELARKEDIDAVIAIGVLIRGATPHFDYIASEVSKGLADLSLELRKPITFGVITADTLEQAIERAGTKHGNKGWEAALSAIEMANLFKSLR

SEQ ID NO: 4598 - protein, 1371 aa, Artificial Sequence
  SARS-CoV-2/China/WF0004/2020__EPI_ISL_413694 spike protein (1-1211)(T874C_S1055C) LumSynth construct
MFVFLVLLPLVSSQCVNLTTRTQLPPAYTNSFTRGVYYPDKVFRSSVLHSTQDLFLPFFSNVTWFHAIHVSGTNGTKRFDNPVLPFNDGVYFASTEKSNIIRGWIFGTTLDSKTQSLLIVNNATNVVIKVCEFQFCNDPFLGVYYHKNNKSWTESEFRVYSSANNCTFEYVSQPFLMDLEGKQGNFKNLREFVFKNIDGYFKIYSKHTPINLVRDLPQGFSALEPLVDLPIGINITRFQTLLALHRSYLTPGDSSSGWTAGAAAYYVGYLQPRTFLLKYNENGTITDAVDCALDPLSETKCTLKSFTVEKGIYQTSNFRVQPTESIVRFPNITNLCPFGEVFNATRFASVYAWNRKRISNCVADYSVLYNSASFSTFKCYGVSPTKLNDLCFTNVYADSFVIRGDEVRQIAPGQTGKIADYNYKLPDDFTGCVIAWNSNNLDSKVGGNYNYLYRLFRKSNLKPFERDISTEIYQAGSTPCNGVEGFNCYFPLQSYGFQPTNGVGYQPYRVVVLSFELLHAPATVCGPKKSTNLVKNKCVNFNFNGLTGTGVLTESNKKFLPFQQFGRDIADTTDAVRDPQTLEILDITPCSFGGVSVITPGTNTSNQVAVLYQDVNCTEVPVAIHADQLTPTWRVYSTGSNVFQTRAGCLIGAEHVNNSYECDIPIGAGICASYQTQTNSPRRARSVASQSIIAYTMSLGAENSVAYSNNSIAIPTNFTISVTTEILPVSMTKTSVDCTMYICGDSTECSNLLLQYGSFCTQLNRALTGIAVEQDKNTQEVFAQVKQIYKTPPIKDFGGFNFSQILPDPSKPSKRSFIEDLLFNKVTLADAGFIKQYGDCLGDIAARDLICAQKFNGLTVLPPLLTDEMIAQYCSALLAGTITSGWTFGAGAALQIPFAMQMAYRFNGIGVTQNVLYENQKLIANQFNSAIGKIQDSLSSTASALGKLQDVVNQNAQALNTLVKQLSSNFGAISSVLNDILSRLDKVEAEVQIDRLITGRLQSLQTYVTQQLIRAAEIRASANLAATKMSECVLGQSKRFDFCGKGYHLMSFPQCAPHGVVFLHVTYVPAQEKNFTTAPAICHDGKAHFPREGVFVSNGTHWFVTQRNFYEPQIITTDNTFVSGNCDVVIGIVNNTVYDPLQPELDSFKEELDKYFKNHTSPDVDLGDISGINASVVNIQKEIDRLNEVAKNLNESLIDLQELGKYEQYIKGGGSGGGQIYEGKLTAEGLRFGIVASRFNHALVDRLVEGAIDAIVRHGGREEDITLVRVPGSWEIPVAAGELARKEDIDAVIAIGVLIRGATPHFDYIASEVSKGLADLSLELRKPITFGVITADTLEQAIERAGTKHGNKGWEAALSAIEMANLFKSLR

SEQ ID NO: 4599 - protein, 1371 aa, Artificial Sequence
  SARS-CoV-2/China/WF0028/2020__EPI_ISL_413791 spike protein (1-1211)(T874C_S1055C) LumSynth construct
MFVFLVLLPLVSSQCVNLTTRTQLPPAYTNSFTRGVYYPDKVFRSSVLHSTQDLFLPFFSNVTWFHAIHVSGTNGTKRFDNPVLPFNDGVYFASTEKSNIIRGWIFGTTLDSKTQSLLIVNNATNVVIKVCEFQFCNDPFLGVYYHKNNKSWMESEFRVYSSANNCTFEYVSQPFLMDLEGKQGNFKNLREFVFKNIDGYFKIYSKHTPINLVRDLPQGFSALEPLVDLPIGINITRFQTLLALHRSYLTPGDSSSGWTAGAAAYYVGYLQPRTFLLKYNENGTITDAVDCALDPLSETKCTLKSFTVEKGIYQTSNFRVQPTESIVRFPNITNLCPFGEVFNATRFASVYAWNRKRISNCVADYSVLYNSASFSTFKCYGVSPTKLNDLCFTNVYADSFVIRGDEVRQIAPGQTGKIADYNYKLPDDFTGCVIAWNSNNLDSKVGGNYNYLYRLFRKSNLKPFERDISTEIYQAGSTPCNGVEGFNCYFPLQSYGFQPTNGVGYQPYRVVVLSFELLHAPATVCGPKKSTNLVKNKCVNFNFNGLTGTGVLTESNKKFLPFQQFGRDIADTTDAVRDPQTLEILDITPCSFGGVSVITPGTNTSNQVAVLYQDVNCTEVPVAIHADQLTPTWRVYSTGSNVFQTRAGCLIGAEHVNNSYECDIPIGAGICASYQTQTNSPRRARSVASQSIIAYTMSLGAENSVAYSNNSIAIPTNFTISVTTEILPVSMTKTSVDCTMYICGDSTECSNLLLQYGSFCTQLNRALTGIAVEQDKNTQEVFAQVKQIYKTPPIKDFGGFNFSQILPDPSKPSKRSFIEDLLFNKVTLADAGFIKQYGDCLGDIAARDLICAQKFNGLTVLPPLLTDEMIAQYCSALLAGTITSGWTFGAGAALQIPFAMQMAYRFNGIGVTQNVLYENQKLIANQFNSAIGKIQDSLSSTASALGKLQDVVNQNAQALNTLVKQLSSNFGAISSVLNDILSRLDKVEAEVQIDRLITGRLQSLQTYVTQQLIRAAEIRASANLAATKMSECVLGQSKRVDFCGKGYHLMSFPQCAPHGVVFLHVTYVPAQEKNFTTAPAICHDGKAHFPREGVFVSNGTHWFVTQRNFYEPQIITTDNTFVSGNCDVVIGIVNNTVYDPLQPELESFKEELDKYFKNHTSPDVDLGDISGINASVVNIQKEIDRLNEVAKNLNESLIDLQELGKYEQYIKGGGSGGGQIYEGKLTAEGLRFGIVASRFNHALVDRLVEGAIDAIVRHGGREEDITLVRVPGSWEIPVAAGELARKEDIDAVIAIGVLIRGATPHFDYIASEVSKGLADLSLELRKPITFGVITADTLEQAIERAGTKHGNKGWEAALSAIEMANLFKSLR

SEQ ID NO: 4600 - protein, 1371 aa, Artificial Sequence
  SARS-CoV-2/2019-nCoV/USA-CruiseA-18/2020__MT159716.1 spike protein (1-1211)(T874C_S1055C) LumSynth construct
MFVFLVLLPLVSSQCVNLTTRTQLPPAYTNSFTRGVYYPDKVFRSSVLHSTQDLFLPFFSNVTWFHAIHVSGTNGTKRFDNPVLPFNDGVYFASTEKSNIIRGWIFGTTLDSKTQSLLIVNNATNVVIKVCEFQFCNDPFLGVYYHKNNKSWMESELRVYSSANNCTFEYVSQPFLMDLEGKQGNFKNLREFVFKNIDGYFKIYSKHTPINLVRDLPQGFSALEPLVDLPIGINITRFQTLLALHRSYLTPGDSSSGWTAGAAAYYVGYLQPRTFLLKYNENGTITDAVDCALDPLSETKCTLKSFTVEKGIYQTSNFRVQPTESIVRFPNITNLCPFGEVFNATRFASVYAWNRKRISNCVADYSVLYNSASFSTFKCYGVSPTKLNDLCFTNVYADSFVIRGDEVRQIAPGQTGKIADYNYKLPDDFTGCVIAWNSNNLDSKVGGNYNYLYRLFRKSNLKPFERDISTEIYQAGSTPCNGVEGFNCYFPLQSYGFQPTNGVGYQPYRVVVLSFELLHAPATVCGPKKSTNLVKNKCVNFNFNGLTGTGVLTESNKKFLPFQQFGRDIADTTDAVRDPQTLEILDITPCSFGGVSVITPGTNTSNQVAVLYQDVNCTEVPVAIHADQLTPTWRVYSTGSNVFQTRAGCLIGAEHVNNSYECDIPIGAGICASYQTQTNSPRRARSVASQSIIAYTMSLGAENSVAYSNNSIAIPTNFTISVTTEILPVSMTKTSVDCTMYICGDSTECSNLLLQYGSFCTQLNRALTGIAVEQDKNTQEVFAQVKQIYKTPPIKDFGGFNFSQILPDPSKPSKRSFIEDLLFNKVTLADAGFIKQYGDCLGDIAARDLICAQKFNGLTVLPPLLTDEMIAQYCSALLAGTITSGWTFGAGAALQIPFAMQMAYRFNGIGVTQNVLYENQKLIANQFNSAIGKIQDSLSSTASALGKLQDVVNQNAQALNTLVKQLSSNFGAISSVLNDILSRLDKVEAEVQIDRLITGRLQSLQTYVTQQLIRAAEIRASANLAATKMSECVLGQSKRVDFCGKGYHLMSFPQCAPHGVVFLHVTYVPAQEKNFTTAPAICHDGKAHFPREGVFVSNGTHWFVTQRNFYEPQIITTDNTFVSGNCDVVIGIVNNTVYDPLQPELDSFKEELDKYFKNHTSPDVDLGDISGINASVVNIQKEIDRLNEVAKNLNESLIDLQELGKYEQYIKGGGSGGGQIYEGKLTAEGLRFGIVASRFNHALVDRLVEGAIDAIVRHGGREEDITLVRVPGSWEIPVAAGELARKEDIDAVIAIGVLIRGATPHFDYIASEVSKGLADLSLELRKPITFGVITADTLEQAIERAGTKHGNKGWEAALSAIEMANLFKSLR

SEQ ID NO: 4601 - protein, 1371 aa, Artificial Sequence
  SARS-CoV-2/SARS-CoV-2/Yunnan-01/human/2020/CHN__MT049951.1 spike protein (1-1211)(T874C_S1055C) LumSynth construct
MFVFLVLLPLVSSQCVNLTTRTQLPPANTNSFTRGVYYPDKVFRSSVLHSTQDLFLPFFSNVTWFHAIHVSGTNGTKRFDNPVLPFNDGVYFASTEKSNIIRGWIFGTTLDSKTQSLLIVNNATNVVIKVCEFQFCNDPFLGVYYHKNNKSWMESEFRVYSSANNCTFEYVSQPFLMDLEGKQGNFKNLREFVFKNIDGYFKIYSKHTPINLVRDLPQGFSALEPLVDLPIGINITRFQTLLALHRSYLTPGDSSSGWTAGAAAYYVGYLQPRTFLLKYNENGTITDAVDCALDPLSETKCTLKSFTVEKGIYQTSNFRVQPTESIVRFPNITNLCPFGEVFNATRFASVYAWNRKRISNCVADYSVLYNSASFSTFKCYGVSPTKLNDLCFTNVYADSFVIRGDEVRQIAPGQTGKIADYNYKLPDDFTGCVIAWNSNNLDSKVGGNYNYLYRLFRKSNLKPFERDISTEIYQAGSTPCNGVEGFNCYFPLQSYGFQPTNGVGYQPYRVVVLSFELLHAPATVCGPKKSTNLVKNKCVNFNFNGLTGTGVLTESNKKFLPFQQFGRDIADTTDAVRDPQTLEILDITPCSFGGVSVITPGTNTSNQVAVLYQDVNCTEVPVAIHADQLTPTWRVYSTGSNVFQTRAGCLIGAEHVNNSYECDIPIGAGICASYQTQTNSPRRARSVASQSIIAYTMSLGAENSVAYSNNSIAIPTNFTISVTTEILPVSMTKTSVDCTMYICGDSTECSNLLLQYGSFCTQLNRALTGIAVEQDKNTQEVFAQVKQIYKTPPIKDFGGFNFSQILPDPSKPSKRSFIEDLLFNKVTLADAGFIKQYGDCLGDIAARDLICAQKFNGLTVLPPLLTDEMIAQYCSALLAGTITSGWTFGAGAALQIPFAMQMAYRFNGIGVTQNVLYENQKLIANQFNSAIGKIQDSLSSTASALGKLQDVVNQNAQALNTLVKQLSSNFGAISSVLNDILSRLDKVEAEVQIDRLITGRLQSLQTYVTQQLIRAAEIRASANLAATKMSECVLGQSKRVDFCGKGYHLMSFPQCAPHGVVFLHVTYVPAQEKNFTTAPAICHDGKAHFPREGVFVSNGTHWFVTQRNFYEPQIITTDNTFVSGNCDVVIGIVNNTVYDPLQPELDSFKEELDKYFKNHTSPDVDLGDISGINASVVNIQKEIDRLNEVAKNLNESLIDLQELGKYEQYIKGGGSGGGQIYEGKLTAEGLRFGIVASRFNHALVDRLVEGAIDAIVRHGGREEDITLVRVPGSWEIPVAAGELARKEDIDAVIAIGVLIRGATPHFDYIASEVSKGLADLSLELRKPITFGVITADTLEQAIERAGTKHGNKGWEAALSAIEMANLFKSLR

SEQ ID NO: 4602 - protein, 1371 aa, Artificial Sequence
  SARS-CoV-2/USA/WA-UW292/2020__EPI_ISL_418077 spike protein (1-1211)(T874C_S1055C) LumSynth construct
MFVFLVLLPLVSSQCVNLTTRTQLPPAYTNSFTRGVYYPDKVFRSSVLHSTQDLFLPFFSNVTWFHAIHVSGTNGTKRFDNPVLPFNDGVYFASTEKSNIIRGWIFGTTLDSKTQSLLIVNNATNVVIKVCEFQFCNDPFLGVYYHKNNKSWMESEFRVYSSANNCTFEYVSQPFLMDLEGKQGNFKNLREFVFKNIDGYFKIYSKHTPINLVRDLPQGFSALEPLVDLPIGINITRFQTLLALHRSYLTPGDSSSGWTAGAAAYYVGYLQPRTFLLKYNENGTITDAVDCALDPLSETKCTLKSFTVEKGIYQTSNFRVQPTESIVRFPNITNLCPFGEVFNATRFASVYAWNRKRISNCVADYSVLYNSASFSTFKCYGVSPTKLNDLCFTNVYADSFVIRGDEVRQIAPGQTGKIADYNYKLPDDFTGCVIAWNSNNLDSKVGGNYNYLYRLFRKSNLKPFERDISTEIYQASSTPCNGVEGFNCYFPLQSYGFQPTNGVGYQPYRVVVLSFELLHAPATVCGPKKSTNLVKNKCVNFNFNGLTGTGVLTESNKKFLPFQQFGRDIADTTDAVRDPQTLEILDITPCSFGGVSVITPGTNTSNQVAVLYQDVNCTEVPVAIHADQLTPTWRVYSTGSNVFQTRAGCLIGAEHVNNSYECDIPIGAGICASYQTQTNSPRRARSVASQSIIAYTMSLGAENSVAYSNNSIAIPTNFTISVTTEILPVSMTKTSVDCTMYICGDSTECSNLLLQYGSFCTQLNRALTGIAVEQDKNTQEVFAQVKQIYKTPPIKDFGGFNFSQILPDPSKPSKRSFIEDLLFNKVTLADAGFIKQYGDCLGDIAARDLICAQKFNGLTVLPPLLTDEMIAQYCSALLAGTITSGWTFGAGAALQIPFAMQMAYRFNGIGVTQNVLYENQKLIANQFNSAIGKIQDSLSSTASALGKLQDVVNQNAQALNTLVKQLSSNFGAISSVLNDILSRLDKVEAEVQIDRLITGRLQSLQTYVTQQLIRAAEIRASANLAATKMSECVLGQSKRVDFCGKGYHLMSFPQCAPHGVVFLHVTYVPAQEKNFTTAPAICHDGKAHFPREGVFVSNGTHWFVTQRNFYEPQIITTDNTFVSGNCDVVIGIVNNTVYDPLQPELDSFKEELDKYFKNHTSPDVDLGDISGINASVVNIQKEIDRLNEVAKNLNESLIDLQELGKYEQYIKGGGSGGGQIYEGKLTAEGLRFGIVASRFNHALVDRLVEGAIDAIVRHGGREEDITLVRVPGSWEIPVAAGELARKEDIDAVIAIGVLIRGATPHFDYIASEVSKGLADLSLELRKPITFGVITADTLEQAIERAGTKHGNKGWEAALSAIEMANLFKSLR

SEQ ID NO: 4603 - protein, 1371 aa, Artificial Sequence
  SARS-CoV-2/Iceland/192/2020__EPI_ISL_417819 spike protein (1-1211)(T874C_S1055C) LumSynth construct
MFVFFVLLPLVSSQCVNLTTRTQLPPAYTNSFTRGVYYPDKVFRSSVLHSTQDLFLPFFSNVTWFHAIHVSGTNGTKRFDNPVLPFNDGVYFASTEKSNIIRGWIFGTTLDSKTQSLLIVNNATNVVIKVCEFQFCNDPFLGVYYHKNNKSWMESEFRVYSSANNCTFEYVSQPFLMDLEGKQGNFKNLREFVFKNIDGYFKIYSKHTPINLVRDLPQGFSALEPLVDLPIGINITRFQTLLALHRSYLTPGDSSSGWTAGAAAYYVGYLQPRTFLLKYNENGTITDAVDCALDPLSETKCTLKSFTVEKGIYQTSNFRVQPTESIVRFPNITNLCPFGEVFNATRFASVYAWNRKRISNCVADYSVLYNSASFSTFKCYGVSPTKLNDLCFTNVYADSFVIRGDEVRQIAPGQTGKIADYNYKLPDDFTGCVIAWNSNNLDSKVGGNYNYLYRLFRKSNLKPFERDISTEIYQAGSTPCNGVEGFNCYFPLQSYGFQPTNGVGYQPYRVVVLSFELLHAPATVCGPKKSTNLVKNKCVNFNFNGLTGTGVLTESNKKFLPFQQFGRDIADTTDAVRDPQTLEILDITPCSFGGVSVITPGTNTSNQVAVLYQGVNCTEVPVAIHADQLTPTWRVYSTGSNVFQTRAGCLIGAEHVNNSYECDIPIGAGICASYQTQTNSPRRARSVASQSIIAYTMSLGAENSVAYSNNSIAIPTNFTISVTTEILPVSMTKTSVDCTMYICGDSTECSNLLLQYGSFCTQLNRALTGIAVEQDKNTQEVFAQVKQIYKTPPIKDFGGFNFSQILPDPSKPSKRSFIEDLLFNKVTLADAGFIKQYGDCLGDIAARDLICAQKFNGLTVLPPLLTDEMIAQYCSALLAGTITSGWTFGAGAALQIPFAMQMAYRFNGIGVTQNVLYENQKLIANQFNSAIGKIQDSLSSTASALGKLQDVVNQNAQALNTLVKQLSSNFGAISSVLNDILSRLDKVEAEVQIDRLITGRLQSLQTYVTQQLIRAAEIRASANLAATKMSECVLGQSKRVDFCGKGYHLMSFPQCAPHGVVFLHVTYVPAQEKNFTTAPAICHDGKAHFPREGVFVSNGTHWFVTQRNFYEPQIITTDNTFVSGNCDVVIGIVNNTVYDPLQPELDSFKEELDKYFKNHTSPDVDLGDISGINASVVNIQKEIDRLNEVAKNLNESLIDLQELGKYEQYIKGGGSGGGQIYEGKLTAEGLRFGIVASRFNHALVDRLVEGAIDAIVRHGGREEDITLVRVPGSWEIPVAAGELARKEDIDAVIAIGVLIRGATPHFDYIASEVSKGLADLSLELRKPITFGVITADTLEQAIERAGTKHGNKGWEAALSAIEMANLFKSLR

SEQ ID NO: 4604 - protein, 1371 aa, Artificial Sequence
  SARS-CoV-2/Belgium/ULG-6939/2020__EPI_ISL_417020 spike protein (1-1211)(T874C_S1055C) LumSynth construct
MFVFLVLLPLVSSQCVNLTTRTQLPPAYTNSFTRGVYYPDKVFRSSVLHSTQDLFLPFFSNVTWFHAIHVSGTNGTKRFDNPVLPFNDGVYFASTEKSNIIRGWIFGTTLDSKTQSLLIVNNATNVVIKVCEFQFCNDPFLGVYYHKNNKSWMESEFRVYSSANNCTFEYVSQPFLMDLEGKQGNFKNLREFVFKNIDGYFKIYSKHTPINLVRDLPQGFSALEPLVDLPIGINITRFQTLLALHRSYLTPGDSSSGWTAGAAAYYVGYLQPRTFLLKYNENGTITDAVDCALDPLSETKCTLKSFTVEKGIYQTSNFRVQPTESIVRFPNITNLCPFGEVFNATRFASVYAWNRKRISNCVADYSVLYNSASFSTFKCYGVSPTKLNDLCFTNVYADSFVIRGDEVRQIAPGQTGKIADYNYKLPDDFTGCVIAWNSNNLDSKVGGNYNYLYRLFRKSNLKPFERDISTEIYQAGSTPCNGVEGFNCYFPLQSYGFQPTNGVGYQPYRVVVLSFELLHAPATVCGPKKSTNLVKNKCVNFNFNGLTGTGVLTESNKKFLPFQQFGRDIADTTDAVRDPQTLEILDITPCSFGGVSVITPGTNTSNQVAVLYQGVNCTEVPVAIHADQLTPTWRVYSTGSNVFQTRAGCLIGAEHVNNSYECDIPIGAGICASYQTQTNSPRRARSVASQSIIAYTMSLGAENSVVYSNNSIAIPTNFTISVTTEILPVSMTKTSVDCTMYICGDSTECSNLLLQYGSFCTQLNRALTGIAVEQDKNTQEVFAQVKQIYKTPPIKDFGGFNFSQILPDPSKPSKRSFIEDLLFNKVTLADAGFIKQYGDCLGDIAARDLICAQKFNGLTVLPPLLTDEMIAQYCSALLAGTITSGWTFGAGAALQIPFAMQMAYRFNGIGVTQNVLYENQKLIANQFNSAIGKIQDSLSSTASALGKLQDVVNQNAQALNTLVKQLSSNFGAISSVLNDILSRLDKVEAEVQIDRLITGRLQSLQTYVTQQLIRAAEIRASANLAATKMSECVLGQSKRVDFCGKGYHLMSFPQCAPHGVVFLHVTYVPAQEKNFTTAPAICHDGKAHFPREGVFVSNGTHWFVTQRNFYEPQIITTDNTFVSGNCDVVIGIVNNTVYDPLQPELDSFKEELDKYFKNHTSPDVDLGDISGINASVVNIQKEIDRLNEVAKNLNESLIDLQELGKYEQYIKGGGSGGGQIYEGKLTAEGLRFGIVASRFNHALVDRLVEGAIDAIVRHGGREEDITLVRVPGSWEIPVAAGELARKEDIDAVIAIGVLIRGATPHFDYIASEVSKGLADLSLELRKPITFGVITADTLEQAIERAGTKHGNKGWEAALSAIEMANLFKSLR

SEQ ID NO: 4605 - protein, 1371 aa, Artificial Sequence
  SARS-CoV-2/France/HF2496/2020__EPI_ISL_418231 spike protein (1-1211)(T874C_S1055C) LumSynth construct
MFVFLVLLPLVSSQCVNLTTRTQLPPAYTNSFTRGVYYPDKVFRSSVLHSTQDLFLPFFSNVTWFHAIHVSGTNGTKRFDNPVLPFNDGVYFASTEKSNIIRGWIFGTTLDSKTQSLLIVNNATNVVIKVCEFQFCNDPFLGVYYHKNNKSWMESEFRVYSSANNCTFEYVSQPFLMDLEGKQGNFKNLREFVFKNIDGYFKIYSKHTPINLVRDLPQGFSALEPLVDLPIGINITRFQTLLALHRSYLTPGDSSSGWTAGAAAYYVGYLQPRTFLLKYNENGTITDAVDCALDPLSETKCTLKSFTVEKGIYQTSNFRVQPTESIVRFPNITNLCPFGEVFNATRFASVYAWNRKRISNCVADYSVLYNSASFSTFKCYGVSPTKLNDLCFTNVYADSFVIRGDEVRQIAPGQTGKIADYNYKLPDDFTGCVIAWNSNNLDSKVGGNYNYLYRLFRKSNLKPFERDISTEIYQAGSTPCNGVEGFNCYFPLQSYGFQPTNGVGYQPYRVVVLSFELLHAPATVCGPKKSTNLVKNKCVNFNFNGLTGTGVLTESNKKFLPFQQFGRDIADTTDAVRDPQTLEILDITPCSFGGVSVITPGTNTSNQVAVLYQGVNCTEVPVAIHADQLTPTWRVYSTGSNVFQTRAGCLIGAEHVNNSYECDIPIGAGICASYQTQTNSPRRARSVASQSIIAYTMSLGAENSVAYSNNSIAIPTNFTISVTTEILPVSMTKTSVDCTMYICGDSTECSNLLLQYGSFCTQLNRALTGIAVEQDKNTQEVFAQVKQIYKTPPIKDFGGFNFSQILPDPSKPSKRSFIEDLLFNKVTLADAGFIKQYGDCLGDIVARDLICAQKFNGLTVLPPLLTDEMIAQYCSALLAGTITSGWTFGAGAALQIPFAMQMAYRFNGIGVTQNVLYENQKLIANQFNSAIGKIQDSLSSTASALGKLQDVVNQNAQALNTLVKQLSSNFGAISSVLNDILSRLDKVEAEVQIDRLITGRLQSLQTYVTQQLIRAAEIRASANLAATKMSECVLGQSKRVDFCGKGYHLMSFPQCAPHGVVFLHVTYVPAQEKNFTTAPAICHDGKAHFPREGVFVSNGTHWFVTQRNFYEPQIITTDNTFVSGNCDVVIGIVNNTVYDPLQPELDSFKEELDKYFKNHTSPDVDLGDISGINASVVNIQKEIDRLNEVAKNLNESLIDLQELGKYEQYIKGGGSGGGQIYEGKLTAEGLRFGIVASRFNHALVDRLVEGAIDAIVRHGGREEDITLVRVPGSWEIPVAAGELARKEDIDAVIAIGVLIRGATPHFDYIASEVSKGLADLSLELRKPITFGVITADTLEQAIERAGTKHGNKGWEAALSAIEMANLFKSLR

SEQ ID NO: 4606 - protein, 1371 aa, Artificial Sequence
  SARS-CoV-2/USA/WA-UW291/2020__EPI_ISL_418076 spike protein (1-1211)(T874C_S1055C) LumSynth construct
MFVFLVLLPLVSSQCVNLTTRTQLPPAYTNSFTRGVYYPDKVFRSSVLHSTQDLFLPFFSNVTWFHAIHVSGTNGTKRFDNPVLPFNDGVYFASTEKSNIIRGWIFGTTLDSKTQSLLIVNNATNVVIKVCEFQFCNDPFLGVYYHKNNKSWMESEFRVYSSANNCTFEYVSQPFLMDLEGKQGNFKNLREFVFKNIDGYFKIYSKHTPINLVRDLPQGFSALEPLVDLPIGINITRFQTLLALHRSYLTPGDSSSGWTAGAAAYYVGYLQPRTFLLKYNENGTITDAVDCALDPLSETKCTLKSFTVEKGIYQTSNFRVQPTESIVRFPNITNLCPFGEVFNATRFASVYAWNRKRISNCVADYSVLYNSASFSTFKCYGVSPTKLNDLCFTNVYADSFVIRGDEVRQIAPGQTGKIADYNYKLPDDFTGCVIAWNSNNLDSKVGGNYNYLYRLFRKSNLKPFERDISTEIYQAGSTPCNGVEGFNCYFPLQSYGFQPTNGVGYQPYRVVVLSFELLHAPATVCGPKKSTNLVKNKCVNFNFNGLTGTGVLTESNKKFLPFQQFGRDIADTTDAVRDPQTLEILDITPCSFGGVSVITPGTNTSNQVAVLYQGVNCTEVPVAIHADQLTPTWRVYSTGSNVFQTRAGCLIGAEHVNNSYECDIPIGAGICASYQTQTNSPRRARSVASQSIIAYTMSLGAENSVAYSNNSIAIPTNFTISVTTEILPVSMTKTSVDCTMYICGDSTECSNLLLQYGSFCTQLNRALTGIAVEQDKNTQEVFAQVKQIYKTPPIKDFGGFNFSQILPDPSKPSKRSFIEDLLFNKVTLADAGFIKQYGDCLGDIAARDLICAQKFNGLTVLPPLLTDEMIAQYCSALLAGTITSGWTFGAGAALQIPFAMQMAYRFNGIGVTQNVLYENQKLIANQFNSAIGKIQYSLSSTASALGKLQDVVNQNAQALNTLVKQLSSNFGAISSVLNDILSRLDKVEAEVQIDRLITGRLQSLQTYVTQQLIRAAEIRASANLAATKMSECVLGQSKRVDFCGKGYHLMSFPQCAPHGVVFLHVTYVPAQEKNFTTAPAICHDGKAHFPREGVFVSNGTHWFVTQRNFYEPQIITTDNTFVSGNCDVVIGIVNNTVYDPLQPELDSFKEELDKYFKNHTSPDVDLGDISGINASVVNIQKEIDRLNEVAKNLNESLIDLQELGKYEQYIKGGGSGGGQIYEGKLTAEGLRFGIVASRFNHALVDRLVEGAIDAIVRHGGREEDITLVRVPGSWEIPVAAGELARKEDIDAVIAIGVLIRGATPHFDYIASEVSKGLADLSLELRKPITFGVITADTLEQAIERAGTKHGNKGWEAALSAIEMANLFKSLR

SEQ ID NO: 4607 - protein, 1371 aa, Artificial Sequence; identical to SEQ ID NO: 4570
  SARS-CoV-2/Portugal/PT0034/2020__EPI_ISL_418019 spike protein (1-1211)(T874C_S1055C) LumSynth construct

SEQ ID NO: 4608 - protein, 1371 aa, Artificial Sequence
  SARS-CoV-2/Iceland/202/2020__EPI_ISL_417750 spike protein (1-1211)(T874C_S1055C) LumSynth construct
MFVFLVLLPLVSSQCVNLTTRTQLPPAYTNSFTRGVYYPDKVFRSSVLHSTQDLFLPFFSNVTWFHAIHVSGTNGTKRFDNPVLPFNDGVYFASTEKSNIIRGWIFGTTLDSKTQSLLIVNNATNVVIKVCEFQFCNDPFLGVYYHKNNKSWMESEFRVYSSANNCTFEYVSQPFLMDLEGKQGNFKNLREFVFKNIDGYFKIYSKHTPINLVRDLPQGFSALEPLVDLPIGINITRFQTLLALHRSYLTPGDSSSGWTAGAAAYYVGYLQPRTFLLKYNENGTITDAVDCALDPLSETKCTLKSFTVEKGIYQTSNFRVQPTESIVRFPNITNLCPFGEVFNATRFASVYAWNRKRISNCVADYSVLYNSASFSTFKCYGVSPTKLNDLCFTNVYADSFVIRGDEVRQIAPGQTGKIADYNYKLPDDFTGCVIAWNSNNLDSKVGGNYNYLYRLFRKSNLKPFERDISTEIYQAGSTPCNGVEGFNCYFPLQSYGFQPTNGVGYQPYRVVVLSFELLHAPATVCGPKKSTNLVKNKCVNFNFNGLTGTGVLTESNKKFLPFQQFGRDIADTTDAVRDPQTLEILDITPCSFGGVSVITPGTNTSNQVAVLYQDVNCTEVPVAIHADQLTPTWRVYSTGSNVFQTRAGCLIGAEHVNNSYECDIPIGAGICASYQTQTNSPRRARSVASQSIIAYTMSLGAENSVAYSNNSIAIPTNFTISVTTEILPVSMTKTSVDCTMYICGDSTECSNLLLQYGSFCTQLNRALTGIAVEQDKNTQEVFAQVKQIYKTPPIKDFGGFNFSQILPDPSKPSKRSFIEDLLFNKVTLADAGFIKQYGDCLGDIAARDLICAQKFNGLTVLPPLLTDEMIAQYCSALLAGTITSGWTFGAGAALQIPFAMQMAYRFNGIGVTQNVLYENQKLIANQFNSAIGKIQDSLSSTASALGKLQDVVNQNAQALNTLVKQLSSNFGAISSVLNDILSRLDKVEAEVQIDRLITGRLQSLQTYVTQQLIRAAEIRASANLAATKMSECVLGQSKRVDFCGKGYHLMSFPQCAPHGVVFLHVTYVPAQEKNFTTAPAICHDGKAHFPREGVFVSNGTHWFVTQRNFYEPQIITTDNTFVSGNCDVVIGIVNNTVYDPLQPELDSFKEELDKYFKNHTSPDVDLGDIPGINASVVNIQKEIDRLNEVAKNLNESLIDLQELGKYEQYIKGGGSGGGQIYEGKLTAEGLRFGIVASRFNHALVDRLVEGAIDAIVRHGGREEDITLVRVPGSWEIPVAAGELARKEDIDAVIAIGVLIRGATPHFDYIASEVSKGLADLSLELRKPITFGVITADTLEQAIERAGTKHGNKGWEAALSAIEMANLFKSLR

SEQ ID NO: 4609 - protein, 1371 aa, Artificial Sequence
  SARS-CoV-2/USA/WA-UW261/2020__EPI_ISL_418046 spike protein (1-1211)(T874C_S1055C) LumSynth construct
MFVFLVLLPLVSSQCVNLTTRTQLPPAYTNSFTRGVYYPDKVFRSSVLHSTQDLFLPFFSNVTWFHAIHVSGTNGTKRFDNPVLPFNDGVYFASTEKSNIIRGWIFGTTLDSKTQSLLIVNNATNVVIKVCEFQFCNDPFLGVYYHKNNKSWMESEFRVYSSANNCTFEYVSQPFLMDLEGKQGNFKNLREFVFKNIDGYFKIYSKHTPINLVRDLPQGFSALEPLVDLPIGINITRFQTLLALHRSYLTPGDSSSGWTAGAAAYYVGYLQPRTFLLKYNENGTITDAVDCALDPLSETKCTLKSFTVEKGIYQTSNFRVQPTESIVRFPNITNLCPFGEVFNATRFTSVYAWNRKRISNCVADYSVLYNSASFSTFKCYGVSPTKLNDLCFTNVYADSFVIRGDEVRQIAPGQTGKIADYNYKLPDDFTGCVIAWNSNNLDSKVGGNYNYLYRLFRKSNLKPFERDISTEIYQAGSTPCNGVEGFNCYFPLQSYGFQPTNGVGYQPYRVVVLSFELLHAPATVCGPKKSTNLVKNKCVNFNFNGLTGTGVLTESNKKFLPFQQFGRDIADTTDAVRDPQTLEILDITPCSFGGVSVITPGTNTSNQVAVLYQDVNCTEVPVAIHADQLTPTWRVYSTGSNVFQTRAGCLIGAEHVNNSYECDIPIGAGICASYQTQTNSPRRARSVASQSIIAYTMSLGAENSVAYSNNSIAIPTNFTISVTTEILPVSMTKTSVDCTMYICGDSTECSNLLLQYGSFCTQLNRALTGIAVEQDKNTQEVFAQVKQIYKTPPIKDFGGFNFSQILPDPSKPSKRSFIEDLLFNKVTLADAGFIKQYGDCLGDIAARDLICAQKFNGLTVLPPLLTDEMIAQYCSALLAGTITSGWTFGAGAALQIPFAMQMAYRFNGIGVTQNVLYENQKLIANQFNSAIGKIQDSLSSTASALGKLQDVVNQNAQALNTLVKQLSSNFGAISSVLNDILSRLDKVEAEVQIDRLITGRLQSLQTYVTQQLIRAAEIRASANLAATKMSECVLGQSKRVDFCGKGYHLMSFPQCAPHGVVFLHVTYVPAQEKNFTTAPAICHDGKAHFPREGVFVSNGTHWFVTQRNFYEPQIITTDNTFVSGNCDVVIGIVNNTVYDPLQPELDSFKEELDKYFKNHTSPDVDLGDISGINASVVNIQKEIDRLNEVAKNLNESLIDLQELGKYEQYIKGGGSGGGQIYEGKLTAEGLRFGIVASRFNHALVDRLVEGAIDAIVRHGGREEDITLVRVPGSWEIPVAAGELARKEDIDAVIAIGVLIRGATPHFDYIASEVSKGLADLSLELRKPITFGVITADTLEQAIERAGTKHGNKGWEAALSAIEMANLFKSLR

SEQ ID NO: 4610 - protein, 1371 aa, Artificial Sequence
  SARS-CoV-2/Portugal/PT0035/2020__EPI_ISL_418020 spike protein (1-1211)(T874C_S1055C) LumSynth construct
MFVFLVLLPLVSSQCVNLTTRTQLPPAYTNSFTRGVYYPDKVFRSSVLHSTQDLFLPFFSNVTWFHAIHVSGTNGTKRFDNPVLPFNDGVYFASTEKSNIIRGWIFGTTLDSKTQSLLIVNNATNVVIKVCEFQFCNDPFLGVYYHKNNKSWMESEFRVYSSANNCTFEYVSQPFLMDLEGKQGNFKNLREFVFKNIDGYFKIYSKHTPINLVRDLPQGFSALEPLVDLPIGINITRFQTLLALHRSYLTPGDSSSGWTAGAAAYYVGYLQPRTFLLKYNENGTITDAVDCALDPLSETKCTLKSFTVEKGIYQTSNFRVQPTESIVRFPNITNLCPFGEVFNATRFASVYAWNRKRISNCVADYSVLYNSASFSTFKCYGVSPTKLNDLCFTNVYADSFVIRGDEVRQIAPGQTGKIADYNYKLPDDFTGCVIAWNSNNLDSKVGGNYNYLYRLFRKSNLKPFERDISTEIYQAGSTPCNGVEGFNCYFPLQSYGFQPTNGVGYQPYRVVVLSFELLHAPATVCGPKKSTNLVKNKCVNFNFNGLTGTGVLTESNKKFLPFQQFGRDIADTTDAVRDPQTLEILDITPCSFGGVSVITPGTNTSNQVAVLYQDVNCTEVPVAIHADQLTPTWRVYSTGSNVFQTRAGCLIGAEHVNNSYECDIPIGAGICASYQTQTNSPRRARSVASQSIIAYTMSLGAENSVAYSNNSIAIPTNFTISVTTEILPVSMTKTSVDCTMYICGDSTECSNLLLQYGSFCTQLNRALTGIAVEQDKNTQEVFAQVKQIYKTPPIKDFGGFNFSQILPDPSKPSKRSFIEDLLFNKVTLADAGFIKQYGDCLGDISARDLICAQKFNGLTVLPPLLTDEMIAQYCSALLAGTITSGWTFGAGAALQIPFAMQMAYRFNGIGVTQNVLYENQKLIANQFNSAIGKIQDSLSSTASALGKLQDVVNQNAQALNTLVKQLSSNFGAISSVLNDILSRLDKVEAEVQIDRLITGRLQSLQTYVTQQLIRAAEIRASANLAATKMSECVLGQSKRVDFCGKGYHLMSFPQCAPHGVVFLHVTYVPAQEKNFTTAPAICHDGKAHFPREGVFVSNGTHWFVTQRNFYEPQIITTDNTFVSGNCDVVIGIVNNTVYDPLQPELDSFKEELDKYFKNHTSPDVDLGDISGINASVVNIQKEIDRLNEVAKNLNESLIDLQELGKYEQYIKGGGSGGGQIYEGKLTAEGLRFGIVASRFNHALVDRLVEGAIDAIVRHGGREEDITLVRVPGSWEIPVAAGELARKEDIDAVIAIGVLIRGATPHFDYIASEVSKGLADLSLELRKPITFGVITADTLEQAIERAGTKHGNKGWEAALSAIEMANLFKSLR

SEQ ID NO: 4611 - protein, 1371 aa, Artificial Sequence
  SARS-CoV-2/USA/NY-NYUMC7/2020__EPI_ISL_418192 spike protein (1-1211)(T874C_S1055C) LumSynth construct
MFVFLVLLPLVSSQCVNLTTRTQLPPAYTNSFTRGVYYPDKVFRSSVLHSTQDLFLPFFSNVTWFHAIHVSGTNGTKRFDNPVLPFNDGVYFASTEKSNIIRGWIFGTTLDSKTQSLLIVNNATNVVIKVCEFQFCNDPFLGVYHHKNNKSWMESEFRVYSSANNCTFEYVSQPFLMDLEGKQGNFKNLREFVFKNIDGYFKIYSKHTPINLVRDLPQGFSALEPLVDLPIGINITRFQTLLALHRSYLTPGDSSSGWTAGAAAYYVGYLQPRTFLLKYNENGTITDAVDCALDPLSETKCTLKSFTVEKGIYQTSNFRVQPTESIVRFPNITNLCPFGEVFNATRFASVYAWNRKRISNCVADYSVLYNSASFSTFKCYGVSPTKLNDLCFTNVYADSFVIRGDEVRQIAPGQTGKIADYNYKLPDDFTGCVIAWNSNNLDSKVGGNYNYLYRLFRKSNLKPFERDISTEIYQAGSTPCNGVEGFNCYFPLQSYGFQPTNGVGYQPYRVVVLSFELLHAPATVCGPKKSTNLVKNKCVNFNFNGLTGTGVLTESNKKFLPFQQFGRDIADTTDAVRDPQTLEILDITPCSFGGVSVITPGTNTSNQVAVLYQGVNCTEVPVAIHADQLTPTWRVYSTGSNVFQTRAGCLIGAEHVNNSYECDIPIGAGICASYQTQTNSPRRARSVASQSIIAYTMSLGAENSVAYSNNSIAIPTNFTISVTTEILPVSMTKTSVDCTMYICGDSTECSNLLLQYGSFCTQLNRALTGIAVEQDKNTQEVFAQVKQIYKTPPIKDFGGFNFSQILPDPSKPSKRSFIEDLLFNKVTLADAGFIKQYGDCLGDIAARDLICAQKFNGLTVLPPLLTDEMIAQYCSALLAGTITSGWTFGAGAALQIPFAMQMAYRFNGIGVTQNVLYENQKLIANQFNSAIGKIQDSLSSTASALGKLQDVVNQNAQALNTLVKQLSSNFGAISSVLNDILSRLDKVEAEVQIDRLITGRLQSLQTYVTQQLIRAAEIRASANLAATKMSECVLGQSKRVDFCGKGYHLMSFPQCAPHGVVFLHVTYVPAQEKNFTTAPAICHDGKAHFPREGVFVSNGTHWFVTQRNFYEPQIITTDNTFVSGNCDVVIGIVNNTVYDPLQPELDSFKEELDKYFKNHTSPDVDLGDISGINASVVNIQKEIDRLNEVAKNLNESLIDLQELGKYEQYIKGGGSGGGQIYEGKLTAEGLRFGIVASRFNHALVDRLVEGAIDAIVRHGGREEDITLVRVPGSWEIPVAAGELARKEDIDAVIAIGVLIRGATPHFDYIASEVSKGLADLSLELRKPITFGVITADTLEQAIERAGTKHGNKGWEAALSAIEMANLFKSLR

SEQ ID NO: 4612 - protein, 1371 aa, Artificial Sequence
  SARS-CoV-2/Iceland/189/2020__EPI_ISL_417709 spike protein (1-1211)(T874C_S1055C) LumSynth construct
MFVFLVLLPLVSSQCVNLTTRTQLPPAYTNSFTRGVYYPDKVFRSSVLHSTQDLFLPFFSNVTWFHAIHVSGTNGTKRFDNPVLPFNDGVYFASTEKSNIIRGWIFGTTLDSKTQSLLIVNNATNVVIKVCEFQFCNDPFLGVYYHKNNKSWMESEFRVYSSANNCTFEYVSQPFLMDLEGKQGNFKNLREFVFKNIDGYFKIYSKHTPINLVRDLPQGFSALEPLVDLPIGINITRFQTLLALHRSYLTPGDSSSGWTAGAAAYYVGYLQPRTFLLKYNENGTITDAVDCALDPLSETKCTLKSFTVEKGIYQTSNFRVQPTESIVRFPNITNLCPFGEVFNATRFASVYAWNRKRISNCVADYSVLYNSASFSTFKCYGVSPTKLNDLCFTNVYADSFVIRGDEVRQIAPGQTGKIADYNYKLPDDFTGCVIAWNSNNLDSKVGGNYNYLYRLFRKSNLKPFERDISTEIYQAGSTPCNGVEGFNCYFPLQSYGFQPTNGVGYQPYRVVVLSFELLHAPATVCGPKKSTNLVKNKCVNFNFNGLTGTGVLTESNKKFLPFQQFGRDIADTTDAVRDPQTLEILDITPCSFGGVSVITPGTNTSNQVAVLYQGVNCTEVPVAIHADQLTPTWRVYSTGSNVFQTRAGCLIGAEHVNNSYECDIPIGAGICASYQTQTNSPRRARSVASQSIIAYTMSLGAENSVAYSNNSIAIPTNFTISVTTEILPVSMTKTSVDCTMYICGDSTECSNLLLQYGSFCTQLNRALTGIAVEQDKNTQEVFAQVKQIYKTPPIKDFGGFNFSQILPDPSKPSKRSFIEDLLFNKVTLADAGFTKQYGDCLGDIAARDLICAQKFNGLTVLPPLLTDEMIAQYCSALLAGTITSGWTFGAGAALQIPFAMQMAYRFNGIGVTQNVLYENQKLIANQFNSAIGKIQDSLSSTASALGKLQDVVNQNAQALNTLVKQLSSNFGAISSVLNDILSRLDKVEAEVQIDRLITGRLQSLQTYVTQQLIRAAEIRASANLAATKMSECVLGQSKRVDFCGKGYHLMSFPQCAPHGVVFLHVTYVPAQEKNFTTAPAICHDGKAHFPREGVFVSNGTHWFVTQRNFYEPQIITTDNTFVSGNCDVVIGIVNNTVYDPLQPELDSFKEELDKYFKNHTSPDVDLGDISGINASVVNIQKEIDRLNEVAKNLNESLIDLQELGKYEQYIKGGGSGGGQIYEGKLTAEGLRFGIVASRFNHALVDRLVEGAIDAIVRHGGREEDITLVRVPGSWEIPVAAGELARKEDIDAVIAIGVLIRGATPHFDYIASEVSKGLADLSLELRKPITFGVITADTLEQAIERAGTKHGNKGWEAALSAIEMANLFKSLR

SEQ ID NO: 4613 - protein, 1371 aa, Artificial Sequence
  SARS-CoV-2/Australia/NSW56/2020__EPI_ISL_417408 spike protein (1-1211)(T874C_S1055C) LumSynth construct
MFVFLVLLPLVSSQCVNLTTRTQLPPAYTNSFTRGVYYPDKVFRSSVLHSTQDLFLPFFSNVTWFHAIHVSGTNGTKRFDNPVLPFNDGVYFASTEKSNIIRGWIFGTTLDSKTQSLLIVNNATNVVIKVCEFQFCNDPFLGVYYHKNNKSWMESEFRVYSSANNCTFEYVSQPFLMDLEGKQGNFKNLREFVFKNIDGYFKIYSKHTPINLVRDLPQGFSALEPLVDLPIGINITRFQTLLALHRSYLTPGDSSSGWTAGAAAYYVGYLQPRTFLLKYNENGTITDAVDCALDPLSETKCTLKSFTVEKGIYQTSNFRVQPTESIVRFPNITNLCPFGEVFNATRFASVYAWNRKRISNCVADYSVLYNSASFSTFKCYGVSPTKLNDLCFTNVYADSFVIRGDEVRQIAPGQTGKIADYNYKLPDDFTGCVIAWNSNNLDSKVGGNYNYLYRLFRKSNLKPFERDISTEIYQAGSTPCNGVEGFNCYFPLQSYGFQPTNGVGYQPYRVVVLSFELLHAPATVCGPKKSTNLVKNKCVNFNFNGLTGTGVLTESNKKFLPFQQFGRDIADTTDAVRDPQTLEILDITPCSFGGVSVITPGTNTSNQVAVLYQDVNCTEVPVAIHADQLTPTWRVYSTGSNVFQTRAGCLIGAEHVNNSYECDIPIGAGICASYQTQTNSPRRARSVASQSIIAYTMSLGAENSVAYSNNSIAIPTNFTISVTTEILPVSMTKTSVDCTMYICGDSTECSNLLLQYGSFCTQLNRALTGIAVEQDKNTQEVFAQVKQIYKTPPIKDFGGFNFSQILPDSSKPSKRSFIEDLLFNKVTLADAGFIKQYGDCLGDIAARDLICAQKFNGLTVLPPLLTDEMIAQYCSALLAGTITSGWTFGAGAALQIPFAMQMAYRFNGIGVTQNVLYENQKLIANQFNSAIGKIQDSLSSTASALGKLQDVVNQNAQALNTLVKQLSSNFGAISSVLNDILSRLDKVEAEVQIDRLITGRLQSLQTYVTQQLIRAAEIRASANLAATKMSECVLGQSKRVDFCGKGYHLMSFPQCAPHGVVFLHVTYVPAQEKNFTTAPAICHDGKAHFPREGVFVSNGTHWFVTQRNFYEPQIITTDNTFVSGNCDVVIGIVNNTVYDPLQPELDSFKEELDKYFKNHTSPDVDLGDISGINASVVNIQKEIDRLNEVAKNLNESLIDLQELGKYEQYIKGGGSGGGQIYEGKLTAEGLRFGIVASRFNHALVDRLVEGAIDAIVRHGGREEDITLVRVPGSWEIPVAAGELARKEDIDAVIAIGVLIRGATPHFDYIASEVSKGLADLSLELRKPITFGVITADTLEQAIERAGTKHGNKGWEAALSAIEMANLFKSLR

SEQ ID NO: 4614 - protein, 1371 aa, Artificial Sequence
  SARS-CoV-2/Iceland/280/2020__EPI_ISL_417608 spike protein (1-1211)(T874C_S1055C) LumSynth construct
MFVFLVLLPLVSSQCVNLTTRTQLPPAYTNSFTRGVYYPDKVFRSSVLHSTQDLFLPFFSNVTWFHAIHVSGTNGTKRFDNPVLPFNDGVYFASTEKSNIIRGWIFGTTLDSKTQSLLIVNNATNVVIKVCEFQFCNDPFLGVYYHKNNKSWMESEFRVYSSANNCTFEYVSQPFLMDLEGKQGNFKNLREFVFKNIDGYFKIYSKHTPINLVRDLPQGFSALEPLVDLPIGINITRFQTLLALHRSYLTPGDSSSGWTAGAAAYYVGYLQPRTFLLKYNENGTITDAVDCALDPLSETKCTLKSFTVEKGIYQTSNFRVQPTESIVRFPNITNLCPFGEVFNATRFASVYAWNRKRISNCVADYSVLYNSASFSTFKCYGVSPTKLNDLCFTNVYADSFVIRGDEVRQIAPGQTGKIADYNYKLPDDFTGCVIAWNSNNLDSKVGGNYNYLYRLFRKSNLKPFERDISTEIYQAGSTPCNGVEGFNCYFPLQSYGFQPTNGVGYQPYRVVVLSFELLHAPATVCGPKKSTNLVKNKCVNFNFNGLTGTGVLTESNKKFLPFQQFGRDIADTTDAVRDPQTLEILDITPCSFGGVSVITPGTNTSNQVAVLYQGVNCTEVPVAIHADQLTPTWRVYSTGSNVFQTRAGCLIGAEHVNNSYECDIPIGAGICASYHTQTNSPRRARSVASQSIIAYTMSLGAENSVAYSNNSIAIPTNFTISVTTEILPVSMTKTSVDCTMYICGDSTECSNLLLQYGSFCTQLNRALTGIAVEQDKNTQEVFAQVKQIYKTPPIKDFGGFNFSQILPDPSKPSKRSFIEDLLFNKVTLADAGFIKQYGDCLGDIAARDLICAQKFNGLTVLPPLLTDEMIAQYCSALLAGTITSGWTFGAGAALQIPFAMQMAYRFNGIGVTQNVLYENQKLIANQFNSAIGKIQDSLSSTASALGKLQDVVNQNAQALNTLVKQLSSNFGAISSVLNDILSRLDKVEAEVQIDRLITGRLQSLQTYVTQQLIRAAEIRASANLAATKMSECVLGQSKRVDFCGKGYHLMSFPQCAPHGVVFLHVTYVPAQEKNFTTAPAICHDGKAHFPREGVFVSNGTHWFVTQRNFYEPQIITTDNTFVSGNCDVVIGIVNNTVYDPLQPELDSFKEELDKYFKNHTSPDVDLGDISGINASVVNIQKEIDRLNEVAKNLNESLIDLQELGKYEQYIKGGGSGGGQIYEGKLTAEGLRFGIVASRFNHALVDRLVEGAIDAIVRHGGREEDITLVRVPGSWEIPVAAGELARKEDIDAVIAIGVLIRGATPHFDYIASEVSKGLADLSLELRKPITFGVITADTLEQAIERAGTKHGNKGWEAALSAIEMANLFKSLR

SEQ ID NO: 4615 - protein, 1371 aa, Artificial Sequence; identical to SEQ ID NO: 4570
  SARS-CoV-2/Iceland/247/2020__EPI_ISL_417575 spike protein (1-1211)(T874C_S1055C) LumSynth construct

SEQ ID NO: 4616 - protein, 1371 aa, Artificial Sequence
  SARS-CoV-2/Iceland/238/2020__EPI_ISL_417566 spike protein (1-1211)(T874C_S1055C) LumSynth construct
MFVFLVLLPLVSSQCVNLTTRTQLPPAYTNSFTRGVYYPDKVFRSSVLHSTQDLFLPFFSNVTWFHAIHVSGTNGTKRFDNPVLPFNDGVYFASTEKSNIIRGWIFGTTLDSKTQSLLIVNNATNVVIKVCEFQFCNDPFLGVYYHKNNKSWMESEFRVYSSANNCTFEYVSQPFLMDLEGKQGNFKNLREFVFKNIDGYFKIYSKHTPINLVRDLPQGFSALEPLVDLPIGINITRFQTLLALHRSYLTPGDSSSGWTAGAAAYYVGYLQPRTFLLKYNENGTITDAVDCALDPLSETKCTLKSFTVEKGIYQTSNFRVQPTESIVRFPNITNLCPFGEVFNATRFASVYAWNRKRISNCVADYSVLYNSASFSTFKCYGVSPTKLNDLCFTNVYADSFVIRGDEVRQIAPGQTGKIADYNYKLPDDFTGCVIAWNSNNLDSKVGGNYNYLYRLFRKSNLKPFERDISTEIYQAGSTPCNGVEGFNCYFPLQSYGFQPTNGVGYQPYRVVVLSFELLHAPATVCGPKKSTNLVKNKCVNFNFNGLTGTGVLTESNKKFLPFQQFGRDIADTTDAVRDPQTLEILDITPCSFGGVSVITPGTNTSNQVAVLYQGVNCTEVPVAIHADQLTPTWRVYSTGSNVFQTRAGCLIGAEHVNNSYECDIPIGAGICASYQTQTNSPRRARSVASQSIIAYTMSLGAENSVAYSNNSIAIPTNFTISVTTEILPVSMTKTSVDCTMYICGDSTECSNLLLQYGSFCTQLNRALTGIAVEQDKNTQEVFAQVKQIYKTPPIKDFGGFNFSQILPDPSKPSKRSFIEDLLFNKVTLADVGFIKQYGDCLGDIAARDLICAQKFNGLTVLPPLLTDEMIAQYCSALLAGTITSGWTFGAGAALQIPFAMQMAYRFNGIGVTQNVLYENQKLIANQFNSAIGKIQDSLSSTASALGKLQDVVNQNAQALNTLVKQLSSNFGAISSVLNDILSRLDKVEAEVQIDRLITGRLQSLQTYVTQQLIRAAEIRASANLAATKMSECVLGQSKRVDFCGKGYHLMSFPQCAPHGVVFLHVTYVPAQEKNFTTAPAICHDGKAHFPREGVFVSNGTHWFVTQRNFYEPQIITTDNTFVSGNCDVVIGIVNNTVYDPLQPELDSFKEELDKYFKNHTSPDVDLGDISGINASVVNIQKEIDRLNEVAKNLNESLIDLQELGKYEQYIKGGGSGGGQIYEGKLTAEGLRFGIVASRFNHALVDRLVEGAIDAIVRHGGREEDITLVRVPGSWEIPVAAGELARKEDIDAVIAIGVLIRGATPHFDYIASEVSKGLADLSLELRKPITFGVITADTLEQAIERAGTKHGNKGWEAALSAIEMANLFKSLR

SEQ ID NO: 4617 - protein, 1371 aa, Artificial Sequence
  SARS-CoV-2/Greece/16/2020__EPI_ISL_418265 spike protein (1-1211)(T874C_S1055C) LumSynth construct
MFVFLVLLPLVSSQCVNLTTRTQLPPAYTNSFTRGVYYPDKVFRSSVLHSTQDLFLPFFSNVTWFHAIHVSGTNGTKRFDNPVLPFNDGVYFASTEKSNIIRGWIFGTTLDSKTQSLLIVNNATNVVIKVCEFQFCNDPFLGVYYHKNNKSWMESEFRVYSSANNCTFEYVSQPFLMDLEGKQGNFKNLREFVFKNVDGYFKIYSKHTPINLVRDLPQGFSALEPLVDLPIGINITRFQTLLALHRSYLTPGDSSSGWTAGAAAYYVGYLQPRTFLLKYNENGTITDAVDCALDPLSETKCTLKSFTVEKGIYQTSNFRVQPTESIVRFPNITNLCPFGEVFNATRFASVYAWNRKRISNCVADYSVLYNSASFSTFKCYGVSPTKLNDLCFTNVYADSFVIRGDEVRQIAPGQTGKIADYNYKLPDDFTGCVIAWNSNNLDSKVGGNYNYLYRLFRKSNLKPFERDISTEIYQAGSTPCNGVEGFNCYFPLQSYGFQPTNGVGYQPYRVVVLSFELLHAPATVCGPKKSTNLVKNKCVNFNFNGLTGTGVLTESNKKFLPFQQFGRDIADTTDAVRDPQTLEILDITPCSFGGVSVITPGTNTSNQVAVLYQDVNCTEVPVAIHADQLTPTWRVYSTGSNVFQTRAGCLIGAEHVNNSYECDIPIGAGICASYQTQTNSPRRARSVASQSIIAYTMSLGAENSVAYSNNSIAIPTNFTISVTTEILPVSMTKTSVDCTMYICGDSTECSNLLLQYGSFCTQLNRALTGIAVEQDKNTQEVFAQVKQIYKTPPIKDFGGFNFSQILPDPSKPSKRSFIEDLLFNKVTLADAGFIKQYGDCLGDIAARDLICAQKFNGLTVLPPLLTDEMIAQYCSALLAGTITSGWTFGAGAALQIPFAMQMAYRFNGIGVTQNVLYENQKLIANQFNSAIGKIQDSLSSTASALGKLQDVVNQNAQALNTLVKQLSSNFGAISSVLNDILSRLDKVEAEVQIDRLITGRLQSLQTYVTQQLIRAAEIRASANLAATKMSECVLGQSKRVDFCGKGYHLMSFPQCAPHGVVFLHVTYVPAQEKNFTTAPAICHDGKAHFPREGVFVSNGTHWFVTQRNFYEPQIITTDNTFVSGNCDVVIGIVNNTVYDPLQPELDSFKEELDKYFKNHTSPDVDLGDISGINASVVNIQKEIDRLNEVAKNLNESLIDLQELGKYEQYIKGGGSGGGQIYEGKLTAEGLRFGIVASRFNHALVDRLVEGAIDAIVRHGGREEDITLVRVPGSWEIPVAAGELARKEDIDAVIAIGVLIRGATPHFDYIASEVSKGLADLSLELRKPITFGVITADTLEQAIERAGTKHGNKGWEAALSAIEMANLFKSLR

SEQ ID NO: 4618 - protein, 1371 aa, Artificial Sequence
  SARS-CoV-2/Iceland/319/2020__EPI_ISL_417648 spike protein (1-1211)(T874C_S1055C) LumSynth construct
MFVFLVLLPLVSSQCVNLTTRTQLPPAYTNSFTRGVYYPDKVFRSSVLHSTQDLFLPFFSNVTWFHAIHVSGTNGTKRFDNPVLPFNDGVYFASTEKSNIIRGWIFGTTLDSKTQSLLIVNNATNVVIKVCEFQFCNDPFLGVYYHKNNKSWMESEFRVYSSANNCTFEYVSQPFLIDLEGKQGNFKNLREFVFKNIDGYFKIYSKHTPINLVRDLPQGFSALEPLVDLPIGINITRFQTLLALHRSYLTPGDSSSGWTAGAAAYYVGYLQPRTFLLKYNENGTITDAVDCALDPLSETKCTLKSFTVEKGIYQTSNFRVQPTESIVRFPNITNLCPFGEVFNATRFASVYAWNRKRISNCVADYSVLYNSASFSTFKCYGVSPTKLNDLCFTNVYADSFVIRGDEVRQIAPGQTGKIADYNYKLPDDFTGCVIAWNSNNLDSKVGGNYNYLYRLFRKSNLKPFERDISTEIYQAGSTPCNGVEGFNCYFPLQSYGFQPTNGVGYQPYRVVVLSFELLHAPATVCGPKKSTNLVKNKCVNFNFNGLTGTGVLTESNKKFLPFQQFGRDIADTTDAVRDPQTLEILDITPCSFGGVSVITPGTNTSNQVAVLYQGVNCTEVPVAIHADQLTPTWRVYSTGSNVFQTRAGCLIGAEHVNNSYECDIPIGAGICASYQTQTNSPRRARSVASQSIIAYTMSLGAENSVAYSNNSIAIPTNFTISVTTEILPVSMTKTSVDCTMYICGDSTECSNLLLQYGSFCTQLNRALTGIAVEQDKNTQEVFAQVKQIYKTPPIKDFGGFNFSQILPDPSKPSKRSFIEDLLFNKVTLADAGFIKQYGDCLGDIAARDLICAQKFNGLTVLPPLLTDEMIAQYCSALLAGTITSGWTFGAGAALQIPFAMQMAYRFNGIGVTQNVLYENQKLIANQFNSAIGKIQDSLSSTASALGKLQDVVNQNAQALNTLVKQLSSNFGAISSVLNDILSRLDKVEAEVQIDRLITGRLQSLQTYVTQQLIRAAEIRASANLAATKMSECVLGQSKRVDFCGKGYHLMSFPQCAPHGVVFLHVTYVPAQEKNFTTAPAICHDGKAHFPREGVFVSNGTHWFVTQRNFYEPQIITTDNTFVSGNCDVVIGIVNNTVYDPLQPELDSFKEELDKYFKNHTSPDVDLGDISGINASVVNIQKEIDRLNEVAKNLNESLIDLQELGKYEQYIKGGGSGGGQIYEGKLTAEGLRFGIVASRFNHALVDRLVEGAIDAIVRHGGREEDITLVRVPGSWEIPVAAGELARKEDIDAVIAIGVLIRGATPHFDYIASEVSKGLADLSLELRKPITFGVITADTLEQAIERAGTKHGNKGWEAALSAIEMANLFKSLR

SEQ ID NO: 4619 - protein, 1371 aa, Artificial Sequence
  SARS-CoV-2/Congo/94/2020__EPI_ISL_417947 spike protein (1-1211)(T874C_S1055C) LumSynth construct
MFVFLVLLPLVSSQCVNLTTRTQLPPAYTNSFTRGVYYPDKVFRSSVLHSTQDLFLPFFSNVTWFHAIHVSGTNGTKRFDNPVLPFNDGVYFASTEKSNIIRGWIFGTTLDSKTQSLLIVNNATNVVIKVCEFQFCNDPFLGVYYHKNNKSWMESEFRVYSSANNCTFEYVSQPFLMDLEGKQGNFKNLREFVFKNIDGYFKIYSKHTPINLVRDLPQGFSALEPLVDLPIGINITRFQTLLALHRSYLTPGDSSSGWTAGAAAYYVGYLQPRTFLLKYNENGTITDAVDCALDPLSETKCTLKSFTVEKGIYQTSNFRVQPTESIVRFPNITNLCPFGEVFNATRFASVYAWNRKRISNCVADYSVLYNSASFSTFKCYGVSPTKLNDLCFTNVYADSFVIRGDEVRQIAPGQTGKIADYNYKLPDDFTGCVIAWNSNNLDSKVGGNYNYLYRLFRKSNLKPFERDISTEIYQAGSTPCNGVEGFNCYFPLQSYGFQPTNGVGYQPYRVVVLSFELLHAPATVCGPKKSTNLVKNKCVNFNFNGLTGTGVLTESNKKFLPFQQFGRDIADTTDAVRDPQTLEILDITPCSFGGVSVITPGTNTSNQVAVLYQGVNCTEVPVAIHADQLTPTWRVYSTGSNVFQTRAGCLIGAEHVNNSYECDIPIGAGICASYQTQTNSPRRARSVASQSIIAYTMSLGAENSVAYSNNSIAIPTNFTISVTTEILPVSMTKTSVDCTMYICGDSTECSNLLLQYGSFCTQLNRALTGIAVEQDKNTQEVFAQVKQIYKTPPIKDFGGFNFSQILPDPSKPSKRSFIEDILFNKVTLADAGFIKQYGDCLGDIAARDLICAQKFNGLTVLPPLLTDEMIAQYCSALLAGTITSGWTFGAGAALQIPFAMQMAYRFNGIGVTQNVLYENQKLIANQFNSAIGKIQDSLSSTASALGKLQDVVNQNAQALNTLVKQLSSNFGAISSVLNDILSRLDKVEAEVQIDRLITGRLQSLQTYVTQQLIRAAEIRASANLAATKMSECVLGQSKRVDFCGKGYHLMSFPQCAPHGVVFLHVTYVPAQEKNFTTAPAICHDGKAHFPREGVFVSNGTHWFVTQRNFYEPQIITTDNTFVSGNCDVVIGIVNNTVYDPLQPELDSFKEELDKYFKNHTSPDVDLGDISGINASVVNIQKEIDRLNEVAKNLNESLIDLQELGKYEQYIKGGGSGGGQIYEGKLTAEGLRFGIVASRFNHALVDRLVEGAIDAIVRHGGREEDITLVRVPGSWEIPVAAGELARKEDIDAVIAIGVLIRGATPHFDYIASEVSKGLADLSLELRKPITFGVITADTLEQAIERAGTKHGNKGWEAALSAIEMANLFKSLR

SEQ ID NO: 4620 - protein, 1371 aa, Artificial Sequence
  SARS-CoV-2/Congo/158/2020__EPI_ISL_417950 spike protein (1-1211)(T874C_S1055C) LumSynth construct
MFVFLVLLPLVSSQCVNLTTRTQLPPAYTNSFTRGVYYPDKVFRSSVLHSTQDLFLPFFSNVTWFHAIHVSGTNGTKRFDNPVLPFNDGVYFASTEKSNIIRGWIFGTTLDSKTQSLLIVNNATNVVIKVCEFQFCNDPFLGVYYHKNNKSWMESEFRVYSSANNCTFEYVSQPFLMDLEGKQGNFKNLREFVFKNIDGYFKIYSKHTPINLVRDLPQGFSALEPLVDLPIGINITRFQTLLALHRSYLTPGDSSSGWTAGAAAYYVGYLQPRTFLLKYNENGTITDAVDCALDPLSETKCTLKSFTVEKGIYQTSNFRVQPTESIVRFPNITNLCPFGEVFNATRFASVYAWNRKRISNCVADYSVLYNSASFSTFKCYGVSPTKLNDLCFTNVYADSFVIRGDEVRQIAPGQTGKIADYNYKLPDDFTGCVIAWNSNNLDSKVGGNYNYLYRLFRKSNLKPFERDISTEIYQAGSTPCNGVEGFNCYFPLQSYGFQPTNGVGYQPYRVVVLSFELLHAPATVCGPKKSTNLVKNKCVNFNFNGLTGTGVLTESNKKFLPFQQFGRDIADTTDAVRDPQTLEILDITPCSFGGVSVITPGTNTSNQVAVLYQDVNCTEVPVAIHADQLTPTWRVYSTGSNVFQTRAGCLIGAEHVNNSYECDIPIGAGICASYQTQTNSPRRARSVASQSIIAYTMSLGAENSVAYSNNSIAIPTNFTISVTTEILPVSMTKTSVDCTMYICGDSTECSNLLLQYGSFCTQLNRALTGIAVEQDKNTQEVFAQVKQIYKTPPIKDFGGFNFSQILPDPSKPSKRSFIEDLLFNKVTLADAGFIKQYGDCLGDIAARDLICAQKFNGLTVLPPLLTDEMIAQYCSALLAGTITSGWTFGAGAALQIPFAMQMAYRFNGIGVTQNVLYENQKLIANQFNSAIGKIQDSLSSTASALGKLQDVVNQNAQALNTLVKQLSSNFGAISSVLNDILSRLDKVEAEVQIDRLITGRLQSLQTYVTQQLIRAAEIRASANLAATKMSECVLGQSKRVDFCGKGYHLMSFPQCAPHGVVFLHVTYVPAQEKNFTTAPAICHDGKAHFPREGVFVSNGTHWFVTQRNFYEPQIITTDNTFLSGNCDVVIGIVNNTVYDPLQPELDSFKEELDKYFKNHTSPDVDLGDISGINASVVNIQKEIDRLNEVAKNLNESLIDLQELGKYEQYIKGGGSGGGQIYEGKLTAEGLRFGIVASRFNHALVDRLVEGAIDAIVRHGGREEDITLVRVPGSWEIPVAAGELARKEDIDAVIAIGVLIRGATPHFDYIASEVSKGLADLSLELRKPITFGVITADTLEQAIERAGTKHGNKGWEAALSAIEMANLFKSLR

SEQ ID NO: 4621 - protein, 1371 aa, Artificial Sequence
  SARS-CoV-2/USA/UT-00034/2020__EPI_ISL_417977 spike protein (1-1211)(T874C_S1055C) LumSynth construct
MFVFLVLLPLVSSQCVNLTTRTQLPPAYTNSFTRGVYYPDKVFRSSVLHSTQDLFLPFFSNVTWFHAIHVSGTNGTKRFDNPVLPFNDGVYFASTEKSNIIRGWIFGTTLDSKTQSLLIVNNATNVVIKVCEFQFCNDPFLGVYYYKNNKSWMESEFRVYSSANNCTFEYVSQPFLMDLEGKQGNFKNLREFVFKNIDGYFKIYSKHTPINLVRDLPQGFSALEPLVDLPIGINITRFQTLLALHRSYLTPGDSSSGWTAGAAAYYVGYLQPRTFLLKYNENGTITDAVDCALDPLSETKCTLKSFTVEKGIYQTSNFRVQPTESIVRFPNITNLCPFGEVFNATRFASVYAWNRKRISNCVADYSVLYNSASFSTFKCYGVSPTKLNDLCFTNVYADSFVIRGDEVRQIAPGQTGKIADYNYKLPDDFTGCVIAWNSNNLDSKVGGNYNYLYRLFRKSNLKPFERDISTEIYQAGSTPCNGVEGFNCYFPLQSYGFQPTNGVGYQPYRVVVLSFELLHAPATVCGPKKSTNLVKNKCVNFNFNGLTGTGVLTESNKKFLPFQQFGRDIADTTDAVRDPQTLEILDITPCSFGGVSVITPGTNTSNQVAVLYQGVNCTEVPVAIHADQLTPTWRVYSTGSNVFQTRAGCLIGAEHVNNSYECDIPIGAGICASYQTQTNSPRRARSVASQSIIAYTMSLGAENSVAYSNNSIAIPTNFTISVTTEILPVSMTKTSVDCTMYICGDSTECSNLLLQYGSFCTQLNRALTGIAVEQDKNTQEVFAQVKQIYKTPPIKDFGGFNFSQILPDPSKPSKRSFIEDLLFNKVTLADAGFIKQYGDCLGDIAARDLICAQKFNGLTVLPPLLTDEMIAQYCSALLAGTITSGWTFGAGAALQIPFAMQMAYRFNGIGVTQNVLYENQKLIANQFNSAIGKIQDSLSSTASALGKLQDVVNQNAQALNTLVKQLSSNFGAISSVLNDILSRLDKVEAEVQIDRLITGRLQSLQTYVTQQLIRAAEIRASANLAATKMSECVLGQSKRVDFCGKGYHLMSFPQCAPHGVVFLHVTYVPAQEKNFTTAPAICHDGKAHFPREGVFVSNGTHWFVTQRNFYEPQIITTDNTFVSGNCDVVIGIVNNTVYDPLQPELDSFKEELDKYFKNHTSPDVDLGDISGINASVVNIQKEIDRLNEVAKNLNESLIDLQELGKYEQYIKGGGSGGGQIYEGKLTAEGLRFGIVASRFNHALVDRLVEGAIDAIVRHGGREEDITLVRVPGSWEIPVAAGELARKEDIDAVIAIGVLIRGATPHFDYIASEVSKGLADLSLELRKPITFGVITADTLEQAIERAGTKHGNKGWEAALSAIEMANLFKSLR

SEQ ID NO: 4622 - protein, 1371 aa, Artificial Sequence
  SARS-CoV-2/USA/UT-00033/2020__EPI_ISL_417976 spike protein (1-1211)(T874C_S1055C) LumSynth construct
MFVFLVLLPLVSSQCVNLTTRTQLPPAYTNSFTRGVYYPDKVFRSSVLHSTQDLFLPFFSNVTWFHAIHVSGTNGTKRFDNPVLPFNDGVYFASTEKSNIIRGWIFGTTLDSKTQSLLIVNNATNVVIKVCEFQFCNDPFLGVYYHKNNKSWMESEFRVYSSANNCTFEYVSQPFLMDLEGKQGNFKNLREFVFKNIDGYFKIYSKHTPINLVRDLPQGFSALEPLVDLPIGINITRFQTLLALHRSYLTPGDSSSGLTAGAAAYYVGYLQPRTFLLKYNENGTITDAVDCALDPLSETKCTLKSFTVEKGIYQTSNFRVQPTESIVRFPNITNLCPFGEVFNATRFASVYAWNRKRISNCVADYSVLYNSASFSTFKCYGVSPTKLNDLCFTNVYADSFVIRGDEVRQIAPGQTGKIADYNYKLPDDFTGCVIAWNSNNLDSKVGGNYNYLYRLFRKSNLKPFERDISTEIYQAGSTPCNGVEGFNCYFPLQSYGFQPTNGVGYQPYRVVVLSFELLHAPATVCGPKKSTNLVKNKCVNFNFNGLTGTGVLTESNKKFLPFQQFGRDIADTTDAVRDPQTLEILDITPCSFGGVSVITPGTNTSNQVAVLYQGVNCTEVPVAIHADQLTPTWRVYSTGSNVFQTRAGCLIGAEHVNNSYECDIPIGAGICASYQTQTNSPRRARSVASQSIIAYTMSLGAENSVAYSNNSIAIPTNFTISVTTEILPVSMTKTSVDCTMYICGDSTECSNLLLQYGSFCTQLNRALTGIAVEQDKNTQEVFAQVKQIYKTPPIKDFGGFNFSQILPDPSKPSKRSFIEDLLFNKVTLADAGFIKQYGDCLGDIAARDLICAQKFNGLTVLPPLLTDEMIAQYCSALLAGTITSGWTFGAGAALQIPFAMQMAYRFNGIGVTQNVLYENQKLIANQFNSAIGKIQDSLSSTASALGKLQDVVNQNAQALNTLVKQLSSNFGAISSVLNDILSRLDKVEAEVQIDRLITGRLQSLQTYVTQQLIRAAEIRASANLAATKMSECVLGQSKRVDFCGKGYHLMSFPQCAPHGVVFLHVTYVPAQEKNFTTAPAICHDGKAHFPREGVFVSNGTHWFVTQRNFYEPQIITTDNTFVSGNCDVVIGIVNNTVYDPLQPELDSFKEELDKYFKNHTSPDVDLGDISGINASVVNIQKEIDRLNEVAKNLNESLIDLQELGKYEQYIKGGGSGGGQIYEGKLTAEGLRFGIVASRFNHALVDRLVEGAIDAIVRHGGREEDITLVRVPGSWEIPVAAGELARKEDIDAVIAIGVLIRGATPHFDYIASEVSKGLADLSLELRKPITFGVITADTLEQAIERAGTKHGNKGWEAALSAIEMANLFKSLR

SEQ ID NO: 4623 - protein, 1371 aa, Artificial Sequence
  SARS-CoV-2/USA/WI-13/2020__EPI_ISL_417516 spike protein (1-1211)(T874C_S1055C) LumSynth construct
MFVFLVLLPLVSSQCVNLTTRTQLPPAYTNSFTRGVYYPDKVFRSSVLHSTQDLFLPFFSNVTWFHAIHVSGTNGTKRFDNPVLPFNDGVYFASTEKSNIIRGWIFGTTLDSKTQSLLIVNNATNVVIKVCEFQFCNDPFLGVYYHKNNKSWMESEFRVYSSANNCTFEYVSQPFLMDLEGKQGNFKNLREFVFKNIDGYFKIYSKHTPINLVRDLPQGFSALEPLVDLPIGINITRFQTLLALHRSYLTPGDSSSGWTAGAAAYYVGYLQPRTFLLKYNENGTITDAVDCALDPLSETKCTLKSFTVEKGIYQTSNFRVLPTESIVRFPNITNLCPFGEVFNATRFASVYAWNRKRISNCVADYSVLYNSASFSTFKCYGVSPTKLNDLCFTNVYADSFVIRGDEVRQIAPGQTGKIADYNYKLPDDFTGCVIAWNSNNLDSKVGGNYNYLYRLFRKSNLKPFERDISTEIYQAGSTPCNGVEGFNCYFPLQSYGFQPTNGVGYQPYRVVVLSFELLHAPATVCGPKKSTNLVKNKCVNFNFNGLTGTGVLTESNKKFLPFQQFGRDIADTTDAVRDPQTLEILDITPCSFGGVSVITPGTNTSNQVAVLYQGVNCTEVPVAIHADQLTPTWRVYSTGSNVFQTRAGCLIGAEHVNNSYECDIPIGAGICASYQTQTNSPRRARSVASQSIIAYTMSLGAENSVAYSNNSIAIPTNFTISVTTEILPVSMTKTSVDCTMYICGDSTECSNLLLQYGSFCTQLNRALTGIAVEQDKNTQEVFAQVKQIYKTPPIKDFGGFNFSQILPDPSKPSKRSFIEDLLFNKVTLADAGFIKQYGDCLGDIAARDLICAQKFNGLTVLPPLLTDEMIAQYCSALLAGTITSGWTFGAGAALQIPFAMQMAYRFNGIGVTQNVLYENQKLIANQFNSAIGKIQDSLSSTASALGKLQDVVNQNAQALNTLVKQLSSNFGAISSVLNDILSRLDKVEAEVQIDRLITGRLQSLQTYVTQQLIRAAEIRASANLAATKMSECVLGQSKRVDFCGKGYHLMSFPQCAPHGVVFLHVTYVPAQEKNFTTAPAICHDGKAHFPREGVFVSNGTHWFVTQRNFYEPQIITTDNTFVSGNCDVVIGIVNNTVYDPLQPELDSFKEELDKYFKNHTSPDVDLGDISGINASVVNIQKEIDRLNEVAKNLNESLIDLQELGKYEQYIKGGGSGGGQIYEGKLTAEGLRFGIVASRFNHALVDRLVEGAIDAIVRHGGREEDITLVRVPGSWEIPVAAGELARKEDIDAVIAIGVLIRGATPHFDYIASEVSKGLADLSLELRKPITFGVITADTLEQAIERAGTKHGNKGWEAALSAIEMANLFKSLR

SEQ ID NO: 4624 - protein, 1370 aa, Artificial Sequence
  SARS-CoV-2/India/1-27/2020__EPI_ISL_413522 spike protein (1-1210)(T873C_S1054C) LumSynth construct
MFVFLVLLPLVSSQCVNLTTRTQLPPAYTNSFTRGVYYPDKVFRSSVLHSTQDLFLPFFSNVTWFHAIHVSGTNGTKRFDNPVLPFNDGVYFASTEKSNIIRGWIFGTTLDSKTQSLLIVNNATNVVIKVCEFQFCNDPFLGVYHKNNKSWMESEFRVYSSANNCTFEYVSQPFLMDLEGKQGNFKNLREFVFKNIDGYFKIYSKHTPINLVRDLPQGFSALEPLVDLPIGINITRFQTLLALHRSYLTPGDSSSGWTAGAAAYYVGYLQPRTFLLKYNENGTITDAVDCALDPLSETKCTLKSFTVEKGIYQTSNFRVQPTESIVRFPNITNLCPFGEVFNATRFASVYAWNRKRISNCVADYSVLYNSASFSTFKCYGVSPTKLNDLCFTNVYADSFVIRGDEVIQIAPGQTGKIADYNYKLPDDFTGCVIAWNSNNLDSKVGGNYNYLYRLFRKSNLKPFERDISTEIYQAGSTPCNGVEGFNCYFPLQSYGFQPTNGVGYQPYRVVVLSFELLHAPATVCGPKKSTNLVKNKCVNFNFNGLTGTGVLTESNKKFLPFQQFGRDIADTTDAVRDPQTLEILDITPCSFGGVSVITPGTNTSNQVAVLYQDVNCTEVPVAIHADQLTPTWRVYSTGSNVFQTRAGCLIGAEHVNNSYECDIPIGAGICASYQTQTNSPRRARSVASQSIIAYTMSLGAENSVAYSNNSIAIPTNFTISVTTEILPVSMTKTSVDCTMYICGDSTECSNLLLQYGSFCTQLNRALTGIAVEQDKNTQEVFAQVKQIYKTPPIKDFGGFNFSQILPDPSKPSKRSFIEDLLFNKVTLADAGFIKQYGDCLGDIAARDLICAQKFNGLTVLPPLLTDEMIAQYCSALLAGTITSGWTFGAGAALQIPFAMQMAYRFNGIGVTQNVLYENQKLIANQFNSAIGKIQDSLSSTASALGKLQDVVNQNAQALNTLVKQLSSNFGAISSVLNDILSRLDKVEAEVQIDRLITGRLQSLQTYVTQQLIRAAEIRASANLAATKMSECVLGQSKRVDFCGKGYHLMSFPQCAPHGVVFLHVTYVPAQEKNFTTAPAICHDGKAHFPREGVFVSNGTHWFVTQRNFYEPQIITTDNTFVSGNCDVVIGIVNNTVYDPLQPELDSFKEELDKYFKNHTSPDVDLGDISGINASVVNIQKEIDRLNEVAKNLNESLIDLQELGKYEQYIKGGGSGGGQIYEGKLTAEGLRFGIVASRFNHALVDRLVEGAIDAIVRHGGREEDITLVRVPGSWEIPVAAGELARKEDIDAVIAIGVLIRGATPHFDYIASEVSKGLADLSLELRKPITFGVITADTLEQAIERAGTKHGNKGWEAALSAIEMANLFKSLR

SEQ ID NO: 4625 - protein, 1365 aa, Artificial Sequence
  SARS-CoV-2/pangolin/Guangxi/P4L/2017__EPI_ISL_410538 spike protein (1-1205)(T868C_S1049C) LumSynth construct
MFVFLFVLPLVSSQCVNLTTRTGIPPGYTNSSTRGVYYPDKVFRSSILHLTQDLFLPFFSNVTWFNTINYQGGFKKFDNPVLPFNDGVYFASTEKSNIIRGWIFGTTLDARTQSLLIVNNATNVVIKVCEFQFCTDPFLGVYYHNNNKTWVENEFRVYSSANNCTFEYISQPFLMDLEGKQGNFKNLREFVFKNVDGYFKIYSKHTPIDLVRDLPRGFAALEPLVDLPIGINITRFQTLLALHRSYLTPGNLESGWTTGAAAYYVGYLQQRTFLLSYNQNGTITDAVDCSLDPLSETKCTLKSLTVEKGIYQTSNFRVQPTISIVRFPNITNLCPFGEVFNASKFASVYAWNRKRISNCVADYSVLYNSTSFSTFKCYGVSPTKLNDLCFTNVYADSFVVKGDEVRQIAPGQTGVIADYNYKLPDDFTGCVIAWNSVKQDALTGGNYGYLYRLFRKSKLKPFERDISTEIYQAGSTPCNGQVGLNCYYPLERYGFHPTTGVNYQPFRVVVLSFELLNGPATVCGPKLSTTLVKDKCVNFNFNGLTGTGVLTTSKKQFLPFQQFGRDISDTTDAVRDPQTLEILDITPCSFGGVSVITPGTNTSNQVAVLYQDVNCTEVPMAIHAEQLTPAWRVYSAGANVFQTRAGCLVGAEHVNNSYECDIPVGAGICASYHSMSSLRSVNQRSIIAYTMSLGAENSVAYSNNSIAIPTNFTISVTTEILPVSMTKTSVDCTMYICGDSIECSNLLLQYGSFCTQLNRALTGIAVEQDKNTQEVFAQVKQIYKTPPIKDFGGFNFSQILPDPSKPSKRSFIEDLLFNKVTLADAGFIKQYGDCLGDIAARDLICAQKFNGLTVLPPLLTDEMIAQYCSALLAGTITSGWTFGAGAALQIPFAMQMAYRFNGIGVTQNVLYENQKLIANQFNSAIGKIQDSLSSTASALGKLQDVVNQNAQALNTLVKQLSSNFGAISSVLNDILSRLDKVEAEVQIDRLITGRLQSLQTYVTQQLIRAAEIRASANLAATKMSECVLGQSKRVDFCGKGYHLMSFPQCAPHGVVFLHVTYVPAQEKNFTTAPAICHEGKAHFPREGVFVSNGTHWFITQRNFYEPQIITTDNTFVSGSCDVVIGIVNNTVYDPLQPELDSFKEELDKYFKNHTSPDVDLGDISGINASVVNIQKEIDRLNEVAKNLNESPIDLQELGKYEQYIKGGGSGGGQIYEGKLTAEGLRFGIVASRFNHALVDRLVEGAIDAIVRHGGREEDITLVRVPGSWEIPVAAGELARKEDIDAVIAIGVLIRGATPHFDYIASEVSKGLADLSLELRKPITFGVITADTLEQAIERAGTKHGNKGWEAALSAIEMANLFKSLR

SEQ ID NO: 4626 - protein, 1365 aa, Artificial Sequence
  SARS-CoV-2/pangolin/Guangxi/P5L/2017__EPI_ISL_410540 spike protein (1-1205)(T868C_S1049C) LumSynth construct
MFVFLFVLPLVSSQCVNLTTRTGIPPGYTNSSTRGVYYPDKVFRSSILHLTQDLFLPFFSNVTWFNTINYQGGFKKFDNPVLPFNDGVYFASTEKSNIIRGWIFGTTLDARTQSLLIVNNATNVVIKVCEFQFCTDPFLGVYYHNNNKTWVENEFRVYSSANNCTFEYISQPFLMDLEGKQGNFKNLREFVFKNVDGYFKIYSKHTPIDLVRDLPRGFAALEPLVDLPIGINITRFQTLLALHRSYLTPGKLESGWTTGAAAYYVGYLQQRTFLLSYNQNGTITDAVDCSLDPLSETKCTLKSLTVEKGIYQTSNFRVQPTISIVRFPNITNLCPFGEVFNASKFASVYAWNRKRISNCVADYSVLYNSTSFSTFKCYGVSPTKLNDLCFTNVYADSFVVKGDEVRQIAPGQTGVIADYNYKLPDDFTGCVIAWNSVKQDALTGGNYGYLYRLFRKSKLKPFERDISTEIYQAGSTPCNGQVGLNCYYPLERYGFHPTTGVNYQPFRVVVLSFELLNGPATVCGPKLSTTLVKDKCVNFNFNGLTGTGVLTTSKKQFLPFQQFGRDISDTTDAVRDPQTLEILDITPCSFGGVSVITPGTNTSNQVAVLYQDVNCTEVPMAIHAEQLTPAWRVYSAGANVFQTRAGCLVGAEHVNNSYECDIPVGAGICASYHSMSSFRSVNQRSIIAYTMSLGAENSVAYSNNSIAIPTNFTISVTTEILPVSMTKTSVDCTMYICGDSIECSNLLLQYGSFCTQLNRALTGIAVEQDKNTQEVFAQVKQIYKTPPIKDFGGFNFSQILPDPSKPSKRSFIEDLLFNKVTLADAGFIKQYGDCLGDIAARDLICAQKFNGLTVLPPLLTDEMIAQYCSALLAGTITSGWTFGAGAALQIPFAMQMAYRFNGIGVTQNVLYENQKLIANQFNSAIGKIQDSLSSTASALGKLQDVVNQNAQALNTLVKQLSSNFGAISSVLNDILSRLDKVEAEVQIDRLITGRLQSLQTYVTQQLIRAAEIRASANLAATKMSECVLGQSKRVDFCGKGYHLMSFPQCAPHGVVFLHVTYVPAQEKNFTTAPAICHEGKAHFPREGVFVSNGTHWFITQRNFYEPQIITTDNTFVSGSCDVVIGIVNNTVYDPLQPELDSFKEELDKYFKNHTSPDVDLGDISGINASVVNIQKEIDRLNEVAKNLNESLIDLQELGKYEQYIKGGGSGGGQIYEGKLTAEGLRFGIVASRFNHALVDRLVEGAIDAIVRHGGREEDITLVRVPGSWEIPVAAGELARKEDIDAVIAIGVLIRGATPHFDYIASEVSKGLADLSLELRKPITFGVITADTLEQAIERAGTKHGNKGWEAALSAIEMANLFKSLR

SEQ ID NO: 4627 - protein, 1365 aa, Artificial Sequence
  SARS-CoV-2/pangolin/Guangxi/P5E/2017__EPI_ISL_410541 spike protein (1-1205)(T868C_S1049C) LumSynth construct
MFVFLFVLPLVSSQCVNLTTRTGIPPGYTNSSTRGVYYPDKVFRSSILHLTQDLFLPFFSNVTWFNTITYQGGSKKFDNPVLPFNDGVYFASTEKSNIIRGWIFGTTLDARTQSLLIVNNATNVVIKVCEFQFCTDPFLGVYYHNNNKTWVENEFRVYSSANNCTFEYISQPFLMDLEGKQGNFKNLREFVFKNVDGYFKIYSKHTPIDLVRDLPRGFAALEPLVDLPIGINITRFQTLLALHRSYLTPGKLESGWTTGAAAYYVGYLQQRTFLLSYNQNGTITDAVDCSLDPLSETKCTLKSLTVEKGIYQTSNFRVQPTISIVRFPNITNLCPFGEVFNASKFASVYAWNRKRISNCVADYSVLYNSTSFSTFKCYGVSPTKLNDLCFTNVYADSFVVKGDEVRQIAPGQTGVIADYNYKLPDDFTGCVIAWNSVKQDALTGDNYGYLYRLFRKSKLKPFERDISTEIYQAGSTPCNGQVGLNCYYPLERYGFHPTTGVNYQPFRVVVLSFELLNGPATVCGPKLSTTLVKDKCVNFNFNGLTGTGVLTTSKKQFLPFQQFGRDISDTTDAVRDPQTLEILDITPCSFGGVSVITPGTNTSNQVAVLYQDVNCTEVPMAIHAEQLTPAWRVYSAGANVFQTRAGCLVGAEHVNNSYECDIPVGAGICASYHSMSSFRSVNQRSIIAYTMSLGAENSVAYSNNSIAIPTNFTISVTTEILPVSMTKTSVDCTMYICGDSIECSNLLLQYGSFCTQLNRALTGIAVEQDKNTQEVFAQVKQIYKTPPIKDFGGFNFSQILPDPSKPSKRSFIEDLLFNKVTLADAGFIKQYGDCLGDIAARDLICAQKFNGLTVLPPLLTDEMIAQYCSALLAGTITSGWTFGAGAALQIPFAMQMAYRFNGIGVTQNVLYENQKLIANQFNSAIGKIQDSLSSTASALGKLQDVVNQNAQALNTLVKQLSSNFGAISSVLNDILSRLDKVEAEVQIDRLITGRLQSLQTYVTQQLIRAAEIRASANLAATKMSECVLGQSKRVDFCGKGYHLMSFPQCAPHGVVFLHVTYVPAQEKNFTTAPAICHEGKAHFPREGVFVSNGTHWFITQRNFYEPQIITTDNTFVSGSCDVVIGIVNNTVYDPLQPELDSFKEELDKYFKNHTSPDVDLGDISGINASVVNIQKEIDRLNEVAKNLNESLIDLQELGKYEQYIKGGGSGGGQIYEGKLTAEGLRFGIVASRFNHALVDRLVEGAIDAIVRHGGREEDITLVRVPGSWEIPVAAGELARKEDIDAVIAIGVLIRGATPHFDYIASEVSKGLADLSLELRKPITFGVITADTLEQAIERAGTKHGNKGWEAALSAIEMANLFKSLR

SEQ ID NO: 4628 - protein, 1363 aa, Artificial Sequence
  SARS-CoV-2/pangolin/Guangxi/P1E/2017__EPI_ISL_410539 spike protein (1-1203)(T866C_S1047C) LumSynth construct
MFVFLFVLPLVSSQCVNLTTRTGIQPGYTNSSTRGVYYPDKVFRSSILHLTQDLFLPFFSNVTWFNTINYQGGFKKFDNPVLPFNDGVYFASTEKSNIIRGWIFGTTLDARTQSLLIVNNATNVVIKVCEFQFCTDPFLGVYYHNNNKTWVENEFRVYSSANNCTFEYISQPFLMDLEGKQGNFKNLREFVFKNVDGYFKIYSKHTPIDLVRDLPRGFAALEPLVDLPIGINITRFQTLLALHRSYLTPGKLESGWTTGAAAYYVGYLQQRTFLLSYNQNGTITDAVDCSLDPLSETKCTLKSLTVEKGIYQTSNFRVQPTISIVRFPNITNLCPFGEVFNASKFASVYAWNRKRISNCVADYSVLYNSTSFSTFKCYGVSPTKLNDLCFTNVYADSFVVKGDEVRQIAPGQTGVIADYNYKLPDDFTGCVIAWNSVKQDALTGGNYLYRLFRKSKLKPFERDISTEIYQAGSTPCNGQVGLNCYYPLERYGFHPTTGVNYQPFRVVVLSFELLNGPATVCGPKLSTTLVKDKCVNFNFNGLTGTGVLTTSKKQFLPFQQFGRDISDTTDAVRDPQTLEILDITPCSFGGVSVITPGTNTSNQVAVLYQDVNCTEVPMAIHAEQLTPAWRVYSAGANVFQTRAGCLVGAEHVNNSYECDIPVGAGICASYHSMSSLRSVNQRSIIAYTMSLGAENSVAYSNNSIAIPTNFTISVTTEILPVSMTKTSVDCTMYICGDSIECSNLLLQYGSFCTQLNRALTGIAVEQDKNTQEVFAQVKQIYKTPPIKDFGGFNFSQILPDPSKPSKRSFIEDLLFNKVTLADAGFIKQYGDCLGDIAARDLICAQKFNGLTVLPPLLTDEMIAQYCSALLAGTITSGWTFGAGAALQIPFAMQMAYRFNGIGVTQNVLYENQKLIANQFNSAIGKIQDSLSSTASALGKLQDVVNQNAQALNTLVKQLSSNFGAISSVLNDILSRLDKVEAEVQIDRLITGRLQSLQTYVTQQLIRAAEIRASANLAATKMSECVLGQSKRVDFCGKGYHLMSFPQCAPHGVVFLHVTYVPAQEKNFTTAPAICHEGKAHFPREGVFVSNGTHWFITQRNFYEPQIITTDNTFVSGSCDVVIGIVNNTVYDPLQPELDSFKEELDKYFKNHTSPDVDLGDISGINASVVNIQKEIDRLNEVAKNLNESLIDLQELGKYEQYIKGGGSGGGQIYEGKLTAEGLRFGIVASRFNHALVDRLVEGAIDAIVRHGGREEDITLVRVPGSWEIPVAAGELARKEDIDAVIAIGVLIRGATPHFDYIASEVSKGLADLSLELRKPITFGVITADTLEQAIERAGTKHGNKGWEAALSAIEMANLFKSLR

SEQ ID NO: 4629 - protein, 1379 aa, Artificial Sequence
  SARS-CoV-2/Wuhan/WIV05/2019__EPI_ISL_402128 spike protein (1-1211) Ferritin construct
MFVFLVLLPLVSSQCVNLTTRTQLPPAYTNSFTRGVYYPDKVFRSSVLHSTQDLFLPFFSNVTWFHAIHVSGTNGTKRFDNPVLPFNDGVYFASTEKSNIIRGWIFGTTLDSKTQSLLIVNNATNVVIKVCEFQFCNDPFLGVYYHKNNKSWMESEFRVYSSANNCTFEYVSQPFLMDLEGKQGNFKNLREFVFKNIDGYFKIYSKHTPINLVRDLPQGFSALEPLVDLPIGINITRFQTLLALHRSYLTPGDSSSGWTAGAAAYYVGYLQPRTFLLKYNENGTITDAVDCALDPLSETKCTLKSFTVEKGIYQTSNFRVQPTESIVRFPNITNLCPFGEVFNATRFASVYAWNRKRISNCVADYSVLYNSASFSTFKCYGVSPTKLNDLCFTNVYADSFVIRGDEVRQIAPGQTGKIADYNYKLPDDFTGCVIAWNSNNLDSKVGGNYNYLYRLFRKSNLKPFERDISTEIYQAGSTPCNGVEGFNCYFPLQSYGFQPTNGVGYQPYRVVVLSFELLHAPATVCGPKKSTNLVKNKCVNFNFNGLTGTGVLTESNKKFLPFQQFGRDIADTTDAVRDPQTLEILDITPCSFGGVSVITPGTNTSNQVAVLYQDVNCTEVPVAIHADQLTPTWRVYSTGSNVFQTRAGCLIGAEHVNNSYECDIPIGAGICASYQTQTNSPRRARSVASQSIIAYTMSLGAENSVAYSNNSIAIPTNFTISVTTEILPVSMTKTSVDCTMYICGDSTECSNLLLQYGSFCTQLNRALTGIAVEQDKNTQEVFAQVKQIYKTPPIKDFGGFNFSQILPDPSKPSKRSFIEDLLFNKVTLADAGFIKQYGDCLGDIAARDLICAQKFNGLTVLPPLLTDEMIAQYTSALLAGTITSGWTFGAGAALQIPFAMQMAYRFNGIGVTQNVLYENQKLIANQFNSAIGKIQDSLSSTASALGKLQDVVNQNAQALNTLVKQLSSNFGAISSVLNDILSRLDKVEAEVQIDRLITGRLQSLQTYVTQQLIRAAEIRASANLAATKMSECVLGQSKRVDFCGKGYHLMSFPQSAPHGVVFLHVTYVPAQEKNFTTAPAICHDGKAHFPREGVFVSNGTHWFVTQRNFYEPQIITTDNTFVSGNCDVVIGIVNNTVYDPLQPELDSFKEELDKYFKNHTSPDVDLGDISGINASVVNIQKEIDRLNEVAKNLNESLIDLQELGKYEQYIKGGGGSDIIKLLNEQVNKEMQSSNLYMSMSSWCYTHSLDGAGLFLFDHAAEEYEHAKKLIIFLNENNVPVQLTSISAPEHKFEGLTQIFQKAYEHEQHISESINNIVDHAIKSKDHATFNFLQWYVAEQHEEEVLFKDILDKIELIGNENHGLYLADQYVKGIAKSRKS

SEQ ID NO: 4630 - protein, 1375 aa, Artificial Sequence
  SARS-CoV-2/bat/Yunnan/RaTG13/2013__EPI_ISL_402131 spike protein (1-1207) Ferritin construct
MFVFLVLLPLVSSQCVNLTTRTQLPPAYTNSSTRGVYYPDKVFRSSVLHLTQDLFLPFFSNVTWFHAIHVSGTNGIKRFDNPVLPFNDGVYFASTEKSNIIRGWIFGTTLDSKTQSLLIVNNATNVVIKVCEFQFCNDPFLGVYYHKNNKSWMESEFRVYSSANNCTFEYVSQPFLMDLEGKQGNFKNLREFVFKNIDGYFKIYSKHTPINLVRDLPPGFSALEPLVDLPIGINITRFQTLLALHRSYLTPGDSSSGWTAGAAAYYVGYLQPRTFLLKYNENGTITDAVDCALDPLSETKCTLKSFTVEKGIYQTSNFRVQPTDSIVRFPNITNLCPFGEVFNATTFASVYAWNRKRISNCVADYSVLYNSTSFSTFKCYGVSPTKLNDLCFTNVYADSFVITGDEVRQIAPGQTGKIADYNYKLPDDFTGCVIAWNSKHIDAKEGGNFNYLYRLFRKANLKPFERDISTEIYQAGSKPCNGQTGLNCYYPLYRYGFYPTDGVGHQPYRVVVLSFELLNAPATVCGPKKSTNLVKNKCVNFNFNGLTGTGVLTESNKKFLPFQQFGRDIADTTDAVRDPQTLEILDITPCSFGGVSVITPGTNASNQVAVLYQDVNCTEVPVAIHADQLTPTWRVYSTGSNVFQTRAGCLIGAEHVNNSYECDIPIGAGICASYQTQTNSRSVASQSIIAYTMSLGAENSVAYSNNSIAIPTNFTISVTTEILPVSMTKTSVDCTMYICGDSTECSNLLLQYGSFCTQLNRALTGIAVEQDKNTQEVFAQVKQIYKTPPIKDFGGFNFSQILPDPSKPSKRSFIEDLLFNKVTLADAGFIKQYGDCLGDIAARDLICAQKFNGLTVLPPLLTDEMIAQYTSALLAGTITSGWTFGAGAALQIPFAMQMAYRFNGIGVTQNVLYENQKLIANQFNSAIGKIQDSLSSTASALGKLQDVVNQNAQALNTLVKQLSSNFGAISSVLNDILSRLDKVEAEVQIDRLITGRLQSLQTYVTQQLIRAAEIRASANLAATKMSECVLGQSKRVDFCGKGYHLMSFPQSAPHGVVFLHVTYVPAQEKNFTTAPAICHDGKAHFPREGVFVSNGTHWFVTQRNFYEPQIITTDNTFVSGSCDVVIGIVNNTVYDPLQPELDSFKEELDKYFKNHTSPDVDLGDISGINASVVNIQKEIDRLNEVAKNLNESLIDLQELGKYEQYIKGGGGSDIIKLLNEQVNKEMQSSNLYMSMSSWCYTHSLDGAGLFLFDHAAEEYEHAKKLIIFLNENNVPVQLTSISAPEHKFEGLTQIFQKAYEHEQHISESINNIVDHAIKSKDHATFNFLQWYVAEQHEEEVLFKDILDKIELIGNENHGLYLADQYVKGIAKSRKS

SEQ ID NO: 4631 - protein, 1379 aa, Artificial Sequence
  SARS-CoV-2/Wuhan/HBCDC-HB-01/2019__EPI_ISL_402132 spike protein (1-1211) Ferritin construct
MFVFLVLLPLVSSQCVNLTTRTQLPPAYTNSITRGVYYPDKVFRSSVLHSTQDLFLPFFSNVTWFHAIHVSGTNGTKRFDNPVLPFNDGVYFASTEKSNIIRGWIFGTTLDSKTQSLLIVNNATNVVIKVCEFQFCNDPFLGVYYHKNNKSWMESEFRVYSSANNCTFEYVSQPFLMDLEGKQGNFKNLREFVFKNIDGYFKIYSKHTPINLVRDLPQGFSALEPLVDLPIGINITRFQTLLALHRSYLTPGDSSSGWTAGAAAYYVGYLQPRTFLLKYNENGTITDAVDCALDPLSETKCTLKSFTVEKGIYQTSNFRVQPTESIVRFPNITNLCPFGEVFNATRFASVYAWNRKRISNCVADYSVLYNSASFSTFKCYGVSPTKLNDLCFTNVYADSFVIRGDEVRQIAPGQTGKIADYNYKLPDDFTGCVIAWNSNNLDSKVGGNYNYLYRLFRKSNLKPFERDISTEIYQAGSTPCNGVEGFNCYFPLQSYGFQPTNGVGYQPYRVVVLSFELLHAPATVCGPKKSTNLVKNKCVNFNFNGLTGTGVLTESNKKFLPFQQFGRDIADTTDAVRDPQTLEILDITPCSFGGVSVITPGTNTSNQVAVLYQDVNCTEVPVAIHADQLTPTWRVYSTGSNVFQTRAGCLIGAEHVNNSYECDIPIGAGICASYQTQTNSPRRARSVASQSIIAYTMSLGAENSVAYSNNSIAIPTNFTISVTTEILPVSMTKTSVDCTMYICGDSTECSNLLLQYGSFCTQLNRALTGIAVEQDKNTQEVFAQVKQIYKTPPIKDFGGFNFSQILPDPSKPSKRSFIEDLLFNKVTLADAGFIKQYGDCLGDIAARDLICAQKFNGLTVLPPLLTDEMIAQYTSALLAGTITSGWTFGAGAALQIPFAMQMAYRFNGIGVTQNVLYENQKLIANQFNSAIGKIQDSLSSTASALGKLQDVVNQNAQALNTLVKQLSSNFGAISSVLNDILSRLDKVEAEVQIDRLITGRLQSLQTYVTQQLIRAAEIRASANLAATKMSECVLGQSKRVDFCGKGYHLMSFPQSAPHGVVFLHVTYVPAQEKNFTTAPAICHDGKAHFPREGVFVSNGTHWFVTQRNFYEPQIITTDNTFVSGNCDVVIGIVNNTVYDPLQPELDSFKEELDKYFKNHTSPDVDLGDISGINASVVNIQKEIDRLNEVAKNLNESLIDLQELGKYEQYIKGGGGSDIIKLLNEQVNKEMQSSNLYMSMSSWCYTHSLDGAGLFLFDHAAEEYEHAKKLIIFLNENNVPVQLTSISAPEHKFEGLTQIFQKAYEHEQHISESINNIVDHAIKSKDHATFNFLQWYVAEQHEEEVLFKDILDKIELIGNENHGLYLADQYVKGIAKSRKS

SEQ ID NO: 4632 - protein, 1379 aa, Artificial Sequence
  SARS-CoV-2/Guangdong/20SF028/2020__EPI_ISL_403936 spike protein (1-1211) Ferritin construct
MFVFLVLLPLVSSQCVNLTTRTQLPPAYTNSFTRGVYYPDKVFRSSVLYSTQDLFLPFFSNVTWFHAIHVSGTNGTKRFDNPVLPFNDGVYFASTEKSNIIRGWIFGTTLDSKTQSLLIVNNATNVVIKVCEFQFCNDPFLGVYYHKNNKSWMESEFRVYSSANNCTFEYVSQPFLMDLEGKQGNFKNLREFVFKNIDGYFKIYSKHTPINLVRDLPQGFSALEPLVDLPIGINITRFQTLLALHRSYLTPGDSSSGWTAGAAAYYVGYLQPRTFLLKYNENGTITDAVDCALDPLSETKCTLKSFTVEKGIYQTSNFRVQPTESIVRFPNITNLCPFGEVFNATRFASVYAWNRKRISNCVADYSVLYNSASFSTFKCYGVSPTKLNDLCFTNVYADSFVIRGDEVRQIAPGQTGKIADYNYKLPDDFTGCVIAWNSNNLDSKVGGNYNYLYRLFRKSNLKPFERDISTEIYQAGSTPCNGVEGFNCYFPLQSYGFQPTNGVGYQPYRVVVLSFELLHAPATVCGPKKSTNLVKNKCVNFNFNGLTGTGVLTESNKKFLPFQQFGRDIADTTDAVRDPQTLEILDITPCSFGGVSVITPGTNTSNQVAVLYQDVNCTEVPVAIHADQLTPTWRVYSTGSNVFQTRAGCLIGAEHVNNSYECDIPIGAGICASYQTQTNSPRRARSVASQSIIAYTMSLGAENSVAYSNNSIAIPTNFTISVTTEILPVSMTKTSVDCTMYICGDSTECSNLLLQYGSFCTQLNRALTGIAVEQDKNTQEVFAQVKQIYKTPPIKDFGGFNFSQILPDPSKPSKRSFIEDLLFNKVTLADAGFIKQYGDCLGDIAARDLICAQKFNGLTVLPPLLTDEMIAQYTSALLAGTITSGWTFGAGAALQIPFAMQMAYRFNGIGVTQNVLYENQKLIANQFNSAIGKIQDSLSSTASALGKLQDVVNQNAQALNTLVKQLSSNFGAISSVLNDILSRLDKVEAEVQIDRLITGRLQSLQTYVTQQLIRAAEIRASANLAATKMSECVLGQSKRVDFCGKGYHLMSFPQSAPHGVVFLHVTYVPAQEKNFTTAPAICHDGKAHFPREGVFVSNGTHWFVTQRNFYEPQIITTDNTFVSGNCDVVIGIVNNTVYDPLQPELDSFKEELDKYFKNHTSPDVDLGDISGINASVVNIQKEIDRLNEVAKNLNESLIDLQELGKYEQYIKGGGGSDIIKLLNEQVNKEMQSSNLYMSMSSWCYTHSLDGAGLFLFDHAAEEYEHAKKLIIFLNENNVPVQLTSISAPEHKFEGLTQIFQKAYEHEQHISESINNIVDHAIKSKDHATFNFLQWYVAEQHEEEVLFKDILDKIELIGNENHGLYLADQYVKGIAKSRKS

SEQ ID NO: 4633 - protein, 1379 aa, Artificial Sequence
  SARS-CoV-2/Shenzhen/SZTH-001/2020__EPI_ISL_406592 spike protein (1-1211) Ferritin construct
MFVFLVLLPLVSSQCVNLTTRTQLPPAYTNSFTRGVYYPDKVFRSSVLHSTQDLFLPFFSNVTWFHAIHVSGTNGTKRFDNPVLPFNDGVYFASTEKSNIIRGWIFGTTLDSKTQSLLIVNNATNVVIKVCEFQFCNDPFLGVYYHKNNKSWMESEFRVYSSANNCTFEYVSQPFLMDLEGKQGNFKNLREFVFKNIDGYFKIYSKHTPINLVRDLPQGFSALEPLVDLPIGINITRFQTLLALHRSYLTPGDSSSGWTAGAAAYYVGYLQPRTFLLKYNENGTITDAVDCALDPLSETKCTLKSFTVEKGIYQTSNFRVQPTESIVRFPNITNLCPFGEVFNATRFASVYAWNRKRISNCVADYSVLYNSASFSTFKCYGVSPTKLNDLCFTNVYADSFVIRGDEVRQIAPGQTGKIADYNYKLPDDFTGCVIAWNSNNLDSKVGGNYNYLYRLFRKSNLKPFERDISTEIYQAGSTPCNGVEGFNCYFPLQSYGFQPTNGVGYQPYRVVVLSFELLHAPATVCGPKKSTNLVKNKCVNFNFNGLTGTGVLTESNKKFLPFQQFGRDIADTTDAVRDPQTLEILDITPCSFGGVSVITPGTNTSNQVAVLYQDVNCTEVPVAIHADQLTPTWRVYSTGSNVFQTRAGCLIGAEHVNNSYECDIPIGAGICASYQTQTNSPRRARSVASQSIIAYTMSLGAENSVAYSNNSIAIPTNFTISVTTEILPVSMTKTSVDCTMYICGDSTECSNLLLQYGSFCTQLNRALTGIAVEQDKNTQEVFAQVKQIYKTPPIKDFGGFNFSQILPDPSKPSKRSFIEDLLFNKVTLADAGFIKQYGDCLGDIAARDLICAQKFNGLTVLPPLLTDEMIAQYTSALLAGTITSGWTFGAGAALQIPFAMQMAYRFNGIGVTQNVLYENQKLIANQFNSAIGKIQDSLSSTASALGKLQDVVNQNAQALNTLVKQLSSNFGAISSVLNDILSRLDKVEAEVQIDRLITGRLQSLQTYVTQQLIRAAEIRASANLAATKMSECVLGQSKRVDFCGKGYHLMSFPQSAPHGVVFLHVTYVPAQEKNFTTAPAICHDGKAHFPREGVFVSNGTHWFVTQRNFYEPQIITTDNTFVSGNCDVLIGIVNNTVYDPLQPELDSFKEELDKYFKNHTSPDVDLGDISGINASVVNIQKEIDRLNEVAKNLNESLIDLQELGKYEQYIKGGGGSDIIKLLNEQVNKEMQSSNLYMSMSSWCYTHSLDGAGLFLFDHAAEEYEHAKKLIIFLNENNVPVQLTSISAPEHKFEGLTQIFQKAYEHEQHISESINNIVDHAIKSKDHATFNFLQWYVAEQHEEEVLFKDILDKIELIGNENHGLYLADQYVKGIAKSRKS

SEQ ID NO: 4634 - protein, 1379 aa, Artificial Sequence
  SARS-CoV-2/Shenzhen/SZTH-004/2020__EPI_ISL_406595 spike protein (1-1211) Ferritin construct
MFVFLVLLPLVSSQCVNLTTRTQLPPAYTNSFTRGVYYPDKVFRSSVLHSTQDLFLPFFSNVTWFHAIHVSGTNGTKRFDNPVLPFNDGVYFASTEKSNIIRGWIFGTTLDSKTQSLLIVNNATNVVIKVCEFQFCNDPFLGVYYHKNNKSWMESEFRVYSSANNCTFEYVSQPFLMDLEGKQGNFKNLREFVFKNIDGYFKIYSKHTPINLVRDLPQGFSALEPLVDLPIGINITRFQTLLALHRSYLTPGDSSSGWTAGAAAYYVGYLQPRTFLLKYNENGTITDAVDCALDPLSETKCTLKSFTVEKGIYQTSNFRVQPTESIVRFPNITNLCPFGEVFNATRFASVYAWDRKRISNCVAYYSVLYNSASFSTFKCYGVSPTKLNDLCFTNVYADSFVIRGDEVRQIAPGQTGKIADYNYKLPDDFTGCVIAWNSNNLDSKVGGNYNYLYRLFRKSNLKPFERDISTEIYQAGSTPCNGVEGFNCYFPLQSYGFQPTNGVGYQPYRVVVLSFELLHAPATVCGPKKSTNLVKNKCVNFNFNGLTGTGVLTESNKKFLPFQQFGRDIADTTDAVRDPQTLEILDITPCSFGGVSVITPGTNTSNQVAVLYQDVNCTEVPVAIHADQLTPTWRVYSTGSNVFQTRAGCLIGAEHVNNSYECDIPIGAGICASYQTQTNSPRRARSVASQSIIAYTMSLGAENSVAYSNNSIAIPTNFTISVTTEILPVSMTKTSVDCTMYICGDSTECSNLLLQYGSFCTQLNRALTGIAVEQDKNTQEVFAQVKQIYKTPPIKDFGGFNFSQILPDPSKPSKRSFIEDLLFNKVTLADAGFIKQYGDCLGDIAARDLICAQKFNGLTVLPPLLTDEMIAQYTSALLAGTITSGWTFGAGAALQIPFAMQMAYRFNGIGVTQNVLYENQKLIANQFNSAIGKIQDSLSSTASALGKLQDVVNQNAQALNTLVKQLSSNFGAISSVLNDILSRLDKVEAEVQIDRLITGRLQSLQTYVTQQLIRAAEIRASANLAATKMSECVLGQSKRVDFCGKGYHLMSFPQSAPHGVVFLHVTYVPAQEKNFTTAPAICHDGKAHFPREGVFVSNGTHWFVTQRNFYEPQIITTDNTFVSGNCDVVIGIVNNTVYDPLQPELDSFKEELDKYFKNHTSPDVDLGDISGINASVVNIQKEIDRLNEVAKNLNESLIDLQELGKYEQYIKGGGGSDIIKLLNEQVNKEMQSSNLYMSMSSWCYTHSLDGAGLFLFDHAAEEYEHAKKLIIFLNENNVPVQLTSISAPEHKFEGLTQIFQKAYEHEQHISESINNIVDHAIKSKDHATFNFLQWYVAEQHEEEVLFKDILDKIELIGNENHGLYLADQYVKGIAKSRKS

SEQ ID NO: 4635 - protein, 1379 aa, Artificial Sequence
  SARS-CoV-2/France/IDF0372/2020__EPI_ISL_406596 spike protein (1-1211) Ferritin construct
MFVFLVLLPLVSSQCVNLTTRTQLPPAYTNSFTRGVYYPDKVFRSSVLHSTQDLFLPFFSNVTWFHAIHVSGTNGTKRFDNPVLPFNDGVYFASTEKSNIIRGWIFGTTLDSKTQSLLIVNNATNVVIKVCEFQFCNDPFLGVYYHKNNKSWMESEFRVYSSANNCTFEYVSQPFLMDLEGKQGNFKNLREFVFKNIDGYFKIYSKHTPINLVRDLPQGFSALEPLVDLPIGINITRFQTLLALHRSYLTPGDSSSGWTAGAAAYYVGYLQPRTFLLKYNENGTITDAVDCALDPLSETKCTLKSFTVEKGIYQTSNFRVQPTESIVRFPNITNLCPFGEVFNATRFASVYAWNRKRISNCVADYSFLYNSASFSTFKCYGVSPTKLNDLCFTNVYADSFVIRGDEVRQIAPGQTGKIADYNYKLPDDFTGCVIAWNSNNLDSKVGGNYNYLYRLFRKSNLKPFERDISTEIYQAGSTPCNGVEGFNCYFPLQSYGFQPTNGVGYQPYRVVVLSFELLHAPATVCGPKKSTNLVKNKCVNFNFNGLTGTGVLTESNKKFLPFQQFGRDIADTTDAVRDPQTLEILDITPCSFGGVSVITPGTNTSNQVAVLYQDVNCTEVPVAIHADQLTPTWRVYSTGSNVFQTRAGCLIGAEHVNNSYECDIPIGAGICASYQTQTNSPRRARSVASQSIIAYTMSLGAENSVAYSNNSIAIPTNFTISVTTEILPVSMTKTSVDCTMYICGDSTECSNLLLQYGSFCTQLNRALTGIAVEQDKNTQEVFAQVKQIYKTPPIKDFGGFNFSQILPDPSKPSKRSFIEDLLFNKVTLADAGFIKQYGDCLGDIAARDLICAQKFNGLTVLPPLLTDEMIAQYTSALLAGTITSGWTFGAGAALQIPFAMQMAYRFNGIGVTQNVLYENQKLIANQFNSAIGKIQDSLSSTASALGKLQDVVNQNAQALNTLVKQLSSNFGAISSVLNDILSRLDKVEAEVQIDRLITGRLQSLQTYVTQQLIRAAEIRASANLAATKMSECVLGQSKRVDFCGKGYHLMSFPQSAPHGVVFLHVTYVPAQEKNFTTAPAICHDGKAHFPREGVFVSNGTHWFVTQRNFYEPQIITTDNTFVSGNCDVVIGIVNNTVYDPLQPELDSFKEELDKYFKNHTSPDVDLGDISGINASVVNIQKEIDRLNEVAKNLNESLIDLQELGKYEQYIKGGGGSDIIKLLNEQVNKEMQSSNLYMSMSSWCYTHSLDGAGLFLFDHAAEEYEHAKKLIIFLNENNVPVQLTSISAPEHKFEGLTQIFQKAYEHEQHISESINNIVDHAIKSKDHATFNFLQWYVAEQHEEEVLFKDILDKIELIGNENHGLYLADQYVKGIAKSRKS

SEQ ID NO: 4636 - protein, 1379 aa, Artificial Sequence
  SARS-CoV-2/Australia/VIC01/2020__EPI_ISL_406844 spike protein (1-1211) Ferritin construct
MFVFLVLLPLVSSQCVNLTTRTQLPPAYTNSFTRGVYYPDKVFRSSVLHSTQDLFLPFFSNVTWFHAIHVSGTNGTKRFDNPVLPFNDGVYFASTEKSNIIRGWIFGTTLDSKTQSLLIVNNATNVVIKVCEFQFCNDPFLGVYYHKNNKSWMESEFRVYSSANNCTFEYVSQPFLMDLEGKQGNFKNLREFVFKNIDGYFKIYSKHTPINLVRDLPQGFSALEPLVDLPIGINITRFQTLLALHRRYLTPGDSSSGWTAGAAAYYVGYLQPRTFLLKYNENGTITDAVDCALDPLSETKCTLKSFTVEKGIYQTSNFRVQPTESIVRFPNITNLCPFGEVFNATRFASVYAWNRKRISNCVADYSVLYNSASFSTFKCYGVSPTKLNDLCFTNVYADSFVIRGDEVRQIAPGQTGKIADYNYKLPDDFTGCVIAWNSNNLDSKVGGNYNYLYRLFRKSNLKPFERDISTEIYQAGSTPCNGVEGFNCYFPLQSYGFQPTNGVGYQPYRVVVLSFELLHAPATVCGPKKSTNLVKNKCVNFNFNGLTGTGVLTESNKKFLPFQQFGRDIADTTDAVRDPQTLEILDITPCSFGGVSVITPGTNTSNQVAVLYQDVNCTEVPVAIHADQLTPTWRVYSTGSNVFQTRAGCLIGAEHVNNSYECDIPIGAGICASYQTQTNSPRRARSVASQSIIAYTMSLGAENSVAYSNNSIAIPTNFTISVTTEILPVSMTKTSVDCTMYICGDSTECSNLLLQYGSFCTQLNRALTGIAVEQDKNTQEVFAQVKQIYKTPPIKDFGGFNFSQILPDPSKPSKRSFIEDLLFNKVTLADAGFIKQYGDCLGDIAARDLICAQKFNGLTVLPPLLTDEMIAQYTSALLAGTITSGWTFGAGAALQIPFAMQMAYRFNGIGVTQNVLYENQKLIANQFNSAIGKIQDSLSSTASALGKLQDVVNQNAQALNTLVKQLSSNFGAISSVLNDILSRLDKVEAEVQIDRLITGRLQSLQTYVTQQLIRAAEIRASANLAATKMSECVLGQSKRVDFCGKGYHLMSFPQSAPHGVVFLHVTYVPAQEKNFTTAPAICHDGKAHFPREGVFVSNGTHWFVTQRNFYEPQIITTDNTFVSGNCDVVIGIVNNTVYDPLQPELDSFKEELDKYFKNHTSPDVDLGDISGINASVVNIQKEIDRLNEVAKNLNESLIDLQELGKYEQYIKGGGGSDIIKLLNEQVNKEMQSSNLYMSMSSWCYTHSLDGAGLFLFDHAAEEYEHAKKLIIFLNENNVPVQLTSISAPEHKFEGLTQIFQKAYEHEQHISESINNIVDHAIKSKDHATFNFLQWYVAEQHEEEVLFKDILDKIELIGNENHGLYLADQYVKGIAKSRKS

SEQ ID NO: 4637 - protein, 1379 aa, Artificial Sequence
  SARS-CoV-2/Germany/BavPat1/2020__EPI_ISL_406862 spike protein (1-1211) Ferritin construct
MFVFLVLLPLVSSQCVNLTTRTQLPPAYTNSFTRGVYYPDKVFRSSVLHSTQDLFLPFFSNVTWFHAIHVSGTNGTKRFDNPVLPFNDGVYFASTEKSNIIRGWIFGTTLDSKTQSLLIVNNATNVVIKVCEFQFCNDPFLGVYYHKNNKSWMESEFRVYSSANNCTFEYVSQPFLMDLEGKQGNFKNLREFVFKNIDGYFKIYSKHTPINLVRDLPQGFSALEPLVDLPIGINITRFQTLLALHRSYLTPGDSSSGWTAGAAAYYVGYLQPRTFLLKYNENGTITDAVDCALDPLSETKCTLKSFTVEKGIYQTSNFRVQPTESIVRFPNITNLCPFGEVFNATRFASVYAWNRKRISNCVADYSVLYNSASFSTFKCYGVSPTKLNDLCFTNVYADSFVIRGDEVRQIAPGQTGKIADYNYKLPDDFTGCVIAWNSNNLDSKVGGNYNYLYRLFRKSNLKPFERDISTEIYQAGSTPCNGVEGFNCYFPLQSYGFQPTNGVGYQPYRVVVLSFELLHAPATVCGPKKSTNLVKNKCVNFNFNGLTGTGVLTESNKKFLPFQQFGRDIADTTDAVRDPQTLEILDITPCSFGGVSVITPGTNTSNQVAVLYQGVNCTEVPVAIHADQLTPTWRVYSTGSNVFQTRAGCLIGAEHVNNSYECDIPIGAGICASYQTQTNSPRRARSVASQSIIAYTMSLGAENSVAYSNNSIAIPTNFTISVTTEILPVSMTKTSVDCTMYICGDSTECSNLLLQYGSFCTQLNRALTGIAVEQDKNTQEVFAQVKQIYKTPPIKDFGGFNFSQILPDPSKPSKRSFIEDLLFNKVTLADAGFIKQYGDCLGDIAARDLICAQKFNGLTVLPPLLTDEMIAQYTSALLAGTITSGWTFGAGAALQIPFAMQMAYRFNGIGVTQNVLYENQKLIANQFNSAIGKIQDSLSSTASALGKLQDVVNQNAQALNTLVKQLSSNFGAISSVLNDILSRLDKVEAEVQIDRLITGRLQSLQTYVTQQLIRAAEIRASANLAATKMSECVLGQSKRVDFCGKGYHLMSFPQSAPHGVVFLHVTYVPAQEKNFTTAPAICHDGKAHFPREGVFVSNGTHWFVTQRNFYEPQIITTDNTFVSGNCDVVIGIVNNTVYDPLQPELDSFKEELDKYFKNHTSPDVDLGDISGINASVVNIQKEIDRLNEVAKNLNESLIDLQELGKYEQYIKGGGGSDIIKLLNEQVNKEMQSSNLYMSMSSWCYTHSLDGAGLFLFDHAAEEYEHAKKLIIFLNENNVPVQLTSISAPEHKFEGLTQIFQKAYEHEQHISESINNIVDHAIKSKDHATFNFLQWYVAEQHEEEVLFKDILDKIELIGNENHGLYLADQYVKGIAKSRKS

SEQ ID NO: 4638 - protein, 1379 aa, Artificial Sequence
  SARS-CoV-2/Wuhan/HBCDC-HB-02/2020__EPI_ISL_412978 spike protein (1-1211) Ferritin construct
MFVFLVLLPLVSSQCVNLTTRTQLPPAYTNSFTRGVYYPDKVFRSSVLHSTQDLFLPFFSNVTWFHAIHVSGTNGTKRFDNPVLPFNDGVYFASTEKSNIIRGWIFGTTLDSKTQSLLIVNNATNVVIKVCEFQFCNDPFLGVYYHKNNKSWMESEFRVYSSANNCTFEYVSQPFLMDLEGKQGNFKNLREFVFKNIDGYFKIYSKHTPINLVRDLPQGFSALEPLVDLPIGINITRFQTLLALHRSYLTPGDSSSGWTAGAAAYYVGYLQPRTFLLKYNENGTITDAVDCALDPLSETKCTLKSFTVEKGIYQTSNFRVQPTESIVRFPNITNLCPFGEVFNATRFASVYAWNRKRISNCVADYSVLYNSASFSTFKCYGVSPTKLNDLCFTNVYADSFVIRGDEVRQIAPGQTGKIADYNYKLPDDFTGCVIAWNSNNLDSKVGGNYNYLYRLFRKSNLKPFERDISTEIYQAGSTPCNGVEGFNCYFPLQSYGFQPTNGVGYQPYRVVVLSFELLHAPATVCGPKKSTNLVKNKCVNFNFNGLTGTGVLTESNKKFLPFQQFGRDIADTTDAVRDPQTLEILDITPCSFGGVSVITPGTNTSNQVAVLYQDVNCTEVPVAIHADQLTPTWRVYSTGSNVFQTRAGCLIGAEHVNNSYECDIPIGAGICASYQTQTNSPRRARSVASQSIIAYTMSLGAENSVAYSNNSIAIPTNFTISVTTEILPVSMTKTSVDCTMYICGDSTECSNFLLQYGSFCTQLNRALTGIAVEQDKNTQEVFAQVKQIYKTPPIKDFGGFNFSQILPDPSKPSKRSFIEDLLFNKVTLADAGFIKQYGDCLGDIAARDLICAQKFNGLTVLPPLLTDEMIAQYTSALLAGTITSGWTFGAGAALQIPFAMQMAYRFNGIGVTQNVLYENQKLIANQFNSAIGKIQDSLSSTASALGKLQDVVNQNAQALNTLVKQLSSNFGAISSVLNDILSRLDKVEAEVQIDRLITGRLQSLQTYVTQQLIRAAEIRASANLAATKMSECVLGQSKRVDFCGKGYHLMSFPQSAPHGVVFLHVTYVPAQEKNFTTAPAICHDGKAHFPREGVFVSNGTHWFVTQRNFYEPQIITTDNTFVSGNCDVVIGIVNNTVYDPLQPELDSFKEELDKYFKNHTSPDVDLGDISGINASVVNIQKEIDRLNEVAKNLNESLIDLQELGKYEQYIKGGGGSDIIKLLNEQVNKEMQSSNLYMSMSSWCYTHSLDGAGLFLFDHAAEEYEHAKKLIIFLNENNVPVQLTSISAPEHKFEGLTQIFQKAYEHEQHISESINNIVDHAIKSKDHATFNFLQWYVAEQHEEEVLFKDILDKIELIGNENHGLYLADQYVKGIAKSRKS

SEQ ID NO: 4639 - protein, 1379 aa, Artificial Sequence
  SARS-CoV-2/Australia/QLD02/2020__EPI_ISL_407896 spike protein (1-1211) Ferritin construct
MFVFLVLLPLVSSQCVNLTTRTQLPPAYTNSFTRGVYYPDKVFRSSVLHSTQDLFLPFFSNVTWFHAIHVSGTNGTKRFDNPVLPFNDGVYFASTEKSNIIRGWIFGTTLDSKTQSLLIVNNATNVVIKVCEFQFCNDPFLGVYYHKNNKSWMESEFRVYSSANNCTFEYVSQPFLMDLEGKQGNFKNLREFVFKNIDGYFKIYSKHTPINLVRDLPQGFSALEPLVDLPIGINITRFQTLLALHRSYLTPGDSSSGWTAGAAAYYVGYLQPRTFLLKYNENGTITDAVDCALDPLSETKCTLKSFTVEKGIYQTSNFRVQPTESIVRFPNITNLCPFGEVFNATRFASVYAWNRKRISNCVADYSVLYNSASFSTFKCYGVSPTKLNDLCFTNVYADSFVIRGDEVRQIAPGQTGKIADYNYKLPDDFTGCVIAWNSNNLDSKVGGNYNYLYRLFRKSNLKPFERDISTEIYQAGSTPCNGVEGFNCYFPLQSYGFQPTNGVGYQPYRVVVLSFELLHAPATVCGPKKSTNLVKNKCVNFNFNGLTGTGVLTESNKKFLPFQQFGRDIADTTDAVRDPQTLEILDITPCSFGGVSVITPGTNTSNQVAVLYQDVNCTEVPVAIHADQLTPTWRVYSTGSNVFQTRAGCLIGAEHVNNSYECDIPIGAGICASYQTQTNSPRRARSVASQSIIAYTMSLGAENSVAYSNNSIAIPTNFTISVTTEILPVSMTKTSVDCTMYICGDSTECSNLLLQYGSFCTQLNRALTGIAVEQDKNTQEVFAQVKQIYKTPPIKDFGGFNFSQILPDPSKPSKRSFIEDLLFNKVTLADAGFIKQYGDCLGDIAARDLICAQKFNGLTVLPPLLTDEMIAQYTSALLAGTITSGWTFGAGAALQIPFAMQMAYRFNGIGVTQNVLYENQKLIANQFNSAIGKIQDSLSSTASALGKLQDVVNQNAQALNTLVKQLSSNFGAISSVLNDILSRLDKVEAEVQIDRLITGRLQSLQTYVTQQLIRAAEIRASANLAATKMSECVLGQSKRVDFCGKGYHLMSFPQSAPHGVVFLHVTYVPAQEKNFTTAPAICHDGKAHFPREGVFVSNGTHWFVTQRNFYEPQIITTDNTFVSGNCDVVIGIVNNTVYDPLQLELDSFKEELDKYFKNHTSPDVDLGDISGINASVVNIQKEIDRLNEVAKNLNESLIDLQELGKYEQYIKGGGGSDIIKLLNEQVNKEMQSSNLYMSMSSWCYTHSLDGAGLFLFDHAAEEYEHAKKLIIFLNENNVPVQLTSISAPEHKFEGLTQIFQKAYEHEQHISESINNIVDHAIKSKDHATFNFLQWYVAEQHEEEVLFKDILDKIELIGNENHGLYLADQYVKGIAKSRKS

SEQ ID NO: 4640 - protein, 1379 aa, Artificial Sequence
  SARS-CoV-2/India/1-31/2020__EPI_ISL_413523 spike protein (1-1211) Ferritin construct
MFVFLVLLPLVSSQCVNLTTRTQLPPAYTNSFTRGVYYPDKVFRSSVLHSTQDLFLPFFSNVTWFHAIHVSGTNGTKRFDNPVLPFNDGVYFASTEKSNIIRGWIFGTTLDSKTQSLLIVNNATNVVIKVCEFQFCNDPFLGVYYHKNNKSWMESEFRVYSSANNCTFEYVSQPFLMDLEGKQGNFKNLREFVFKNIDGYFKIYSKHTPINLVRDLPQGFSALEPLVDLPIGINITRFQTLLALHRSYLTPGDSSSGWTAGAAAYYVGYLQPRTFLLKYNENGTITDAVDCALDPLSETKCTLKSFTVEKGIYQTSNFRVQPTESIVRFPNITNLCPFGEVFNATRFASVYAWNRKRISNCVADYSVLYNSASFSTFKCYGVSPTKLNDLCFTNVYADSFVIRGDEVRQIAPGQTGKIADYNYKLPDDFTGCVIAWNSNNLDSKVGGNYNYLYRLFRKSNLKPFERDISTEIYQAGSTPCNGVEGFNCYFPLQSYGFQPTNGVGYQPYRVVVLSFELLHAPATVCGPKKSTNLVKNKCVNFNFNGLTGTGVLTESNKKFLPFQQFGRDIADTTDAVRDPQTLEILDITPCSFGGVSVITPGTNTSNQVAVLYQDVNCTEVPVAIHADQLTPTWRVYSTGSNVFQTRAGCLIGAEHVNNSYECDIPIGAGICASYQTQTNSPRRARSVASQSIIAYTMSLGAENSVAYSNNSIAIPTNFTISVTTEILPVSMTKTSVDCTMYICGDSTECSNLLLQYGSFCTQLNRALTGIAVEQDKNTQEVFAQVKQIYKTPPIKDFGGFNFSQILPDPSKPSKRSFIEDLLFNKVTLADAGFIKQYGDCLGDIAARDLICAQKFNGLTVLPPLLTDEMIAQYTSALLAGTITSGWTFGAGAALQIPFAMQMAYRFNGIGVTQNVLYENQKLIANQFNSVIGKIQDSLSSTASALGKLQDVVNQNAQALNTLVKQLSSNFGAISSVLNDILSRLDKVEAEVQIDRLITGRLQSLQTYVTQQLIRAAEIRASANLAATKMSECVLGQSKRVDFCGKGYHLMSFPQSAPHGVVFLHVTYVPAQEKNFTTAPAICHDGKAHFPREGVFVSNGTHWFVTQRNFYEPQIITTDNTFVSGNCDVVIGIVNNTVYDPLQPELDSFKEELDKYFKNHTSPDVDLGDISGINASVVNIQKEIDRLNEVAKNLNESLIDLQELGKYEQYIKGGGGSDIIKLLNEQVNKEMQSSNLYMSMSSWCYTHSLDGAGLFLFDHAAEEYEHAKKLIIFLNENNVPVQLTSISAPEHKFEGLTQIFQKAYEHEQHISESINNIVDHAIKSKDHATFNFLQWYVAEQHEEEVLFKDILDKIELIGNENHGLYLADQYVKGIAKSRKS

SEQ ID NO: 4641 - protein, 1379 aa, Artificial Sequence
  SARS-CoV-2/Guangdong/GD2020087-P0008/2020__EPI_ISL_413863 spike protein (1-1211) Ferritin construct
MFVFLVLLPLVSSQCVNLTTRTQLPPAYTNSFTRGVYYPDKVFRSSVLHSTQDLFLPFFSNVTWFHAIHVSGTNGTKRFDNPVLPFNDGVYFASTEKSNIIRGWIFGTTLDSKTQSLLIVNNATNVVIKVCEFQFCNDPFLGVYYHKNNKSWMESEFRVYSSANNCTFEYVSQPFLMDLEGKQGNFKNLREFVFKNIDGYFKIYSKHTPINLVRDLPQGFSALEPLVDLPIGINITRFQTLLALHRSYLTPGDSSSGWTAGAAAYYVGYLQPRTFLLKYNENGTITDAVDCALDPLSETKCTLKSFTVEKGIYQTSNFRVQPTESIVRFPNITNLCPFGEVFNATRFASVYAWNRKRISNCVADYSVLYNSASFSTFKCYGVSPTKLNDLCFTNVYADSFVIRGDEVREIAPGQTGKIADYNYKLPDDFTGCVIAWNSNNLDSKVGGNYNYLYRLFRKSNLKPFERDISTEIYQAGSTPCNGVEGFNCYFPLQSYGFQPTNGVGYQPYRVVVLSFELLHAPATVCGPKKSTNLVKNKCVNFNFNGLTGTGVLTESNKKFLPFQQFGRDIADTTDAVRDPQTLEILDITPCSFGGVSVITPGTNTSNQVAVLYQDVNCTEVPVAIHADQLTPTWRVYSTGSNVFQTRAGCLIGAEHVNNSYECDIPIGAGICASYQTQTNSPRRARSVASQSIIAYTMSLGAENSVAYSNNSIAIPTNFTISVTTEILPVSMTKTSVDCTMYICGDSTECSNLLLQYGSFCTQLNRALTGIAVEQDKNTQEVFAQVKQIYKTPPIKDFGGFNFSQILPDPSKPSKRSFIEDLLFNKVTLADAGFIKQYGDCLGDIAARDLICAQKFNGLTVLPPLLTDEMIAQYTSALLAGTITSGWTFGAGAALQIPFAMQMAYRFNGIGVTQNVLYENQKLIANQFNSAIGKIQDSLSSTASALGKLQDVVNQNAQALNTLVKQLSSNFGAISSVLNDILSRLDKVEAEVQIDRLITGRLQSLQTYVTQQLIRAAEIRASANLAATKMSECVLGQSKRVDFCGKGYHLMSFPQSAPHGVVFLHVTYVPAQEKNFTTAPAICHDGKAHFPREGVFVSNGTHWFVTQRNFYEPQIITTDNTFVSGNCDVVIGIVNNTVYDPLQPELDSFKEELDKYFKNHTSPDVDLGDISGINASVVNIQKEIDRLNEVAKNLNESLIDLQELGKYEQYIKGGGGSDIIKLLNEQVNKEMQSSNLYMSMSSWCYTHSLDGAGLFLFDHAAEEYEHAKKLIIFLNENNVPVQLTSISAPEHKFEGLTQIFQKAYEHEQHISESINNIVDHAIKSKDHATFNFLQWYVAEQHEEEVLFKDILDKIELIGNENHGLYLADQYVKGIAKSRKS

SEQ ID NO: 4642 - protein, 1379 aa, Artificial Sequence
  SARS-CoV-2/Sweden/01/2020__EPI_ISL_411951 spike protein (1-1211) Ferritin construct
MFVFLVLLPLVSSQCVNLTTRTQLPPAYTNSFTRGVYYPDKVFRSSVLHSTQDLFLPFFSNVTWFHAIHVSGTNGTKRFDNPVLPFNDGVYFASTEKSNIIRGWIFGTTLDSKTQSLLIVNNATNVVIKVCEFQFCNDPFLGVYYHKNNKSWMESEFRVYSSANNCTFEYVSQPFLMDLEGKQGNFKNLREFVFKNIDGYFKIYSKHTPINLVRDLPQGFSALEPLVDLPIGINITRFQTLLALHRSYLTPGDSSSGWTAGAAAYYVGYLQPRTFLLKYNENGTITDAVDCALDPLSETKCTLKSFTVEKGIYQTSNFRVQPTESIVRFPNITNLCPFGEVFNATRFASVYAWNRKRISNCVADYSVLYNSASFSTFKCYGVSPTKLNDLCFTNVYADSFVIRGDEVRQIAPGQTGKIADYNYKLPDDFTGCVIAWNSNNLDSKVGGNYNYLYRLFRKSNLKPFERDISTEIYQAGSTPCNGVEGFNCYFPLQSYGFQPTNGVGYQPYRVVVLSFELLHAPATVCGPKKSTNLVKNKCVNFNFNGLTGTGVLTESNKKFLPFQQFGRDIADTTDAVRDPQTLEILDITPCSFGGVSVITPGTNTSNQVAVLYQDVNCTEVPVAIHADQLTPTWRVYSTGSNVFQTRAGCLIGAEHVNNSYECDIPIGAGICASYQTQTNSPRRARSVASQSIIAYTMSLGAENSVAYSNNSIAIPTNFTISVTTEILPVSMTKTSVDCTMYICGDSTECSNLLLQYGSFCTQLNRALTGIAVEQDKNTQEVFAQVKQIYKTPPIKDCGGFNFSQILPDPSKPSKRSFIEDLLFNKVTLADAGFIKQYGDCLGDIAARDLICAQKFNGLTVLPPLLTDEMIAQYTSALLAGTITSGWTFGAGAALQIPFAMQMAYRFNGIGVTQNVLYENQKLIANQFNSAIGKIQDSLSSTASALGKLQDVVNQNAQALNTLVKQLSSNFGAISSVLNDILSRLDKVEAEVQIDRLITGRLQSLQTYVTQQLIRAAEIRASANLAATKMSECVLGQSKRVDFCGKGYHLMSFPQSAPHGVVFLHVTYVPAQEKNFTTAPAICHDGKAHFPREGVFVSNGTHWFVTQRNFYEPQIITTDNTFVSGNCDVVIGIVNNTVYDPLQPELDSFKEELDKYFKNHTSPDVDLGDISGINASVVNIQKEIDRLNEVAKNLNESLIDLQELGKYEQYIKGGGGSDIIKLLNEQVNKEMQSSNLYMSMSSWCYTHSLDGAGLFLFDHAAEEYEHAKKLIIFLNENNVPVQLTSISAPEHKFEGLTQIFQKAYEHEQHISESINNIVDHAIKSKDHATFNFLQWYVAEQHEEEVLFKDILDKIELIGNENHGLYLADQYVKGIAKSRKS

SEQ ID NO: 4643 - protein, 1379 aa, Artificial Sequence
  SARS-CoV-2/Tianmen/HBCDC-HB-07/2020__EPI_ISL_412983 spike protein (1-1211) Ferritin construct
MFVFLVLLPLVSSQCVNLTTRTQLPPAYTNSFTRGVYYPDKVFRSSVLHSTQDLFLPFFSNVTWFHAIHVSGTNGTKRFDNPVLPFNDGVYFASTEKSNIIRGWIFGTTLDSKTQSLLIVNNATNVVIKVCEFQFCNDPFLGVYYHKNNKSWMESEFRVYSSANNCTFEYVSQPFLMDLEGKQGNFKNLREFVFKNIDGYFKIYSKHTPINLVRDLPQGFSALEPLVDLPIGINITRFQTLLALHRSYLTPGDSSSGWTAGAAAYYVGYLQPRTFLLKYNENGTITDAVDCALDPLSETKCTLKSFTVEKGIYQTSNFRVQPTESIVRFPNITNLCPFGEVFNATRFASVYAWNRKRISNCVADYSVLYNSASFSTFKCYGVSPTKLNDLCFTNVYADSFVIRGDEVRQIAPGQTGKIADYNYKLPDDFTGCVIAWNSNNLDSKVGGNYNYLYRLFRKSNLKPFERDISTEIYQAGSTPCNGVEGFNCYFPLQSYGFQPTNGVGYQPYRVVVLSFELLHAPATVCGPKKSTNLVKNKCVNFNFNGLTGTGVLTESNKKFLPFQQFGRDIADTTDAVRDPQTLEILDITPCSFGGVSVITPGTNTSNQVAVLYQDLNCTEVPVAIHADQLTPTWRVYSTGSNVFQTRAGCLIGAEHVNNSYECDIPIGAGICASYQTQTNSPRRARSVASQSIIAYTMSLGAENSVAYSNNSIAIPTNFTISVTTEILPVSMTKTSVDCTMYICGDSTECSNLLLQYGSFCTQLNRALTGIAVEQDKNTQEVFAQVKQIYKTPPIKDFGGFNFSQILPDPSKPSKRSFIEDLLFNKVTLADAGFIKQYGDCLGDIAARDLICAQKFNGLTVLPPLLTDEMIAQYTSALLAGTITSGWTFGAGAALQIPFAMQMAYRFNGIGVTQNVLYENQKLIANQFNSAIGKIQDSLSSTASALGKLQDVVNQNAQALNTLVKQLSSNFGAISSVLNDILSRLDKVEAEVQIDRLITGRLQSLQTYVTQQLIRAAEIRASANLAATKMSECVLGQSKRVDFCGKGYHLMSFPQSAPHGVVFLHVTYVPAQEKNFTTAPAICHDGKAHFPREGVFVSNGTHWFVTQRNFYEPQIITTDNTFVSGNCDVVIGIVNNTVYDPLQPELDSFKEELDKYFKNHTSPDVDLGDISGINASVVNIQKEIDRLNEVAKNLNESLIDLQELGKYEQYIKGGGGSDIIKLLNEQVNKEMQSSNLYMSMSSWCYTHSLDGAGLFLFDHAAEEYEHAKKLIIFLNENNVPVQLTSISAPEHKFEGLTQIFQKAYEHEQHISESINNIVDHAIKSKDHATFNFLQWYVAEQHEEEVLFKDILDKIELIGNENHGLYLADQYVKGIAKSRKS

SEQ ID NO: 4644 - protein, 1379 aa, Artificial Sequence
  SARS-CoV-2/Hong Kong/case42_VM20002493/2020__EPI_ISL_414527 spike protein (1-1211) Ferritin construct
MFVFLVLLPLVSSQCVNLTTRTQLPPAYTNSFTRGVYYPDKVFRSSVLHSTQDLFLPFFSNVTWFHAIHVSGTNGTKRFDNPVLPFNDGVYFASTEKSNIIRGWIFGTTLDSKTQSLLIVNNATNVVIKVCEFQFCNDPFLGVYYHKNNKSWMESEFRVYSSANNCTFEYVSQPFLMDLEGKQGNFKNLREFVFKNIDGYFKIYSKHTPINLVRDLPQGFSALEPLVDLPIGINITRFQTLLALHRSYLTPGDSSSGWTAGAAAYYVGYLQPRTFLLKYNENGTITDAVDCALDPLSETKCTLKSFTVEKGIYQTSNFRVQPTESIVRFPNITNLCPFGEVFNATRFASVYAWNRKRISNCVADYSVLYNSASFSTFKCYGVSPTKLNDLCFTNVYADSFVIRGDEVRQIAPGQTGKIADYNYKLPDDFTGCVIAWNSNNLDSKVGGNYNYLYRLFRKSNLKPFERDISTEIYQAGSTPCNGVEGFNCYFPLQSYGFQPTNGVGYQPYRVVVLSFELLHAPATVCGPKKSTNLVKNKCVNFNFNGLTGTGVLTESNKKFLPFQQFGRDIADTTDAVRDPQTLEILDITPCSFGGVSVITPGTNTSNQVAVLYQDVNCTEVPVAIHADQLTPTWRVYSTGSNVFQTRAGCLIGAEHVNNSYECDIPIGAGICASYQTQTNSPRRARSVASQSIIAYTMSLGAENSVAYSNNSIAIPTNFAISVTTEILPVSMTKTSVDCTMYICGDSTECSNLLLQYGSFCTQLNRALTGIAVEQDKNTQEVFAQVKQIYKTPPIKDFGGFNFSQILPDPSKPSKRSFIEDLLFNKVTLADAGFIKQYGDCLGDIAARDLICAQKFNGLTVLPPLLTDEMIAQYTSALLAGTITSGWTFGAGAALQIPFAMQMAYRFNGIGVTQNVLYENQKLIANQFNSAIGKIQDSLSSTASALGKLQDVVNQNAQALNTLVKQLSSNFGAISSVLNDILSRLDKVEAEVQIDRLITGRLQSLQTYVTQQLIRAAEIRASANLAATKMSECVLGQSKRVDFCGKGYHLMSFPQSAPHGVVFLHVTYVPAQEKNFTTAPAICHDGKAHFPREGVFVSNGTHWFVTQRNFYEPQIITTDNTFVSGNCDVVIGIVNNTVYDPLQPELDSFKEELDKYFKNHTSPDVDLGDISGINASVVNIQKEIDRLNEVAKNLNESLIDLQELGKYEQYIKGGGGSDIIKLLNEQVNKEMQSSNLYMSMSSWCYTHSLDGAGLFLFDHAAEEYEHAKKLIIFLNENNVPVQLTSISAPEHKFEGLTQIFQKAYEHEQHISESINNIVDHAIKSKDHATFNFLQWYVAEQHEEEVLFKDILDKIELIGNENHGLYLADQYVKGIAKSRKS

SEQ ID NO: 4645 - protein, 1379 aa, Artificial Sequence
  SARS-CoV-2/USA/CruiseA-23/2020__EPI_ISL_414482 spike protein (1-1211) Ferritin construct
MFVFLVLLPLVSSQCVNLTTRTQLPPAYTNSFTRGVYYPDKVFRSSVLHSTQDLFLPFFSNVTWFHAIHVSGTNGTKRFDNPVLPFNDGVYFASTEKSNIIRGWIFGTTLDSKTQSLLIVNNATNVVIKVCEFQFCNDPFLGVYYHKNNKSWMESEFRVYSSANNCTFEYVSQPFLMDLEVKQGNFKNLREFVFKNIDGYFKIYSKHTPINLVRDLPQGFSALEPLVDLPIGINITRFQTLLALHRSYLTPGDSSSGWTAGAAAYYVGYLQPRTFLLKYNENGTITDAVDCALDPLSETKCTLKSFTVEKGIYQTSNFRVQPTESIVRFPNITNLCPFGEVFNATRFASVYAWNRKRISNCVADYSVLYNSASFSTFKCYGVSPTKLNDLCFTNVYADSFVIRGDEVRQIAPGQTGKIADYNYKLPDDFTGCVIAWNSNNLDSKVGGNYNYLYRLFRKSNLKPFERDISTEIYQAGSTPCNGVEGFNCYFPLQSYGFQPTNGVGYQPYRVVVLSFELLHAPATVCGPKKSTNLVKNKCVNFNFNGLTGTGVLTESNKKFLPFQQFGRDIADTTDAVRDPQTLEILDITPCSFGGVSVITPGTNTSNQVAVLYQDVNCTEVPVAIHADQLTPTWRVYSTGSNVFQTRAGCLIGAEHVNNSYECDIPIGAGICASYQTQTNSPRRARSVASQSIIAYTMSLGAENSVAYSNNSIAIPTNFTISVTTEILPVSMTKTSVDCTMYICGDSTECSNLLLQYGSFCTQLNRALTGIAVEQDKNTQEVFAQVKQIYKTPPIKDFGGFNFSQILPDPSKPSKRSFIEDLLFNKVTLADAGFIKQYGDCLGDIAARDLICAQKFNGLTVLPPLLTDEMIAQYTSALLAGTITSGWTFGAGAALQIPFAMQMAYRFNGIGVTQNVLYENQKLIANQFNSAIGKIQDSLSSTASALGKLQDVVNQNAQALNTLVKQLSSNFGAISSVLNDILSRLDKVEAEVQIDRLITGRLQSLQTYVTQQLIRAAEIRASANLAATKMSECVLGQSKRVDFCGKGYHLMSFPQSAPHGVVFLHVTYVPAQEKNFTTAPAICHDGKAHFPREGVFVSNGTHWFVTQRNFYEPQIITTDNTFVSGNCDVVIGIVNNTVYDPLQPELDSFKEELDKYFKNHTSPDVDLGDISGINASVVNIQKEIDRLNEVAKNLNESLIDLQELGKYEQYIKGGGGSDIIKLLNEQVNKEMQSSNLYMSMSSWCYTHSLDGAGLFLFDHAAEEYEHAKKLIIFLNENNVPVQLTSISAPEHKFEGLTQIFQKAYEHEQHISESINNIVDHAIKSKDHATFNFLQWYVAEQHEEEVLFKDILDKIELIGNENHGLYLADQYVKGIAKSRKS

SEQ ID NO: 4646 - protein, 1379 aa, Artificial Sequence
  SARS-CoV-2/Hong Kong/case85_VM20002868/2020__EPI_ISL_414519 spike protein (1-1211) Ferritin construct
MFVFLVLVPLVSSQCVNLTTRTQLPPAYTNSFTRGVYYPDKVFRSSVLHSTQDLFLPFFSNVTWFHAIHVSGTNGTKRFDNPVLPFNDGVYFASTEKSNIIRGWIFGTTLDSKTQSLLIVNNATNVVIKVCEFQFCNDPFLGVYYHKNNKSWMESEFRVYSSANNCTFEYVSQPFLMDLEGKQGNFKNLREFVFKNIDGYFKIYSKHTPINLVRDLPQGFSALEPLVDLPIGINITRFQTLLALHRSYLTPGDSSSGWTAGAAAYYVGYLQPRTFLLKYNENGTITDAVDCALDPLSETKCTLKSFTVEKGIYQTSNFRVQPTESIVRFPNITNLCPFGEVFNATRFASVYAWNRKRISNCVADYSVLYNSASFSTFKCYGVSPTKLNDLCFTNVYADSFVIRGDEVRQIAPGQTGKIADYNYKLPDDFTGCVIAWNSNNLDSKVGGNYNYLYRLFRKSNLKPFERDISTEIYQAGSTPCNGVEGFNCYFPLQSYGFQPTNGVGYQPYRVVVLSFELLHAPATVCGPKKSTNLVKNKCVNFNFNGLTGTGVLTESNKKFLPFQQFGRDIADTTDAVRDPQTLEILDITPCSFGGVSVITPGTNTSNQVAVLYQDVNCTEVPVAIHADQLTPTWRVYSTGSNVFQTRAGCLIGAEHVNNSYECDIPIGAGICASYQTQTNSPRRARSVASQSIIAYTMSLGAENSVAYSNNSIAIPTNFTISVTTEILPVSMTKTSVDCTMYICGDSTECSNLLLQYGSFCTQLNRALTGIAVEQDKNTQEVFAQVKQIYKTPPIKDFGGFNFSQILPDPSKPSKRSFIEDLLFNKVTLADAGFIKQYGDCLGDIAARDLICAQKFNGLTVLPPLLTDEMIAQYTSALLAGTITSGWTFGAGAALQIPFAMQMAYRFNGIGVTQNVLYENQKLIANQFNSAIGKIQDSLSSTASALGKLQDVVNQNAQALNTLVKQLSSNFGAISSVLNDILSRLDKVEAEVQIDRLITGRLQSLQTYVTQQLIRAAEIRASANLAATKMSECVLGQSKRVDFCGKGYHLMSFPQSAPHGVVFLHVTYVPAQEKNFTTAPAICHDGKAHFPREGVFVSNGTHWFVTQRNFYEPQIITTDNTFVSGNCDVVIGIVNNTVYDPLQPELDSFKEELDKYFKNHTSPDVDLGDISGINASVVNIQKEIDRLNEVAKNLNESLIDLQELGKYEQYIKGGGGSDIIKLLNEQVNKEMQSSNLYMSMSSWCYTHSLDGAGLFLFDHAAEEYEHAKKLIIFLNENNVPVQLTSISAPEHKFEGLTQIFQKAYEHEQHISESINNIVDHAIKSKDHATFNFLQWYVAEQHEEEVLFKDILDKIELIGNENHGLYLADQYVKGIAKSRKS

SEQ ID NO: 4647 - protein, 1379 aa, Artificial Sequence; identical to SEQ ID NO: 4637
  SARS-CoV-2/England/200990660/2020__EPI_ISL_414523 spike protein (1-1211) Ferritin construct

SEQ ID NO: 4648 - protein, 1379 aa, Artificial Sequence
  SARS-CoV-2/Australia/NSW09/2020__EPI_ISL_413595 spike protein (1-1211) Ferritin construct
MFVFLVLLPLVSSQCVNLTTRTQLPPAYTNSFTRGVYYPDKVFRSSVLHSTQDLFLPFFSNVTWFHAIHVSGTNGTKRFDNPVLPFNDGVYFASTEKSNIIRGWIFGTTLDSKTQSLLIVNNATNVVIKVCEFQFCNDPFLGVYYHKNNKSWMESEFRVYSSANNCTFEYVSQPFLMDLEGKQGNFKNLREFVFKNIDGYFKIYSKHTPINLVRDLPQGFSALEPLVDLPIGINITRFQTLLALHRSYLTPGDSSSGWTAGAAAYYVGYLQPRTFLLKYNENGTITDAVDCALDPLSETKCTLKSFTVEKGIYQTSNFRVQPTESIVRFPNITNLCPFGEVFNATRFASVYAWNRKRISNCVADYSVLYNSASFSTFKCYGVSPTKLNDLCFTNVYADSFVIRGDEVRQIAPGQTGKIADYNYKLPDDFTGCVIAWNSNNLDSKVGGNYNYLYRLFRKSNLKPFERDISTEIYQAGSTPCNGVEGFNCYFPLQSYGFQPTNGVGYQPYRVVVLSFELLHAPATVCGPKKSTNLVKNKCVNFNFNGLTGTGVLTESNKKFLPFQQFGRDIADTTDAVRDPQTLEILDITPCSFGGVSVITPGTNTSNQVAVLYQDVNCTEVPVAIHADQLTPTWRVYSTGSNVFQTRAGCLIGAEHVNNSYECDIPIGAGICASYQTQTNSPRRARSVASQSIIAYTMSLGAENSVAYSNNSIAIPTNFTISVTTEILPVSMTKTSVDCTMYICGDSTECSNLLLQYGSFCTQLNRALTGIAVEQDKNTQEVFAQVKQIYKTPPIKDFGGFNFSQILPDPSKPSKRSFIEDLLFNKVTLADAGFIKQYGDCLGDIAARDLICAQKFNGLTVLPPLLTDEMIAQYTSALLAGTITSGWTFGAGAALQIPFAMQMAYRFNGIGVTQNVLYENQKLIANQFNSAIGKIQDSLSFTASALGKLQDVVNQNAQALNTLVKQLSSNFGAISSVLNDILSRLDKVEAEVQIDRLITGRLQSLQTYVTQQLIRAAEIRASANLAATKMSECVLGQSKRVDFCGKGYHLMSFPQSAPHGVVFLHVTYVPAQEKNFTTAPAICHDGKAHFPREGVFVSNGTHWFVTQRNFYEPQIITTDNTFVSGNCDVVIGIVNNTVYDPLQPELDSFKEELDKYFKNHTSPDVDLGDISGINASVVNIQKEIDRLNEVAKNLNESLIDLQELGKYEQYIKGGGGSDIIKLLNEQVNKEMQSSNLYMSMSSWCYTHSLDGAGLFLFDHAAEEYEHAKKLIIFLNENNVPVQLTSISAPEHKFEGLTQIFQKAYEHEQHISESINNIVDHAIKSKDHATFNFLQWYVAEQHEEEVLFKDILDKIELIGNENHGLYLADQYVKGIAKSRKS

SEQ ID NO: 4649 - protein, 1379 aa, Artificial Sequence; identical to SEQ ID NO: 4629
  SARS-CoV-2/Australia/NSW10/2020__EPI_ISL_413596 spike protein (1-1211) Ferritin construct

SEQ ID NO: 4650 - protein, 1379 aa, Artificial Sequence
  SARS-CoV-2/Switzerland/1000477797/2020__EPI_ISL_413023 spike protein (1-1211) Ferritin construct
MFVFLVLLPLVSSQCVNLTTRTQLPPAYTNSFTRGVYYPDKVFRSSVLHSTQDLFLPFFSNVTWFHAIHVSGTNGTKRFDNPVLPFNDGVYFASTEKSNIIRGWIFGTTLDSKTQSLLIVNNATNVVIKVCEFQFCNDPFLGVYYHKNNKSWMESEFRVYSSANNCTFEYVSQPFLMDLEGKQGNFKNLREFVFKNIDGYFNIYSKHTPINLVRDLPQGFSALEPLVDLPIGINITRFQTLLALHRSYLTPGDSSSGWTAGAAAYYVGYLQPRTFLLKYNENGTITDAVDCALDPLSETKCTLKSFTVEKGIYQTSNFRVQPTESIVRFPNITNLCPFGEVFNATRFASVYAWNRKRISNCVADYSVLYNSASFSTFKCYGVSPTKLNDLCFTNVYADSFVIRGDEVRQIAPGQTGKIADYNYKLPDDFTGCVIAWNSNNLDSKVGGNYNYLYRLFRKSNLKPFERDISTEIYQAGSTPCNGVEGFNCYFPLQSYGFQPTNGVGYQPYRVVVLSFELLHAPATVCGPKKSTNLVKNKCVNFNFNGLTGTGVLTESNKKFLPFQQFGRDIADTTDAVRDPQTLEILDITPCSFGGVSVITPGTNTSNQVAVLYQGVNCTEVPVAIHADQLTPTWRVYSTGSNVFQTRAGCLIGAEHVNNSYECDIPIGAGICASYQTQTNSPRRARSVASQSIIAYTMSLGAENSVAYSNNSIAIPTNFTISVTTEILPVSMTKTSVDCTMYICGDSTECSNLLLQYGSFCTQLNRALTGIAVEQDKNTQEVFAQVKQIYKTPPIKDFGGFNFSQILPDPSKPSKRSFIEDLLFNKVTLADAGFIKQYGDCLGDIAARDLICAQKFNGLTVLPPLLTDEMIAQYTSALLAGTITSGWTFGAGAALQIPFAMQMAYRFNGIGVTQNVLYENQKLIANQFNSAIGKIQDSLSSTASALGKLQDVVNQNAQALNTLVKQLSSNFGAISSVLNDILSRLDKVEAEVQIDRLITGRLQSLQTYVTQQLIRAAEIRASANLAATKMSECVLGQSKRVDFCGKGYHLMSFPQSAPHGVVFLHVTYVPAQEKNFTTAPAICHDGKAHFPREGVFVSNGTHWFVTQRNFYEPQIITTDNTFVSGNCDVVIGIVNNTVYDPLQPELDSFKEELDKYFKNHTSPDVDLGDISGINASVVNIQKEIDRLNEVAKNLNESLIDLQELGKYEQYIKGGGGSDIIKLLNEQVNKEMQSSNLYMSMSSWCYTHSLDGAGLFLFDHAAEEYEHAKKLIIFLNENNVPVQLTSISAPEHKFEGLTQIFQKAYEHEQHISESINNIVDHAIKSKDHATFNFLQWYVAEQHEEEVLFKDILDKIELIGNENHGLYLADQYVKGIAKSRKS

SEQ ID NO: 4651 - protein, 1379 aa, Artificial Sequence
  SARS-CoV-2/Belgium/BA-02291/2020__EPI_ISL_415159 spike protein (1-1211) Ferritin construct
MFVFLVLLPLVSSQCVNLTTRTQLPPAYTNSFTRGVYYPDKVFRSSVLHSTQDLFLPFFSNVTWFHAIHVSGTNGTKRFDNPVLPFNDGVYFASTEKSNIIRGWIFGTTLDSKTQSLLIVNNATNVVIKVCEFQFCNDPFLGVYYHKNNKSWMESEFRVYSSANNCTFEYVSQPFLMDLEGKQGNFKNLREFVFKNIDGYFKIYSKHTPINLVRDLPQGFSALEPLVDLPIGINITRFQTLLALHRSYLTPGDSSSGWTAGAAAYYVGYLQPRTFLLKYNENGTITDAVDCALDPLSETKCTLKSFTVEKGIYQTSNFRVQPTESIVRFPNITNLCPFGEVFNATRFASVYAWNRKRISNCVADYSVLYNSASFSTFKCYGVSPTKLNDLCFTNVYADSFVIRGDEVRQIAPGQTGKIADYNYKLPDDFTGCVIAWNSNNLDSKVGGNYNYLYRLFRRSNLKPFERDISTEIYQAGSTPCNGVEGFNCYFPLQSYGFQPTNGVGYQPYRVVVLSFELLPAPATVCGPKKSTNLVKNKCVNFNFNGLTGTGVLTESNKKFLPFQQFGRDIADTTDAVRDPQTLEILDITPCSFGGVSVITPGTNTSNQVAVLYQGVNCTEVPVAIHADQLTPTWRVYSTGSNVFQTRAGCLIGAEHVNNSYECDIPIGAGICASYQTQTNSPRRARSVASQSIIAYTMSLGAENSVAYSNNSIAIPTNFTISVTTEILPVSMTKTSVDCTMYICGDSTECSNLLLQYGSFCTQLNRALTGIAVEQDKNTQEVFAQVKQIYKTPPIKDFGGFNFSQILPDPSKPSKRSFIEDLLFNKVTLADAGFIKQYGDCLGDIAARDLICAQKFNGLTVLPPLLTDEMIAQYTSALLAGTITSGWTFGAGAALQIPFAMQMAYRFNGIGVTQNVLYENQKLIANQFNSAIGKIQDSLSSAAPALGKLQDVVNQNAQALNTLVKQLSSNFGAISSVLNDILSRLDKVEAEVQIDRLITGRLQSLQTYVTQQLIRAAEIRASANLAATKMSECVLGQSKRVDFCGKGYHLMSFPQSAPHGVVFLHVTYVPAQEKNFTTAPAICHDGKAHFPREGVFVSNGTHWFVTQRNFYEPQIITTDNTFVSGNCDVVIGIVNNTVYDPLQPELDSFKEELDKYFKNHTSPDVDLGDISGINASVVNIQKEIDRLNEVAKNLNESLIDLQELGKYEQYIKGGGGSDIIKLLNEQVNKEMQSSNLYMSMSSWCYTHSLDGAGLFLFDHAAEEYEHAKKLIIFLNENNVPVQLTSISAPEHKFEGLTQIFQKAYEHEQHISESINNIVDHAIKSKDHATFNFLQWYVAEQHEEEVLFKDILDKIELIGNENHGLYLADQYVKGIAKSRKS

SEQ ID NO: 4652 - protein, 1379 aa, Artificial Sequence
  SARS-CoV-2/USA/WA8-UW5/2020__EPI_ISL_413486 spike protein (1-1211) Ferritin construct
MFVFLVLLPLVSSQCVNLTTRTQLPPAYTNSFTRGVYYPDKVFRSSVLHSTQDLFLPFFSNVTWFHAIHVSGTNGTKRFDNPVLPFNDGVYFASTEKSNIIRGWIFGTTLDSKTQSLLIVNNATNVVIKVCEFQFCNDPFLGVYYHKNNKSWMESEFRVYSSANNCTFEYVSQPFLMDLEGKQGNFKNLREFVFKNIDGYFKIYSKHTPINLVRDLPQGFSALEPLVDLPIGINITRFQTLLALHRSYLTPGDSSSGWTAGAAAYYVGYLQPRTFLLKYNENGTITDAVDCALDPLSETKCTLKSFTVEKGIYQTSNFRVQPTESIVRFPNITNLCPFGEVFNATRFASVYAWNRKRISNCVADYSVLYNSASFSTFKCYGVSPTKLNDLCFTNVYADSFVIRGDEVRQIAPGQTGKIADYNYKLPDDFTGCVIAWNSNNLDSKVGGNYNYLYRLFRKSNLKPFERDISTEIYQAGSTPCNGVEGFNCYFPLQSYGFQPTNGVGYQPYRVVVLSFELLHAPATVCGPKKSTNLVKNKCVNFNFNGLTGTGVLTESNKKFLPFQQFGRDIADTTDAVRDPQTLEILDITPCSFGGVSVITPGTNTSNQVAVLYQDVNCTEVPVAIHADQLTPTWRVYSTGSNVFQTRAGCLIGAEYVNNSYECDIPIGAGICASYQTQTNSPRRARSVASQSIIAYTMSLGAENSVAYSNNSIAIPTNFTISVTTEILPVSMTKTSVDCTMYICGDSTECSNLLLQYGSFCTQLNRALTGIAVEQDKNTQEVFAQVKQIYKTPPIKDFGGFNFSQILPDPSKPSKRSFIEDLLFNKVTLADAGFIKQYGDCLGDIAARDLICAQKFNGLTVLPPLLTDEMIAQYTSALLAGTITSGWTFGAGAALQIPFAMQMAYRFNGIGVTQNVLYENQKLIANQFNSAIGKIQDSLSSTASALGKLQDVVNQNAQALNTLVKQLSSNFGAISSVLNDILSRLDKVEAEVQIDRLITGRLQSLQTYVTQQLIRAAEIRASANLAATKMSECVLGQSKRVDFCGKGYHLMSFPQSAPHGVVFLHVTYVPAQEKNFTTAPAICHDGKAHFPREGVFVSNGTHWFVTQRNFYEPQIITTDNTFVSGNCDVVIGIVNNTVYDPLQPELDSFKEELDKYFKNHTSPDVDLGDISGINASVVNIQKEIDRLNEVAKNLNESLIDLQELGKYEQYIKGGGGSDIIKLLNEQVNKEMQSSNLYMSMSSWCYTHSLDGAGLFLFDHAAEEYEHAKKLIIFLNENNVPVQLTSISAPEHKFEGLTQIFQKAYEHEQHISESINNIVDHAIKSKDHATFNFLQWYVAEQHEEEVLFKDILDKIELIGNENHGLYLADQYVKGIAKSRKS

SEQ ID NO: 4653 - protein, 1379 aa, Artificial Sequence
  SARS-CoV-2/England/20102000506/2020__EPI_ISL_415147 spike protein (1-1211) Ferritin construct
MFVFLVLLPLVSSQCVNLTTRTQLPPAYTNSFTRGVYYPDKVFRSSVLHSTQDLFLPFFSNVTWFHAIHVSGTNGTKRFDNPVLPFNDGVYFASTEKSNIIRGWIFGTTLDSKTQSLLIVNNATNVVIKVCEFQFCNDPFLGVYYHKNNKSWMESEFRVYSSANNCTFEYVSQPFLMDLEGKQGNFKNLREFVFKNIDGYFKIYSKHTPINLVRDLPQGFSALEPLVDLPIGINITRFQTLLALHRSYLTPGDSSSGWTAGAAAYYVGYLQPRTFLLKYNENGTITDAVDCALDPLSETKCTLKSFTVEKGIYQTSNFRVQPTESIVRFPNITNLCPFGEVFNATRFASVYAWNRKRISNCVADYSVLYNSASFSTFKCYGVSPTKLNDLCFTNVYADSFVIRGDEVRQIAPGQTGKIADYNYKLPDDFTGCVIAWNSNNLDSKVGGNYNYLYRLFRKSNLKPFERDISTEIYQAGSTPCNGVEGFNCYFPLQSYGFQPTNGVGYQPYRVVVLSFELLHAPATVCGPKKSTNLVKNKCVNFNFNGLTGTGVLTESNKKFLPFQQFGRDIADTTDAVRDPQTLEILDITPCSFGGVSVITPGTNTSNQVAVLYQGVNCTEVPVAIHADQLTPTWRVYSTGSNVFQTRAGCLIGAEHVNNSYECDIPIGAGICASYQTQTNSPRRARSVASQSIIAYTMSLGAENSVAYSNNSIAIPTNFTISVTTEILPVSMTKTSVDCTMYICGDSTECSNLLLQYGSFCTQLNRALTGIAVEQDKNTQEVFAQVKQIYKTPPIKDFGGFNFSQILPDPSKPSKRSFIEDLLFNKVTLADAGFIKQYGYCLGDIAARDLICAQKFNGLTVLPPLLTDEMIAQYTSALLAGTITSGWTFGAGAALQIPFAMQMAYRFNGIGVTQNVLYENQKLIANQFNSAIGKIQDSLSSTASALGKLQDVVNQNAQALNTLVKQLSSNFGAISSVLNDILSRLDKVEAEVQIDRLITGRLQSLQTYVTQQLIRAAEIRASANLAATKMSECVLGQSKRVDFCGKGYHLMSFPQSAPHGVVFLHVTYVPAQEKNFTTAPAICHDGKAHFPREGVFVSNGTHWFVTQRNFYEPQIITTDNTFVSGNCDVVIGIVNNTVYDPLQPELDSFKEELDKYFKNHTSPDVDLGDISGINASVVNIQKEIDRLNEVAKNLNESLIDLQELGKYEQYIKGGGGSDIIKLLNEQVNKEMQSSNLYMSMSSWCYTHSLDGAGLFLFDHAAEEYEHAKKLIIFLNENNVPVQLTSISAPEHKFEGLTQIFQKAYEHEQHISESINNIVDHAIKSKDHATFNFLQWYVAEQHEEEVLFKDILDKIELIGNENHGLYLADQYVKGIAKSRKS

SEQ ID NO: 4654 - protein, 1379 aa, Artificial Sequence
  SARS-CoV-2/Belgium/VAG-03013/2020__EPI_ISL_415155 spike protein (1-1211) Ferritin construct
MFVFLVLLPLVSSQCVNLTTRTQLPPAYTNSFTRGVYYPDKVFRSSVLHSTQDLFLPFFSNVTWFHAIHVSGTNGTKRFDNPVLPFNDGVYFASTEKSNIIRGWIFGTTLDSKTQSLLIVNNATNVVIKVCEFQFCNDPFLGVYYHKNNKSWMESEFRVYSSANNCTFEYVSQPFLMDLEGKQGNFKNLREFVFKNIDGYFKIYSKHTPINLVRDLPQGFSALEPLVDLPIGINITRFQTLLALHRSYLTPGDSSSGWTAGAAAYYVGYLQPRTFLLKYNENGTITDAVDCALDPLSETKCTLKSFTVEKGIYQTSNFRVQPTESIVRFPNITNLCPFGEVFNATRFASVYAWNRKRISNCVADYSVLYNSASFSTFKCYGVSPTKLNDLCFTNVYADSFVIRGDEVRQIAPGQTGKIADYNYKLPDDFTGCVIAWNSNNLDSKVGGNYNYLYRLFRKSNLKPFERDISTEIYQAGSTPCNGVEGFNCYFPLQSYGFQPTNGVGYQPYRVVVLSFELLHAPATVCGPKKSTNLVKNKCVNFNFNGLTGTGVLTESNKKFLPFQQFGRDIADTTDAVRDPQTLEILDITPCSFGGVSVITPGTNTSNQVAVLYQGVNCTEVPVAIHADQLTPTWRVYSTGSNVFQTRAGCLIGAEHVNNSYECDIPIGAGICASYQTQTNSPRRARSVASQSIIAYTMSLGAENSVAYSNNSIAIPTNFTISVTTEILPVSMTKTSVDCTMYICGDSTECSNLLLQYGSFCTQLNRALTGIAVEQDKNTQEVFAQVKQIYKTPPIKDFGGFNFSQILPDPSKPSKRSFIEDLLFNKVTLADAGFIKQYGDCLGDIAARDLICAQKFNGLTVLPPLLTDEMIAQYTSALLAGTITSGWTFGAGAALQIPFAMQMAYRFNGIGVTQNVLYENQKLIANQFNSAIGKIQDSLSSTATALGKLQDVVNQNAQALNTLVKQLSSNFGAISSVLNDILSRLDKVEAEVQIDRLITGRLQSLQTYVTQQLIRAAEIRASANLAATKMSECVLGQSKRVDFCGKGYHLMSFPQSAPHGVVFLHVTYVPAQEKNFTTAPAICHDGKAHFPREGVFVSNGTHWFVTQRNFYEPQIITTDNTFVSGNCDVVIGIVNNTVYDPLQPELDSFKEELDKYFKNHTSPDVDLGDISGINASVVNIQKEIDRLNEVAKNLNESLIDLQELGKYEQYIKGGGGSDIIKLLNEQVNKEMQSSNLYMSMSSWCYTHSLDGAGLFLFDHAAEEYEHAKKLIIFLNENNVPVQLTSISAPEHKFEGLTQIFQKAYEHEQHISESINNIVDHAIKSKDHATFNFLQWYVAEQHEEEVLFKDILDKIELIGNENHGLYLADQYVKGIAKSRKS

SEQ ID NO: 4655 - protein, 1379 aa, Artificial Sequence
  SARS-CoV-2/Belgium/BC-03016/2020__EPI_ISL_415157 spike protein (1-1211) Ferritin construct
MFVFLVLLPLVSSQCVNLTTRTQLPPAYTNSFTRGVYYPDKVFRSSVLHSTQDLFLPFFSNVTWFHAIHVSGTNGTKRFDNPVLPFNDGVYFASTEKSNIIRGWIFGTTLDSKTQSLLIVNNATNVVIKVCEFQFCNDPFLGVYYHKNNKSWMESEFRVYSSANNCTFEYVSQPFLMDLEGKQGNFKNLREFVFKNIDGYFKIYSKHTPINLVRDLPQGFSALEPLVDLPIGINITRFQTLLALHRSYLTPGDSSSGWTAGAAAYYVGYLQPRTFLLKYNENGTITDAVDCALDPLSETKCTLKSFTVEKGIYQTSNFRVQPTESIVRFPNITNLCPFGEVFNATRFASVYAWNRKRISNCVADYSVLYNSASFSTFKCYGVSPTKLNDLCFTNVYADSFVIRGDEVRQIAPGQTGKIADYNYKLPDDFTGCVIAWNSNNLDSKVGGNYNYLYRLFRKSNLKPFERDISTEIYQAGSTPCNGVEGFNCYFPLQSYGFQPTNGVGYQPYRVVVLSFELLHAPATVCGPKKSTNLVKNKCVNFNFNGLTGTGVLTESNKKFLPFQQFGRDIADTTDAVRDPQTLEILDITPCSFGGVSVITPGTNTSNQVAVLYQGVNCTEVPVAIHADQLTPTWRVYSTGSNVFQTRAGCLIGAEHVNNSYECDIPIGAGICASYQTQTNSPRRARSVASQSIIAYTMSLGAENSVAYSNNSIAIPTNFTISVTTEILPVSMTKTSVDCTMYICGDSTECSNLLLQYGSFCTQLNRALTGIAVEQDKNTQEVFAQVKQIYKTPPIKDFGGFNFSQILPDPSKPSKRSFIEDLLFNKVTLADAGFIKQYGDCLGDIAARDLICAQKFNGLTVLPPLLTDEMIAQYTSALLAGTITSGWTFGAGAALQIPFAMQMAYRFNGIGVTQNVLYENQKLIANQFNSAIGKIQDSLSSTAPALGKLQDVVNQNAQALNTLVKQLSSNFGAISSVLNDILSRLDKVEAEVQIDRLITGRLQSLQTYVTQQLIRAAEIRASANLAATKMSECVLGQSKRVDFCGKGYHLMSFPQSAPHGVVFLHVTYVPAQEKNFTTAPAICHDGKAHFPREGVFVSNGTHWFVTQRNFYEPQIITTDNTFVSGNCDVVIGIVNNTVYDPLQPELDSFKEELDKYFKNHTSPDVDLGDISGINASVVNIQKEIDRLNEVAKNLNESLIDLQELGKYEQYIKGGGGSDIIKLLNEQVNKEMQSSNLYMSMSSWCYTHSLDGAGLFLFDHAAEEYEHAKKLIIFLNENNVPVQLTSISAPEHKFEGLTQIFQKAYEHEQHISESINNIVDHAIKSKDHATFNFLQWYVAEQHEEEVLFKDILDKIELIGNENHGLYLADQYVKGIAKSRKS

SEQ ID NO: 4656 - protein, 1379 aa, Artificial Sequence
  SARS-CoV-2/Germany/BavPat3/2020__EPI_ISL_414521 spike protein (1-1211) Ferritin construct
MFVFLVLLPLVSSQCVNLTTRTQLPPAYTNSFTRGVYYPDKVFRSSVLHSTQDLFLPFFSNVTWFHAIHVSGTNGTKRFDNPVLPFNDGVYFASTEKSNIIRGWIFGTTLDSKTQSLLIVNNATNVVIKVCEFQFCNDPFLGVYYHKNNKSWMESEFRVYSSANNCTFEYVSQPFLMDLEGKQGNFKNLREFVFKNIDGYFKIYSKHTPINLVRDLPQGFSALEPLVDLPIGINITRFQTLLALHRSYLTPGDSSSGWTAGAAAYYVGYLQPRTFLLKYNENGTITDAVDCALDPLSETKCTLKSFTVEKGIYQTSNFRVQPTESIVRFPNITNLCPFGEVFNATRFASVYAWNRKRISNCVADYSVLYNSASFSTFKCYGVSPTKLNDLCFTNVYADSFVIRGDEVRQIAPGQTGKIADYNYKLPDDFTGCVIAWNSNNLDSKVGGNYNYLYRLFRKSNLKPFERDISTEIYQAGSTPCNGVEGFNCYFPLQSYGFQPTNGVGYQPYRVVVLSFELLHAPATVCGPKKSTNLVKNKCVNFNFNGLTGTGVLTESNKKFLPFQQFGRDIADTTDAVRDPQTLEILDITPCSFGGVSVITPGTNTSNQVAVLYQDVNCTEVPVAIHADQLTPTWRVYSTGSNVFQTRAGCLIGAEHVNNSYECDIPIGAGICASYQTQTNSPRRARSVASQSIIAYTMSLGAENSVAYSNNSIAIPTNFTISVTTEILPVSMTKTSVDCTMYICGDSTECSNLLLQYGSFCTQLNRALTGIAVEQDKNTQQVFAQVKQIYKTPPIKDFGGFNFSQILPDPSKPSKRSFIEDLLFNKVTLADAGFIKQYGDCLGDIAARDLICAQKFNGLTVLPPLLTDEMIAQYTSALLAGTITSGWTFGAGAALQIPFAMQMAYRFNGIGVTQNVLYENQKLIANQFNSAIGKIQDSLSSTASALGKLQDVVNQNAQALNTLVKQLSSNFGAISSVLNDILSRLDKVEAEVQIDRLITGRLQSLQTYVTQQLIRAAEIRASANLAATKMSECVLGQSKRVDFCGKGYHLMSFPQSAPHGVVFLHVTYVPAQEKNFTTAPAICHDGKAHFPREGVFVSNGTHWFVTQRNFYEPQIITTDNTFVSGNCDVVIGIVNNTVYDPLQPELDSFKEELDKYFKNHTSPDVDLGDISGINASVVNIQKEIDRLNEVAKNLNESLIDLQELGKYEQYIKGGGGSDIIKLLNEQVNKEMQSSNLYMSMSSWCYTHSLDGAGLFLFDHAAEEYEHAKKLIIFLNENNVPVQLTSISAPEHKFEGLTQIFQKAYEHEQHISESINNIVDHAIKSKDHATFNFLQWYVAEQHEEEVLFKDILDKIELIGNENHGLYLADQYVKGIAKSRKS

SEQ ID NO: 4657 - protein, 1379 aa, Artificial Sequence
  SARS-CoV-2/France/HF1805/2020__EPI_ISL_414628 spike protein (1-1211) Ferritin construct
MFVFLVLLPLVSSQCVNLTTRTQLPPAYTNSFTRGVYYPDKVFRSSVLHSTQDLFLPFFSNVTWFHAIHVSGTNGTKRFDNPVLPFNDGVYFASTEKSNIIRGWIFGTTLDSKTQSLLIVNNATNVVIKVCEFQFCNDPFLGVYYHKNNKSWMESEFRVYSSANNCTFEYVSQPFLMDLEGKQGNFKNLREFVFKNIDGYFKIYSKHTPINLVRDLPQGFSALEPLVDLPIGINITRFQTLLALHRSYLTPGDSSSGWTAGAAAYYVGYLQPRTFLLKYNENGTITDAVDCALDPLSETKCTLKSFTVEKGIYQTSNFRVQPTESIVRFPNITNLCPFGEVFNATRFASVYAWNRKRISNCVADYSVLYNSASFSTFKCYGVSPTKLNDLCFTNVYADSFVIRGDEVRQIAPGQTGKIADYNYKLPDDFTGCVIAWNSNNLDSKVGGNYNYLYRLFRKSNLKPFERDISTEIYQAGSTPCNGVEGFNCYFPLQSYGFQPTNGVGYQPYRVVVLSFELLHAPATVCGPKKSTNLVKNKCVNFNFNGLTGTGVLTESNKKFLPFQQFGRDIADTTDAVRDPQTLEILDITPCSFGGVSVITPGTNTSNQVAVLYQGVNCTEVPVAIHADQLTPTWRVYSTGSNVFQTRAGCLIGAEHVNNSYECDIPIGAGICASYQTQTNSPRRARSVASQSIIAYTMSLGAENSVAYSNNSIAIPTNFTISVTTEILPVSMTKTSVDCTMYICGDSTECSNLLLQYGSFCTQLNRALTGIAVEQDKNTQEVFAQVKQIYKTPPIKDFGGFNFSQILPDPSKPSKRSFIEDLLFNKVTLADAGFIKQYGDCLGDIAARDLICAQKFNGLTVLPPLLTDEMIAQYTSALLAGTITSGWTFGAGAALQIPFAMQMAYRFNGIGVTQNVLYENQKLIANQFNSAIGKIQDSLSSTASALGKLQDVVNQNAQALNTLVKQLSSNFGAISSVLNDILSRLDKVEAEVQIDRLITGRLQSLQTYVTQQLIRAAEIRASANLAATKMSECVLGQSKRVDFCGKGYHLMSFPQSAPHGVVFLHVTYVPAQEKNFTTAPAICHDGKAHFPREGVFVSNGTHWFVTQRNFYEPQIITTDNTFVSGNCDVVIGVVNNTVYDPLQPELDSFKEELDKYFKNHTSPDVDLGDISGINASVVNIQKEIDRLNEVAKNLNESLIDLQELGKYEQYIKGGGGSDIIKLLNEQVNKEMQSSNLYMSMSSWCYTHSLDGAGLFLFDHAAEEYEHAKKLIIFLNENNVPVQLTSISAPEHKFEGLTQIFQKAYEHEQHISESINNIVDHAIKSKDHATFNFLQWYVAEQHEEEVLFKDILDKIELIGNENHGLYLADQYVKGIAKSRKS

SEQ ID NO: 4658 - protein, 1379 aa, Artificial Sequence
  SARS-CoV-2/Netherlands/ZuidHolland_9/2020__EPI_ISL_414445 spike protein (1-1211) Ferritin construct
MFVFLVLLPLVSSQCVNLTTRTQLPPAYTNSFTRGVYYPDKVFRSSVLHSTQDLFLPFFSNVTWFHAIHVSGTNGTKRFDNPVLPFNDGVYFASTEKSNIIRGWIFGTTLDSKTQSLLIVNNATNVVIKVCEFQFCNDPFLGVYYHKNNKSWMESEFRVYSSANNCTFEYVSQPFLMDLEGKQGNFKNLREFVFKNIDGYFKIYSKHTPINLVRDLPQGFSALEPLVDLPIGINITRFQTLLALHRSYLTPGDSSSGWTAGAAAYYVGYLQPRTFLLKYNENGTITDAVDCALDPLSETKCTLKSFTVEKGIYQTSNFRVQPTESIVRFPNITNLCPFGEVFNATRFASVYAWNRKRISNCVADYSVLYNSASFSTFKCYGVSPTKLNDLCFTNVYADSFVIRGDEVRQIAPGQTGKIADYNYKLPDDFTGCVIAWNSNNLDSKVGGNYNYLYRLFRKSNLKPFERDISTEIYQAGSTPCNGVEGFNCYFPLQSYGFQPTNGVGYQPYRVVVLSFELLHAPATVCGPKKSTNLVKNKCVNFNFNGLTGTGVLTESNKKFLPFQQFGRDIADTTDAVRDPQTLEILDITPCSFGGVSVITPGTNTSNQVAVLYQGVNCTEVPVAIHADQLTPTWRVYSTGSNVFQTRAGCLIGAEHVNNSYECDIPIGAGICASYQTQTNSPRRARSVASQSIIAYTMSLGAENSVAYSNNSIAIPTNFTISVTTEILPVSMTKTSVDCTMYICGDSTECSNLLLQYGSFCTQLNRALTGIAVEQDKNTQEVFAQVKQIYKTPPIKDFGGFNFSQILPDPSKPSKRSFIEDLLFNKVTLADAGFIKQYGDCLGDIAARDLICVQKFNGLTVLPPLLTDEMIAQYTSALLAGTITSGWTFGAGAALQIPFAMQMAYRFNGIGVTQNVLYENQKLIANQFNSAIGKIQDSLSSTASALGKLQDVVNQNAQALNTLVKQLSSNFGAISSVLNDILSRLDKVEAEVQIDRLITGRLQSLQTYVTQQLIRAAEIRASANLAATKMSECVLGQSKRVDFCGKGYHLMSFPQSAPHGVVFLHVTYVPAQEKNFTTAPAICHDGKAHFPREGVFVSNGTHWFVTQRNFYEPQIITTDNTFVSGNCDVVIGIVNNTVYDPLQPELDSFKEELDKYFKNHTSPDVDLGDISGINASVVNIQKEIDRLNEVAKNLNESLIDLQELGKYEQYIKGGGGSDIIKLLNEQVNKEMQSSNLYMSMSSWCYTHSLDGAGLFLFDHAAEEYEHAKKLIIFLNENNVPVQLTSISAPEHKFEGLTQIFQKAYEHEQHISESINNIVDHAIKSKDHATFNFLQWYVAEQHEEEVLFKDILDKIELIGNENHGLYLADQYVKGIAKSRKS

SEQ ID NO: 4659 - protein, 1379 aa, Artificial Sequence
  SARS-CoV-2/Finland/FIN03032020A/2020__EPI_ISL_413602 spike protein (1-1211) Ferritin construct
MFVFLVLLPLVSSQCVNLTTRTQLPPAYTNSFTRGVYYPDKVFRSSVLHSTQDLFLPFFSNVTWFHAIHVSGTNGTKRFDNPVLPFNDGVYFASTEKSNIIRGWIFGTTLDSKTQSLLIVNNATNVVIKVCEFQFCNDPFLGVYYHKNNKSWMESEFRVYSSANNCTFEYVSQPFLMDLEGKQGNFKNLREFVFKNIDGYFKIYSKHTPINLVRDLPQGFSALEPLVDLPIGINITRFQTLLALHRSYLTPGDSSSGWTAGAAAYYVGYLQPRTFLLKYNENGTITDAVDCALDPLSETKCTLKSFTVEKGIYQTSNFRVQPTESIVRFPNITNLCPFGEVFNATRFASVYAWNRKRISNCVADYSVLYNSASFSTFKCYGVSPTKLNDLCFTNVYADSFVIRGDEVRQIAPGQTGKIADYNYKLPDDFTGCVISWNSNNLDSKVGGNYNYLYRLFRKSNLKPFERDISTEIYQAGSTPCNGVEGFNCYFPLQSYGFQPTNGVGYQPYRVVVLSFELLHAPATVCGPKKSTNLVKNKCVNFNFNGLTGTGVLTESNKKFLPFQQFGRDIADTTDAVRDPQTLEILDITPCSFGGVSVITPGTNTSNQVAVLYQGVNCTEVPVAIHADQLTPTWRVYSTGSNVFQTRAGCLIGAEHVNNSYECDIPIGAGICASYQTQTNSPRRARSVASQSIIAYTMSLGAENSVAYSNNSIAIPTNFTISVTTEILPVSMTKTSVDCTMYICGDSTECSNLLLQYGSFCTQLNRALTGIAVEQDKNTQEVFAQVKQIYKTPPIKDFGGFNFSQILPDPSKPSKRSFIEDLLFNKVTLADAGFIKQYGDCLGDIAARDLICAQKFNGLTVLPPLLTDEMIAQYTSALLAGTITSGWTFGAGAALQIPFAMQMAYRFNGIGVTQNVLYENQKLIANQFNSAIGKIQDSLSSTASALGKLQDVVNQNAQALNTLVKQLSSNFGAISSVLNDILSRLDKVEAEVQIDRLITGRLQSLQTYVTQQLIRAAEIRASANLAATKMSECVLGQSKRVDFCGKGYHLMSFPQSAPHGVVFLHVTYVPAQEKNFTTAPAICHDGKAHFPREGVFVSNGTHWFVTQRNFYEPQIITTDNTFVSGNCDVVIGIVNNTVYDPLQPELDSFKEELDKYFKNHTSPDVDLGDISGINASVVNIQKEIDRLNEVAKNLNESLIDLQELGKYEQYIKGGGGSDIIKLLNEQVNKEMQSSNLYMSMSSWCYTHSLDGAGLFLFDHAAEEYEHAKKLIIFLNENNVPVQLTSISAPEHKFEGLTQIFQKAYEHEQHISESINNIVDHAIKSKDHATFNFLQWYVAEQHEEEVLFKDILDKIELIGNENHGLYLADQYVKGIAKSRKS

SEQ ID NO: 4660 - protein, 1379 aa, Artificial Sequence
  SARS-CoV-2/France/GE1977/2020__EPI_ISL_414632 spike protein (1-1211) Ferritin construct
MFVFLVLLPLVSSQCVNLTTRTQLPPAYTNSFTRGVYYPDKVFRSSVLHSTQDLFLPFFSNVTWFHAIHVSGTNGTKRFDNPVLPFNDGVYFASTEKSNIIRGWIFGTTLDSKTQSLLIVNNATNVVIKVCEFQFCNDPFLGVYYHKNNKSWMESEFRVYSSANNCTFEYVSQPFLMDLEGKQGNFKNLREFVFKNIDGYFKIYSKHTPINLVRDLPQGFSALEPLVDLPIGINITRFQTLLALHRSYLTPGDSSSGWTAGAAAYYVGYLQPRTFLLKYNENGTITDAVDCALDPLSETKCTLKSFTVEKGIYQTSNFRVQPTESIVRFPNITNLCPFGEVFNATRFASVYAWNRKRISNCVADYSVLYNSASFSTFKCYGVSPTKLNDLCFTNVYADSFVIRGDEVRQIAPGQTGKIADYNYKLPDDFTGCVIAWNSNNLDSKVGGNYNYLYRLFRKSNLKPFERDISTEIYQAGSTPCNGVEGFNCYFPLQSYGFQPTNGVGYQPYRVVVLSFELLHAPATVCGPKKSTNLVKNKCVNFNFNGLTGTGVLTESNKKFLPFQQFGRDIADTTDAVRDPQTLEILDITPCSFGGVSVITPGTNTSNQVAVLYQGVNCTEVPVAIHADQLTPTWRVYSTGSNVFQTRAGCLIGAEHVNNSYECDIPIGAGICASYQTQTNSPRRARSVASQSIIAYTMSLGAENSVAYSNNSIAIPTNFTISVTTEILPVSMTKTSVDCTMYICGDSTECSNLLLQYGSFCTQLNRALTGIAVEQDKNTQEVFAQVKQIYKTPPIKDFGGFNFSQILPDPSKPSKRSFIEDLLFNKVTLADAGFIKQYGDCLGDIAARDLICAQKFNGLTVLPPLLTDEMIAQYTSALLAGTITSGWTFGAGAALQIPFAMQMAYRFNGIGVTQNVLYENQKLIANQFNSAIGKIQDSLFSTASALGKLQDVVNQNAQALNTLVKQLSSNFGAISSVLNDILSRLDKVEAEVQIDRLITGRLQSLQTYVTQQLIRAAEIRASANLAATKMSECVLGQSKRVDFCGKGYHLMSFPQSAPHGVVFLHVTYVPAQEKNFTTAPAICHDGKAHFPREGVFVSNGTHWFVTQRNFYEPQIITTDNTFVSGNCDVVIGIVNNTVYDPLQPELDSFKEELDKYFKNHTSPDVDLGDISGINASVVNIQKEIDRLNEVAKNLNESLIDLQELGKYEQYIKGGGGSDIIKLLNEQVNKEMQSSNLYMSMSSWCYTHSLDGAGLFLFDHAAEEYEHAKKLIIFLNENNVPVQLTSISAPEHKFEGLTQIFQKAYEHEQHISESINNIVDHAIKSKDHATFNFLQWYVAEQHEEEVLFKDILDKIELIGNENHGLYLADQYVKGIAKSRKS

SEQ ID NO: 4661 - protein, 1379 aa, Artificial Sequence
  SARS-CoV-2/Finland/FIN-313/2020__EPI_ISL_414641 spike protein (1-1211) Ferritin construct
MFVFLVLLPLVSSQCVNLTTRTQLPPAYTNSFTRGVYYPDKVFRSSVLHSTQDLFLPFFSNVTWFHAIHVSGTNGTKRFDNPVLPFNDGVYFASTEKSNIIRGWIFGTTLDSKTQSLLIVNNATNVVIKVCEFQFCNDPFLGVYYHKNNKSWMESEFRVYSSANNCTFEYVSQPFLMDLEGKQGNFKNLREFVFKNIDGYFKIYSKHTPINLVRDLPQGFSALEPLVDLPIGINITRFKTLLALHRSYLTPGDSSSGWTAGAAAYYVGYLQPRTFLLKYNENGTITDAVDCALDPLSETKCTLKSFTVEKGIYQTSNFRVQPTESIVRFPNITNLCPFGEVFNATRFASVYAWNRKRISNCVADYSVLYNSASFSTFKCYGVSPTKLNDLCFTNVYADSFVIRGDEVRQIAPGQTGKIADYNYKLPDDFTGCVIAWNSNNLDSKVGGNYNYLYRLFRKSNLKPFERDISTEIYQAGSTPCNGVEGFNCYFPLQSYGFQPTNGVGYQPYRVVVLSFELLHAPATVCGPKKSTNLVKNKCVNFNFNGLTGTGVLTESNKKFLPFQQFGRDIADTTDAVRDPQTLEILDITPCSFGGVSVITPGTNTSNQVAVLYQGVNCTEVPVAIHADQLTPTWRVYSTGSNVFQTRAGCLIGAEHVNNSYECDIPIGAGICASYQTQTNSPRRARSVASQSIIAYTMSLGAENSVAYSNNSIAIPTNFTISVTTEILPVSMTKTSVDCTMYICGDSTECSNLLLQYGSFCTQLNRALTGIAVEQDKNTQEVFAQVKQIYKTPPIKDFGGFNFSQILPDPSKPSKRSFIEDLLFNKVTLADAGFIKQYGDCLGDIAARDLICAQKFNGLTVLPPLLTDEMIAQYTSALLAGTITSGWTFGAGAALQIPFAMQMAYRFNGIGVTQNVLYENQKLIANQFNSAIGKIQDSLSSTASALGKLQDVVNQNAQALNTLVKQLSSNFGAISSVLNDILSRLDKVEAEVQIDRLITGRLQSLQTYVTQQLIRAAEIRASANLAATKMSECVLGQSKRVDFCGKGYHLMSFPQSAPHGVVFLHVTYVPAQEKNFTTAPAICHDGKAHFPREGVFVSNGTHWFVTQRNFYEPQIITTDNTFVSGNCDVVIGIVNNTVYDPLQPELDSFKEELDKYFKNHTSPDVDLGDISGINASVVNIQKEIDRLNEVAKNLNESLIDLQELGKYEQYIKGGGGSDIIKLLNEQVNKEMQSSNLYMSMSSWCYTHSLDGAGLFLFDHAAEEYEHAKKLIIFLNENNVPVQLTSISAPEHKFEGLTQIFQKAYEHEQHISESINNIVDHAIKSKDHATFNFLQWYVAEQHEEEVLFKDILDKIELIGNENHGLYLADQYVKGIAKSRKS

SEQ ID NO: 4662 - protein, 1379 aa, Artificial Sequence
  SARS-CoV-2/Netherlands/ZuidHolland_2/2020__EPI_ISL_414556 spike protein (1-1211) Ferritin construct
MFVFLVLLPLVSSQCVNLTTRTQLPPAYTNSFTRGVYYPDKVFRSSVLHSTQDLFLPFFSNVTWFHAIHVSGTNGTKRFDNPVLPFNDGVYFASTEKSNIIRGWIFGTTLDSKTQSLLIVNNATNVVIKVCEFQFCNDPFLGVYYHKNNKSWMESEFRVYSSANNCTFEYVSQPFLMDLEGKQGNFKNLREFVFKNIDGYFKIYSKHTPINLVRDLPQGFSALEPLVDLPIGINITRFQTLLALHRSYLTPGDSSSGWTAGAAAYYVGYLQPRTFLLKYNENGTITDAVDCALDPLSETKCTLKSFTVEKGIYQTSNFRVQPTESIVRFPNITNLCPFGEVFNATRFASVYAWNRKRISNCVADYSVLYNSASFSTFKCYGVSPTKLNDLCFTNVYADSFVIRGDEVRQIAPGQTGKIADYNYKLPDDFTGCVIAWNSNNLDSKVGGNYNYLYRLFRKSNLKPFERDISTEIYQAGSTPCNGVEGFNCYFPLQSYGFQPTNGVGYQPYRVVVLSFELLHAPATVCGPKKSTNLVKNKCVNFNFNGLTGTGVLTESNKKFLPFQQFGRDIADTTDAVRDPQTLEILDITPCSFGGVSVITPGTNTSNQVAVLYQGVNCTEVPVAIHADQLTPTWRVYSTGSNVFQTRAGCLIGAEHVNNSYECDIPIGAGICASYQTQTNSPRRARSVASQSIIAYTMSLGAENSVAYSNNSIAIPTNFTISVTTEILPVSMTKTSVDCTMYICGDSTECSNLLLQYGSFCTQLNRALTGIALEQDKNTQEVFAQVKQIYKTPPIKDFGGFNFSQILPDPSKPSKRSFIEDLLFNKVTLADAGFIKQYGDCLGDIAARDLICAQKFNGLTVLPPLLTDEMIAQYTSALLAGTITSGWTFGAGAALQIPFAMQMAYRFNGIGVTQNVLYENQKLIANQFNSAIGKIQDSLSSTASALGKLQDVVNQNAQALNTLVKQLSSNFGAISSVLNDILSRLDKVEAEVQIDRLITGRLQSLQTYVTQQLIRAAEIRASANLAATKMSECVLGQSKRVDFCGKGYHLMSFPQSAPHGVVFLHVTYVPAQEKNFTTAPAICHDGKAHFPREGVFVSNGTHWFVTQRNFYEPQIITTDNTFVSGNCDVVIGIVNNTVYDPLQPELDSFKEELDKYFKNHTSPDVDLGDISGINASVVNIQKEIDRLNEVAKNLNESLIDLQELGKYEQYIKGGGGSDIIKLLNEQVNKEMQSSNLYMSMSSWCYTHSLDGAGLFLFDHAAEEYEHAKKLIIFLNENNVPVQLTSISAPEHKFEGLTQIFQKAYEHEQHISESINNIVDHAIKSKDHATFNFLQWYVAEQHEEEVLFKDILDKIELIGNENHGLYLADQYVKGIAKSRKS

SEQ ID NO: 4663 - protein, 1379 aa, Artificial Sequence
  SARS-CoV-2/USA/WA-UW31/2020__EPI_ISL_414618 spike protein (1-1211) Ferritin construct
MFVFLVLLPLVSSQCVNLTTRTQLPPAYTNSFTRGVYYPDKVFRSSVLHSTQDLFLPFFSNVTWFHAIHVSGTNGTKRFDNPVLPFNDGVYFASTEKSNIIRGWIFGTTLDSKTQSLLIVNNATNVVIKVCEFQFCNDPFLGVYYHKNNKSWMESEFRVYSSANNCTFEYVSQPFLMDLEGKQGNFKNLREFVFKNIDGYFKIYSKHTPINLVRDLPQGFSALEPLVDLPIGINITRFQTLLALHRSYLTPGDSSSGWTAGAAAYYVGYLQPRTFLLKYNENGTITDAVDCALDPLSETKCTLKSFTVEKGIYQTSNFRVQPTESIVRFPNITNLCPFGEVFNATRFASVYAWNRKRISNCVADYSVLYNSASFSTFKCYGVSPTKLNDLCFTNVYADSFVIRGDEVRQIAPGQTGKIADYNYKLPDDFTGCVIAWNSNNLDSKVGGNYNYLYRLFRKSNLKPFERDISTEIYQAGSTPCNGAEGFNCYFPLQSYGFQPTNGVGYQPYRVVVLSFELLHAPATVCGPKKSTNLVKNKCVNFNFNGLTGTGVLTESNKKFLPFQQFGRDIADTTDAVRDPQTLEILDITPCSFGGVSVITPGTNTSNQVAVLYQDVNCTEVPVAIHADQLTPTWRVYSTGSNVFQTRAGCLIGAEHVNNSYECDIPIGAGICASYQTQTNSPRRARSVASQSIIAYTMSLGAENSVAYSNNSIAIPTNFTISVTTEILPVSMTKTSVDCTMYICGDSTECSNLLLQYGSFCTQLNRALTGIAVEQDKNTQEVFAQVKQIYKTPPIKDFGGFNFSQILPDPSKPSKRSFIEDLLFNKVTLADAGFIKQYGDCLGDIAARDLICAQKFNGLTVLPPLLTDEMIAQYTSALLAGTITSGWTFGAGAALQIPFAMQMAYRFNGIGVTQNVLYENQKLIANQFNSAIGKIQDSLSSTASALGKLQDVVNQNAQALNTLVKQLSSNFGAISSVLNDILSRLDKVEAEVQIDRLITGRLQSLQTYVTQQLIRAAEIRASANLAATKMSECVLGQSKRVDFCGKGYHLMSFPQSAPHGVVFLHVTYVPAQEKNFTTAPAICHDGKAHFPREGVFVSNGTHWFVTQRNFYEPQIITTDNTFVSGNCDVVIGIVNNTVYDPLQPELDSFKEELDKYFKNHTSPDVDLGDISGINASVVNIQKEIDRLNEVAKNLNESLIDLQELGKYEQYIKGGGGSDIIKLLNEQVNKEMQSSNLYMSMSSWCYTHSLDGAGLFLFDHAAEEYEHAKKLIIFLNENNVPVQLTSISAPEHKFEGLTQIFQKAYEHEQHISESINNIVDHAIKSKDHATFNFLQWYVAEQHEEEVLFKDILDKIELIGNENHGLYLADQYVKGIAKSRKS

SEQ ID NO: 4664 - protein, 1379 aa, Artificial Sequence
  SARS-CoV-2/South Korea/SNU01/2020__EPI_ISL_411929 spike protein (1-1211) Ferritin construct
MFVFLVLLPLVSSQCVNLTTRTQLPPAYTNSFTRGVYYPDKVFRSSVLHSTQDLFLPFFSNVTWFHAIHVSGTNGTKRFDNPVLPFNDGVYFASTEKSNIIRGWIFGTTLDSKTQSLLIVNNATNVVIKVCEFQFCNDPFLGVYYHKNNKSWMESEFRVYSSANNCTFEYVSQPFLMDLEGKQGNFKNLREFVFKNIDGYFKIYSKHTPINLVRDLPQGFWALEPLVDLPIGINITRFQTLLALHRSYLTPGDSSSGWTAGAAAYYVGYLQPRTFLLKYNENGTITDAVDCALDPLSETKCTLKSFTVEKGIYQTSNFRVQPTESIVRFPNITNLCPFGEVFNATRFASVYAWNRKRISNCVADYSVLYNSASFSTFKCYGVSPTKLNDLCFTNVYADSFVIRGDEVRQIAPGQTGKIADYNYKLPDDFTGCVIAWNSNNLDSKVGGNYNYLYRLFRKSNLKPFERDISTEIYQAGSTPCNGVEGFNCYFPLQSYGFQPTNGVGYQPYRVVVLSFELLHAPATVCGPKKSTNLVKNKCVNFNFNGLTGTGVLTESNKKFLPFQQFGRDIADTTDAVRDPQTLEILDITPCSFGGVSVITPGTNTSNQVAVLYQDVNCTEVPVAIHADQLTPTWRVYSTGSNVFQTRAGCLIGAEHVNNSYECDIPIGAGICASYQTQTNSPRRARSVASQSIIAYTMSLGAENSVAYSNNSIAIPTNFTISVTTEILPVSMTKTSVDCTMYICGDSTECSNLLLQYGSFCTQLNRALTGIAVEQDKNTQEVFAQVKQIYKTPPIKDFGGFNFSQILPDPSKPSKRSFIEDLLFNKVTLADAGFIKQYGDCLGDIAARDLICAQKFNGLTVLPPLLTDEMIAQYTSALLAGTITSGWTFGAGAALQIPFAMQMAYRFNGIGVTQNVLYENQKLIANQFNSAIGKIQDSLSSTASALGKLQDVVNQNAQALNTLVKQLSSNFGAISSVLNDILSRLDKVEAEVQIDRLITGRLQSLQTYVTQQLIRAAEIRASANLAATKMSECVLGQSKRVDFCGKGYHLMSFPQSAPHGVVFLHVTYVPAQEKNFTTAPAICHDGKAHFPREGVFVSNGTHWFVTQRNFYEPQIITTDNTFVSGNCDVVIGIVNNTVYDPLQPELDSFKEELDKYFKNHTSPDVDLGDISGINASVVNIQKEIDRLNEVAKNLNESLIDLQELGKYEQYIKGGGGSDIIKLLNEQVNKEMQSSNLYMSMSSWCYTHSLDGAGLFLFDHAAEEYEHAKKLIIFLNENNVPVQLTSISAPEHKFEGLTQIFQKAYEHEQHISESINNIVDHAIKSKDHATFNFLQWYVAEQHEEEVLFKDILDKIELIGNENHGLYLADQYVKGIAKSRKS

SEQ ID NO: 4665 - protein, 1379 aa, Artificial Sequence
  SARS-CoV-2/China/WF0004/2020__EPI_ISL_413694 spike protein (1-1211) Ferritin construct
MFVFLVLLPLVSSQCVNLTTRTQLPPAYTNSFTRGVYYPDKVFRSSVLHSTQDLFLPFFSNVTWFHAIHVSGTNGTKRFDNPVLPFNDGVYFASTEKSNIIRGWIFGTTLDSKTQSLLIVNNATNVVIKVCEFQFCNDPFLGVYYHKNNKSWTESEFRVYSSANNCTFEYVSQPFLMDLEGKQGNFKNLREFVFKNIDGYFKIYSKHTPINLVRDLPQGFSALEPLVDLPIGINITRFQTLLALHRSYLTPGDSSSGWTAGAAAYYVGYLQPRTFLLKYNENGTITDAVDCALDPLSETKCTLKSFTVEKGIYQTSNFRVQPTESIVRFPNITNLCPFGEVFNATRFASVYAWNRKRISNCVADYSVLYNSASFSTFKCYGVSPTKLNDLCFTNVYADSFVIRGDEVRQIAPGQTGKIADYNYKLPDDFTGCVIAWNSNNLDSKVGGNYNYLYRLFRKSNLKPFERDISTEIYQAGSTPCNGVEGFNCYFPLQSYGFQPTNGVGYQPYRVVVLSFELLHAPATVCGPKKSTNLVKNKCVNFNFNGLTGTGVLTESNKKFLPFQQFGRDIADTTDAVRDPQTLEILDITPCSFGGVSVITPGTNTSNQVAVLYQDVNCTEVPVAIHADQLTPTWRVYSTGSNVFQTRAGCLIGAEHVNNSYECDIPIGAGICASYQTQTNSPRRARSVASQSIIAYTMSLGAENSVAYSNNSIAIPTNFTISVTTEILPVSMTKTSVDCTMYICGDSTECSNLLLQYGSFCTQLNRALTGIAVEQDKNTQEVFAQVKQIYKTPPIKDFGGFNFSQILPDPSKPSKRSFIEDLLFNKVTLADAGFIKQYGDCLGDIAARDLICAQKFNGLTVLPPLLTDEMIAQYTSALLAGTITSGWTFGAGAALQIPFAMQMAYRFNGIGVTQNVLYENQKLIANQFNSAIGKIQDSLSSTASALGKLQDVVNQNAQALNTLVKQLSSNFGAISSVLNDILSRLDKVEAEVQIDRLITGRLQSLQTYVTQQLIRAAEIRASANLAATKMSECVLGQSKRFDFCGKGYHLMSFPQSAPHGVVFLHVTYVPAQEKNFTTAPAICHDGKAHFPREGVFVSNGTHWFVTQRNFYEPQIITTDNTFVSGNCDVVIGIVNNTVYDPLQPELDSFKEELDKYFKNHTSPDVDLGDISGINASVVNIQKEIDRLNEVAKNLNESLIDLQELGKYEQYIKGGGGSDIIKLLNEQVNKEMQSSNLYMSMSSWCYTHSLDGAGLFLFDHAAEEYEHAKKLIIFLNENNVPVQLTSISAPEHKFEGLTQIFQKAYEHEQHISESINNIVDHAIKSKDHATFNFLQWYVAEQHEEEVLFKDILDKIELIGNENHGLYLADQYVKGIAKSRKS

SEQ ID NO: 4666 - protein, 1379 aa, Artificial Sequence
  SARS-CoV-2/China/WF0028/2020__EPI_ISL_413791 spike protein (1-1211) Ferritin construct
MFVFLVLLPLVSSQCVNLTTRTQLPPAYTNSFTRGVYYPDKVFRSSVLHSTQDLFLPFFSNVTWFHAIHVSGTNGTKRFDNPVLPFNDGVYFASTEKSNIIRGWIFGTTLDSKTQSLLIVNNATNVVIKVCEFQFCNDPFLGVYYHKNNKSWMESEFRVYSSANNCTFEYVSQPFLMDLEGKQGNFKNLREFVFKNIDGYFKIYSKHTPINLVRDLPQGFSALEPLVDLPIGINITRFQTLLALHRSYLTPGDSSSGWTAGAAAYYVGYLQPRTFLLKYNENGTITDAVDCALDPLSETKCTLKSFTVEKGIYQTSNFRVQPTESIVRFPNITNLCPFGEVFNATRFASVYAWNRKRISNCVADYSVLYNSASFSTFKCYGVSPTKLNDLCFTNVYADSFVIRGDEVRQIAPGQTGKIADYNYKLPDDFTGCVIAWNSNNLDSKVGGNYNYLYRLFRKSNLKPFERDISTEIYQAGSTPCNGVEGFNCYFPLQSYGFQPTNGVGYQPYRVVVLSFELLHAPATVCGPKKSTNLVKNKCVNFNFNGLTGTGVLTESNKKFLPFQQFGRDIADTTDAVRDPQTLEILDITPCSFGGVSVITPGTNTSNQVAVLYQDVNCTEVPVAIHADQLTPTWRVYSTGSNVFQTRAGCLIGAEHVNNSYECDIPIGAGICASYQTQTNSPRRARSVASQSIIAYTMSLGAENSVAYSNNSIAIPTNFTISVTTEILPVSMTKTSVDCTMYICGDSTECSNLLLQYGSFCTQLNRALTGIAVEQDKNTQEVFAQVKQIYKTPPIKDFGGFNFSQILPDPSKPSKRSFIEDLLFNKVTLADAGFIKQYGDCLGDIAARDLICAQKFNGLTVLPPLLTDEMIAQYTSALLAGTITSGWTFGAGAALQIPFAMQMAYRFNGIGVTQNVLYENQKLIANQFNSAIGKIQDSLSSTASALGKLQDVVNQNAQALNTLVKQLSSNFGAISSVLNDILSRLDKVEAEVQIDRLITGRLQSLQTYVTQQLIRAAEIRASANLAATKMSECVLGQSKRVDFCGKGYHLMSFPQSAPHGVVFLHVTYVPAQEKNFTTAPAICHDGKAHFPREGVFVSNGTHWFVTQRNFYEPQIITTDNTFVSGNCDVVIGIVNNTVYDPLQPELESFKEELDKYFKNHTSPDVDLGDISGINASVVNIQKEIDRLNEVAKNLNESLIDLQELGKYEQYIKGGGGSDIIKLLNEQVNKEMQSSNLYMSMSSWCYTHSLDGAGLFLFDHAAEEYEHAKKLIIFLNENNVPVQLTSISAPEHKFEGLTQIFQKAYEHEQHISESINNIVDHAIKSKDHATFNFLQWYVAEQHEEEVLFKDILDKIELIGNENHGLYLADQYVKGIAKSRKS

SEQ ID NO: 4667 - protein, 1379 aa, Artificial Sequence
  SARS-CoV-2/2019-nCoV/USA-CruiseA-18/2020__MT159716.1 spike protein (1-1211) Ferritin construct
MFVFLVLLPLVSSQCVNLTTRTQLPPAYTNSFTRGVYYPDKVFRSSVLHSTQDLFLPFFSNVTWFHAIHVSGTNGTKRFDNPVLPFNDGVYFASTEKSNIIRGWIFGTTLDSKTQSLLIVNNATNVVIKVCEFQFCNDPFLGVYYHKNNKSWMESELRVYSSANNCTFEYVSQPFLMDLEGKQGNFKNLREFVFKNIDGYFKIYSKHTPINLVRDLPQGFSALEPLVDLPIGINITRFQTLLALHRSYLTPGDSSSGWTAGAAAYYVGYLQPRTFLLKYNENGTITDAVDCALDPLSETKCTLKSFTVEKGIYQTSNFRVQPTESIVRFPNITNLCPFGEVFNATRFASVYAWNRKRISNCVADYSVLYNSASFSTFKCYGVSPTKLNDLCFTNVYADSFVIRGDEVRQIAPGQTGKIADYNYKLPDDFTGCVIAWNSNNLDSKVGGNYNYLYRLFRKSNLKPFERDISTEIYQAGSTPCNGVEGFNCYFPLQSYGFQPTNGVGYQPYRVVVLSFELLHAPATVCGPKKSTNLVKNKCVNFNFNGLTGTGVLTESNKKFLPFQQFGRDIADTTDAVRDPQTLEILDITPCSFGGVSVITPGTNTSNQVAVLYQDVNCTEVPVAIHADQLTPTWRVYSTGSNVFQTRAGCLIGAEHVNNSYECDIPIGAGICASYQTQTNSPRRARSVASQSIIAYTMSLGAENSVAYSNNSIAIPTNFTISVTTEILPVSMTKTSVDCTMYICGDSTECSNLLLQYGSFCTQLNRALTGIAVEQDKNTQEVFAQVKQIYKTPPIKDFGGFNFSQILPDPSKPSKRSFIEDLLFNKVTLADAGFIKQYGDCLGDIAARDLICAQKFNGLTVLPPLLTDEMIAQYTSALLAGTITSGWTFGAGAALQIPFAMQMAYRFNGIGVTQNVLYENQKLIANQFNSAIGKIQDSLSSTASALGKLQDVVNQNAQALNTLVKQLSSNFGAISSVLNDILSRLDKVEAEVQIDRLITGRLQSLQTYVTQQLIRAAEIRASANLAATKMSECVLGQSKRVDFCGKGYHLMSFPQSAPHGVVFLHVTYVPAQEKNFTTAPAICHDGKAHFPREGVFVSNGTHWFVTQRNFYEPQIITTDNTFVSGNCDVVIGIVNNTVYDPLQPELDSFKEELDKYFKNHTSPDVDLGDISGINASVVNIQKEIDRLNEVAKNLNESLIDLQELGKYEQYIKGGGGSDIIKLLNEQVNKEMQSSNLYMSMSSWCYTHSLDGAGLFLFDHAAEEYEHAKKLIIFLNENNVPVQLTSISAPEHKFEGLTQIFQKAYEHEQHISESINNIVDHAIKSKDHATFNFLQWYVAEQHEEEVLFKDILDKIELIGNENHGLYLADQYVKGIAKSRKS

SEQ ID NO: 4668 - protein, 1379 aa, Artificial Sequence
  SARS-CoV-2/SARS-CoV-2/Yunnan-01/human/2020/CHN__MT049951.1 spike protein (1-1211) Ferritin construct
MFVFLVLLPLVSSQCVNLTTRTQLPPANTNSFTRGVYYPDKVFRSSVLHSTQDLFLPFFSNVTWFHAIHVSGTNGTKRFDNPVLPFNDGVYFASTEKSNIIRGWIFGTTLDSKTQSLLIVNNATNVVIKVCEFQFCNDPFLGVYYHKNNKSWMESEFRVYSSANNCTFEYVSQPFLMDLEGKQGNFKNLREFVFKNIDGYFKIYSKHTPINLVRDLPQGFSALEPLVDLPIGINITRFQTLLALHRSYLTPGDSSSGWTAGAAAYYVGYLQPRTFLLKYNENGTITDAVDCALDPLSETKCTLKSFTVEKGIYQTSNFRVQPTESIVRFPNITNLCPFGEVFNATRFASVYAWNRKRISNCVADYSVLYNSASFSTFKCYGVSPTKLNDLCFTNVYADSFVIRGDEVRQIAPGQTGKIADYNYKLPDDFTGCVIAWNSNNLDSKVGGNYNYLYRLFRKSNLKPFERDISTEIYQAGSTPCNGVEGFNCYFPLQSYGFQPTNGVGYQPYRVVVLSFELLHAPATVCGPKKSTNLVKNKCVNFNFNGLTGTGVLTESNKKFLPFQQFGRDIADTTDAVRDPQTLEILDITPCSFGGVSVITPGTNTSNQVAVLYQDVNCTEVPVAIHADQLTPTWRVYSTGSNVFQTRAGCLIGAEHVNNSYECDIPIGAGICASYQTQTNSPRRARSVASQSIIAYTMSLGAENSVAYSNNSIAIPTNFTISVTTEILPVSMTKTSVDCTMYICGDSTECSNLLLQYGSFCTQLNRALTGIAVEQDKNTQEVFAQVKQIYKTPPIKDFGGFNFSQILPDPSKPSKRSFIEDLLFNKVTLADAGFIKQYGDCLGDIAARDLICAQKFNGLTVLPPLLTDEMIAQYTSALLAGTITSGWTFGAGAALQIPFAMQMAYRFNGIGVTQNVLYENQKLIANQFNSAIGKIQDSLSSTASALGKLQDVVNQNAQALNTLVKQLSSNFGAISSVLNDILSRLDKVEAEVQIDRLITGRLQSLQTYVTQQLIRAAEIRASANLAATKMSECVLGQSKRVDFCGKGYHLMSFPQSAPHGVVFLHVTYVPAQEKNFTTAPAICHDGKAHFPREGVFVSNGTHWFVTQRNFYEPQIITTDNTFVSGNCDVVIGIVNNTVYDPLQPELDSFKEELDKYFKNHTSPDVDLGDISGINASVVNIQKEIDRLNEVAKNLNESLIDLQELGKYEQYIKGGGGSDIIKLLNEQVNKEMQSSNLYMSMSSWCYTHSLDGAGLFLFDHAAEEYEHAKKLIIFLNENNVPVQLTSISAPEHKFEGLTQIFQKAYEHEQHISESINNIVDHAIKSKDHATFNFLQWYVAEQHEEEVLFKDILDKIELIGNENHGLYLADQYVKGIAKSRKS

SEQ ID NO: 4669 - protein, 1379 aa, Artificial Sequence
  SARS-CoV-2/USA/WA-UW292/2020__EPI_ISL_418077 spike protein (1-1211) Ferritin construct
MFVFLVLLPLVSSQCVNLTTRTQLPPAYTNSFTRGVYYPDKVFRSSVLHSTQDLFLPFFSNVTWFHAIHVSGTNGTKRFDNPVLPFNDGVYFASTEKSNIIRGWIFGTTLDSKTQSLLIVNNATNVVIKVCEFQFCNDPFLGVYYHKNNKSWMESEFRVYSSANNCTFEYVSQPFLMDLEGKQGNFKNLREFVFKNIDGYFKIYSKHTPINLVRDLPQGFSALEPLVDLPIGINITRFQTLLALHRSYLTPGDSSSGWTAGAAAYYVGYLQPRTFLLKYNENGTITDAVDCALDPLSETKCTLKSFTVEKGIYQTSNFRVQPTESIVRFPNITNLCPFGEVFNATRFASVYAWNRKRISNCVADYSVLYNSASFSTFKCYGVSPTKLNDLCFTNVYADSFVIRGDEVRQIAPGQTGKIADYNYKLPDDFTGCVIAWNSNNLDSKVGGNYNYLYRLFRKSNLKPFERDISTEIYQASSTPCNGVEGFNCYFPLQSYGFQPTNGVGYQPYRVVVLSFELLHAPATVCGPKKSTNLVKNKCVNFNFNGLTGTGVLTESNKKFLPFQQFGRDIADTTDAVRDPQTLEILDITPCSFGGVSVITPGTNTSNQVAVLYQDVNCTEVPVAIHADQLTPTWRVYSTGSNVFQTRAGCLIGAEHVNNSYECDIPIGAGICASYQTQTNSPRRARSVASQSIIAYTMSLGAENSVAYSNNSIAIPTNFTISVTTEILPVSMTKTSVDCTMYICGDSTECSNLLLQYGSFCTQLNRALTGIAVEQDKNTQEVFAQVKQIYKTPPIKDFGGFNFSQILPDPSKPSKRSFIEDLLFNKVTLADAGFIKQYGDCLGDIAARDLICAQKFNGLTVLPPLLTDEMIAQYTSALLAGTITSGWTFGAGAALQIPFAMQMAYRFNGIGVTQNVLYENQKLIANQFNSAIGKIQDSLSSTASALGKLQDVVNQNAQALNTLVKQLSSNFGAISSVLNDILSRLDKVEAEVQIDRLITGRLQSLQTYVTQQLIRAAEIRASANLAATKMSECVLGQSKRVDFCGKGYHLMSFPQSAPHGVVFLHVTYVPAQEKNFTTAPAICHDGKAHFPREGVFVSNGTHWFVTQRNFYEPQIITTDNTFVSGNCDVVIGIVNNTVYDPLQPELDSFKEELDKYFKNHTSPDVDLGDISGINASVVNIQKEIDRLNEVAKNLNESLIDLQELGKYEQYIKGGGGSDIIKLLNEQVNKEMQSSNLYMSMSSWCYTHSLDGAGLFLFDHAAEEYEHAKKLIIFLNENNVPVQLTSISAPEHKFEGLTQIFQKAYEHEQHISESINNIVDHAIKSKDHATFNFLQWYVAEQHEEEVLFKDILDKIELIGNENHGLYLADQYVKGIAKSRKS

SEQ ID NO: 4670 - protein, 1379 aa, Artificial Sequence
  SARS-CoV-2/Iceland/192/2020__EPI_ISL_417819 spike protein (1-1211) Ferritin construct
MFVFFVLLPLVSSQCVNLTTRTQLPPAYTNSFTRGVYYPDKVFRSSVLHSTQDLFLPFFSNVTWFHAIHVSGTNGTKRFDNPVLPFNDGVYFASTEKSNIIRGWIFGTTLDSKTQSLLIVNNATNVVIKVCEFQFCNDPFLGVYYHKNNKSWMESEFRVYSSANNCTFEYVSQPFLMDLEGKQGNFKNLREFVFKNIDGYFKIYSKHTPINLVRDLPQGFSALEPLVDLPIGINITRFQTLLALHRSYLTPGDSSSGWTAGAAAYYVGYLQPRTFLLKYNENGTITDAVDCALDPLSETKCTLKSFTVEKGIYQTSNFRVQPTESIVRFPNITNLCPFGEVFNATRFASVYAWNRKRISNCVADYSVLYNSASFSTFKCYGVSPTKLNDLCFTNVYADSFVIRGDEVRQIAPGQTGKIADYNYKLPDDFTGCVIAWNSNNLDSKVGGNYNYLYRLFRKSNLKPFERDISTEIYQAGSTPCNGVEGFNCYFPLQSYGFQPTNGVGYQPYRVVVLSFELLHAPATVCGPKKSTNLVKNKCVNFNFNGLTGTGVLTESNKKFLPFQQFGRDIADTTDAVRDPQTLEILDITPCSFGGVSVITPGTNTSNQVAVLYQGVNCTEVPVAIHADQLTPTWRVYSTGSNVFQTRAGCLIGAEHVNNSYECDIPIGAGICASYQTQTNSPRRARSVASQSIIAYTMSLGAENSVAYSNNSIAIPTNFTISVTTEILPVSMTKTSVDCTMYICGDSTECSNLLLQYGSFCTQLNRALTGIAVEQDKNTQEVFAQVKQIYKTPPIKDFGGFNFSQILPDPSKPSKRSFIEDLLFNKVTLADAGFIKQYGDCLGDIAARDLICAQKFNGLTVLPPLLTDEMIAQYTSALLAGTITSGWTFGAGAALQIPFAMQMAYRFNGIGVTQNVLYENQKLIANQFNSAIGKIQDSLSSTASALGKLQDVVNQNAQALNTLVKQLSSNFGAISSVLNDILSRLDKVEAEVQIDRLITGRLQSLQTYVTQQLIRAAEIRASANLAATKMSECVLGQSKRVDFCGKGYHLMSFPQSAPHGVVFLHVTYVPAQEKNFTTAPAICHDGKAHFPREGVFVSNGTHWFVTQRNFYEPQIITTDNTFVSGNCDVVIGIVNNTVYDPLQPELDSFKEELDKYFKNHTSPDVDLGDISGINASVVNIQKEIDRLNEVAKNLNESLIDLQELGKYEQYIKGGGGSDIIKLLNEQVNKEMQSSNLYMSMSSWCYTHSLDGAGLFLFDHAAEEYEHAKKLIIFLNENNVPVQLTSISAPEHKFEGLTQIFQKAYEHEQHISESINNIVDHAIKSKDHATFNFLQWYVAEQHEEEVLFKDILDKIELIGNENHGLYLADQYVKGIAKSRKS

SEQ ID NO: 4671 - protein, 1379 aa, Artificial Sequence
  SARS-CoV-2/Belgium/ULG-6939/2020__EPI_ISL_417020 spike protein (1-1211) Ferritin construct
MFVFLVLLPLVSSQCVNLTTRTQLPPAYTNSFTRGVYYPDKVFRSSVLHSTQDLFLPFFSNVTWFHAIHVSGTNGTKRFDNPVLPFNDGVYFASTEKSNIIRGWIFGTTLDSKTQSLLIVNNATNVVIKVCEFQFCNDPFLGVYYHKNNKSWMESEFRVYSSANNCTFEYVSQPFLMDLEGKQGNFKNLREFVFKNIDGYFKIYSKHTPINLVRDLPQGFSALEPLVDLPIGINITRFQTLLALHRSYLTPGDSSSGWTAGAAAYYVGYLQPRTFLLKYNENGTITDAVDCALDPLSETKCTLKSFTVEKGIYQTSNFRVQPTESIVRFPNITNLCPFGEVFNATRFASVYAWNRKRISNCVADYSVLYNSASFSTFKCYGVSPTKLNDLCFTNVYADSFVIRGDEVRQIAPGQTGKIADYNYKLPDDFTGCVIAWNSNNLDSKVGGNYNYLYRLFRKSNLKPFERDISTEIYQAGSTPCNGVEGFNCYFPLQSYGFQPTNGVGYQPYRVVVLSFELLHAPATVCGPKKSTNLVKNKCVNFNFNGLTGTGVLTESNKKFLPFQQFGRDIADTTDAVRDPQTLEILDITPCSFGGVSVITPGTNTSNQVAVLYQGVNCTEVPVAIHADQLTPTWRVYSTGSNVFQTRAGCLIGAEHVNNSYECDIPIGAGICASYQTQTNSPRRARSVASQSIIAYTMSLGAENSVVYSNNSIAIPTNFTISVTTEILPVSMTKTSVDCTMYICGDSTECSNLLLQYGSFCTQLNRALTGIAVEQDKNTQEVFAQVKQIYKTPPIKDFGGFNFSQILPDPSKPSKRSFIEDLLFNKVTLADAGFIKQYGDCLGDIAARDLICAQKFNGLTVLPPLLTDEMIAQYTSALLAGTITSGWTFGAGAALQIPFAMQMAYRFNGIGVTQNVLYENQKLIANQFNSAIGKIQDSLSSTASALGKLQDVVNQNAQALNTLVKQLSSNFGAISSVLNDILSRLDKVEAEVQIDRLITGRLQSLQTYVTQQLIRAAEIRASANLAATKMSECVLGQSKRVDFCGKGYHLMSFPQSAPHGVVFLHVTYVPAQEKNFTTAPAICHDGKAHFPREGVFVSNGTHWFVTQRNFYEPQIITTDNTFVSGNCDVVIGIVNNTVYDPLQPELDSFKEELDKYFKNHTSPDVDLGDISGINASVVNIQKEIDRLNEVAKNLNESLIDLQELGKYEQYIKGGGGSDIIKLLNEQVNKEMQSSNLYMSMSSWCYTHSLDGAGLFLFDHAAEEYEHAKKLIIFLNENNVPVQLTSISAPEHKFEGLTQIFQKAYEHEQHISESINNIVDHAIKSKDHATFNFLQWYVAEQHEEEVLFKDILDKIELIGNENHGLYLADQYVKGIAKSRKS

SEQ ID NO: 4672 - protein, 1379 aa, Artificial Sequence
  SARS-CoV-2/France/HF2496/2020__EPI_ISL_418231 spike protein (1-1211) Ferritin construct
MFVFLVLLPLVSSQCVNLTTRTQLPPAYTNSFTRGVYYPDKVFRSSVLHSTQDLFLPFFSNVTWFHAIHVSGTNGTKRFDNPVLPFNDGVYFASTEKSNIIRGWIFGTTLDSKTQSLLIVNNATNVVIKVCEFQFCNDPFLGVYYHKNNKSWMESEFRVYSSANNCTFEYVSQPFLMDLEGKQGNFKNLREFVFKNIDGYFKIYSKHTPINLVRDLPQGFSALEPLVDLPIGINITRFQTLLALHRSYLTPGDSSSGWTAGAAAYYVGYLQPRTFLLKYNENGTITDAVDCALDPLSETKCTLKSFTVEKGIYQTSNFRVQPTESIVRFPNITNLCPFGEVFNATRFASVYAWNRKRISNCVADYSVLYNSASFSTFKCYGVSPTKLNDLCFTNVYADSFVIRGDEVRQIAPGQTGKIADYNYKLPDDFTGCVIAWNSNNLDSKVGGNYNYLYRLFRKSNLKPFERDISTEIYQAGSTPCNGVEGFNCYFPLQSYGFQPTNGVGYQPYRVVVLSFELLHAPATVCGPKKSTNLVKNKCVNFNFNGLTGTGVLTESNKKFLPFQQFGRDIADTTDAVRDPQTLEILDITPCSFGGVSVITPGTNTSNQVAVLYQGVNCTEVPVAIHADQLTPTWRVYSTGSNVFQTRAGCLIGAEHVNNSYECDIPIGAGICASYQTQTNSPRRARSVASQSIIAYTMSLGAENSVAYSNNSIAIPTNFTISVTTEILPVSMTKTSVDCTMYICGDSTECSNLLLQYGSFCTQLNRALTGIAVEQDKNTQEVFAQVKQIYKTPPIKDFGGFNFSQILPDPSKPSKRSFIEDLLFNKVTLADAGFIKQYGDCLGDIVARDLICAQKFNGLTVLPPLLTDEMIAQYTSALLAGTITSGWTFGAGAALQIPFAMQMAYRFNGIGVTQNVLYENQKLIANQFNSAIGKIQDSLSSTASALGKLQDVVNQNAQALNTLVKQLSSNFGAISSVLNDILSRLDKVEAEVQIDRLITGRLQSLQTYVTQQLIRAAEIRASANLAATKMSECVLGQSKRVDFCGKGYHLMSFPQSAPHGVVFLHVTYVPAQEKNFTTAPAICHDGKAHFPREGVFVSNGTHWFVTQRNFYEPQIITTDNTFVSGNCDVVIGIVNNTVYDPLQPELDSFKEELDKYFKNHTSPDVDLGDISGINASVVNIQKEIDRLNEVAKNLNESLIDLQELGKYEQYIKGGGGSDIIKLLNEQVNKEMQSSNLYMSMSSWCYTHSLDGAGLFLFDHAAEEYEHAKKLIIFLNENNVPVQLTSISAPEHKFEGLTQIFQKAYEHEQHISESINNIVDHAIKSKDHATFNFLQWYVAEQHEEEVLFKDILDKIELIGNENHGLYLADQYVKGIAKSRKS

SEQ ID NO: 4673 - protein, 1379 aa, Artificial Sequence
  SARS-CoV-2/USA/WA-UW291/2020__EPI_ISL_418076 spike protein (1-1211) Ferritin construct
MFVFLVLLPLVSSQCVNLTTRTQLPPAYTNSFTRGVYYPDKVFRSSVLHSTQDLFLPFFSNVTWFHAIHVSGTNGTKRFDNPVLPFNDGVYFASTEKSNIIRGWIFGTTLDSKTQSLLIVNNATNVVIKVCEFQFCNDPFLGVYYHKNNKSWMESEFRVYSSANNCTFEYVSQPFLMDLEGKQGNFKNLREFVFKNIDGYFKIYSKHTPINLVRDLPQGFSALEPLVDLPIGINITRFQTLLALHRSYLTPGDSSSGWTAGAAAYYVGYLQPRTFLLKYNENGTITDAVDCALDPLSETKCTLKSFTVEKGIYQTSNFRVQPTESIVRFPNITNLCPFGEVFNATRFASVYAWNRKRISNCVADYSVLYNSASFSTFKCYGVSPTKLNDLCFTNVYADSFVIRGDEVRQIAPGQTGKIADYNYKLPDDFTGCVIAWNSNNLDSKVGGNYNYLYRLFRKSNLKPFERDISTEIYQAGSTPCNGVEGFNCYFPLQSYGFQPTNGVGYQPYRVVVLSFELLHAPATVCGPKKSTNLVKNKCVNFNFNGLTGTGVLTESNKKFLPFQQFGRDIADTTDAVRDPQTLEILDITPCSFGGVSVITPGTNTSNQVAVLYQGVNCTEVPVAIHADQLTPTWRVYSTGSNVFQTRAGCLIGAEHVNNSYECDIPIGAGICASYQTQTNSPRRARSVASQSIIAYTMSLGAENSVAYSNNSIAIPTNFTISVTTEILPVSMTKTSVDCTMYICGDSTECSNLLLQYGSFCTQLNRALTGIAVEQDKNTQEVFAQVKQIYKTPPIKDFGGFNFSQILPDPSKPSKRSFIEDLLFNKVTLADAGFIKQYGDCLGDIAARDLICAQKFNGLTVLPPLLTDEMIAQYTSALLAGTITSGWTFGAGAALQIPFAMQMAYRFNGIGVTQNVLYENQKLIANQFNSAIGKIQYSLSSTASALGKLQDVVNQNAQALNTLVKQLSSNFGAISSVLNDILSRLDKVEAEVQIDRLITGRLQSLQTYVTQQLIRAAEIRASANLAATKMSECVLGQSKRVDFCGKGYHLMSFPQSAPHGVVFLHVTYVPAQEKNFTTAPAICHDGKAHFPREGVFVSNGTHWFVTQRNFYEPQIITTDNTFVSGNCDVVIGIVNNTVYDPLQPELDSFKEELDKYFKNHTSPDVDLGDISGINASVVNIQKEIDRLNEVAKNLNESLIDLQELGKYEQYIKGGGGSDIIKLLNEQVNKEMQSSNLYMSMSSWCYTHSLDGAGLFLFDHAAEEYEHAKKLIIFLNENNVPVQLTSISAPEHKFEGLTQIFQKAYEHEQHISESINNIVDHAIKSKDHATFNFLQWYVAEQHEEEVLFKDILDKIELIGNENHGLYLADQYVKGIAKSRKS

SEQ ID NO: 4674 - protein, 1379 aa, Artificial Sequence; identical to SEQ ID NO: 4637
  SARS-CoV-2/Portugal/PT0034/2020__EPI_ISL_418019 spike protein (1-1211) Ferritin construct

SEQ ID NO: 4675 - protein, 1379 aa, Artificial Sequence
  SARS-CoV-2/Iceland/202/2020__EPI_ISL_417750 spike protein (1-1211) Ferritin construct
MFVFLVLLPLVSSQCVNLTTRTQLPPAYTNSFTRGVYYPDKVFRSSVLHSTQDLFLPFFSNVTWFHAIHVSGTNGTKRFDNPVLPFNDGVYFASTEKSNIIRGWIFGTTLDSKTQSLLIVNNATNVVIKVCEFQFCNDPFLGVYYHKNNKSWMESEFRVYSSANNCTFEYVSQPFLMDLEGKQGNFKNLREFVFKNIDGYFKIYSKHTPINLVRDLPQGFSALEPLVDLPIGINITRFQTLLALHRSYLTPGDSSSGWTAGAAAYYVGYLQPRTFLLKYNENGTITDAVDCALDPLSETKCTLKSFTVEKGIYQTSNFRVQPTESIVRFPNITNLCPFGEVFNATRFASVYAWNRKRISNCVADYSVLYNSASFSTFKCYGVSPTKLNDLCFTNVYADSFVIRGDEVRQIAPGQTGKIADYNYKLPDDFTGCVIAWNSNNLDSKVGGNYNYLYRLFRKSNLKPFERDISTEIYQAGSTPCNGVEGFNCYFPLQSYGFQPTNGVGYQPYRVVVLSFELLHAPATVCGPKKSTNLVKNKCVNFNFNGLTGTGVLTESNKKFLPFQQFGRDIADTTDAVRDPQTLEILDITPCSFGGVSVITPGTNTSNQVAVLYQDVNCTEVPVAIHADQLTPTWRVYSTGSNVFQTRAGCLIGAEHVNNSYECDIPIGAGICASYQTQTNSPRRARSVASQSIIAYTMSLGAENSVAYSNNSIAIPTNFTISVTTEILPVSMTKTSVDCTMYICGDSTECSNLLLQYGSFCTQLNRALTGIAVEQDKNTQEVFAQVKQIYKTPPIKDFGGFNFSQILPDPSKPSKRSFIEDLLFNKVTLADAGFIKQYGDCLGDIAARDLICAQKFNGLTVLPPLLTDEMIAQYTSALLAGTITSGWTFGAGAALQIPFAMQMAYRFNGIGVTQNVLYENQKLIANQFNSAIGKIQDSLSSTASALGKLQDVVNQNAQALNTLVKQLSSNFGAISSVLNDILSRLDKVEAEVQIDRLITGRLQSLQTYVTQQLIRAAEIRASANLAATKMSECVLGQSKRVDFCGKGYHLMSFPQSAPHGVVFLHVTYVPAQEKNFTTAPAICHDGKAHFPREGVFVSNGTHWFVTQRNFYEPQIITTDNTFVSGNCDVVIGIVNNTVYDPLQPELDSFKEELDKYFKNHTSPDVDLGDIPGINASVVNIQKEIDRLNEVAKNLNESLIDLQELGKYEQYIKGGGGSDIIKLLNEQVNKEMQSSNLYMSMSSWCYTHSLDGAGLFLFDHAAEEYEHAKKLIIFLNENNVPVQLTSISAPEHKFEGLTQIFQKAYEHEQHISESINNIVDHAIKSKDHATFNFLQWYVAEQHEEEVLFKDILDKIELIGNENHGLYLADQYVKGIAKSRKS

SEQ ID NO: 4676 - protein, 1379 aa, Artificial Sequence
  SARS-CoV-2/USA/WA-UW261/2020__EPI_ISL_418046 spike protein (1-1211) Ferritin construct
MFVFLVLLPLVSSQCVNLTTRTQLPPAYTNSFTRGVYYPDKVFRSSVLHSTQDLFLPFFSNVTWFHAIHVSGTNGTKRFDNPVLPFNDGVYFASTEKSNIIRGWIFGTTLDSKTQSLLIVNNATNVVIKVCEFQFCNDPFLGVYYHKNNKSWMESEFRVYSSANNCTFEYVSQPFLMDLEGKQGNFKNLREFVFKNIDGYFKIYSKHTPINLVRDLPQGFSALEPLVDLPIGINITRFQTLLALHRSYLTPGDSSSGWTAGAAAYYVGYLQPRTFLLKYNENGTITDAVDCALDPLSETKCTLKSFTVEKGIYQTSNFRVQPTESIVRFPNITNLCPFGEVFNATRFTSVYAWNRKRISNCVADYSVLYNSASFSTFKCYGVSPTKLNDLCFTNVYADSFVIRGDEVRQIAPGQTGKIADYNYKLPDDFTGCVIAWNSNNLDSKVGGNYNYLYRLFRKSNLKPFERDISTEIYQAGSTPCNGVEGFNCYFPLQSYGFQPTNGVGYQPYRVVVLSFELLHAPATVCGPKKSTNLVKNKCVNFNFNGLTGTGVLTESNKKFLPFQQFGRDIADTTDAVRDPQTLEILDITPCSFGGVSVITPGTNTSNQVAVLYQDVNCTEVPVAIHADQLTPTWRVYSTGSNVFQTRAGCLIGAEHVNNSYECDIPIGAGICASYQTQTNSPRRARSVASQSIIAYTMSLGAENSVAYSNNSIAIPTNFTISVTTEILPVSMTKTSVDCTMYICGDSTECSNLLLQYGSFCTQLNRALTGIAVEQDKNTQEVFAQVKQIYKTPPIKDFGGFNFSQILPDPSKPSKRSFIEDLLFNKVTLADAGFIKQYGDCLGDIAARDLICAQKFNGLTVLPPLLTDEMIAQYTSALLAGTITSGWTFGAGAALQIPFAMQMAYRFNGIGVTQNVLYENQKLIANQFNSAIGKIQDSLSSTASALGKLQDVVNQNAQALNTLVKQLSSNFGAISSVLNDILSRLDKVEAEVQIDRLITGRLQSLQTYVTQQLIRAAEIRASANLAATKMSECVLGQSKRVDFCGKGYHLMSFPQSAPHGVVFLHVTYVPAQEKNFTTAPAICHDGKAHFPREGVFVSNGTHWFVTQRNFYEPQIITTDNTFVSGNCDVVIGIVNNTVYDPLQPELDSFKEELDKYFKNHTSPDVDLGDISGINASVVNIQKEIDRLNEVAKNLNESLIDLQELGKYEQYIKGGGGSDIIKLLNEQVNKEMQSSNLYMSMSSWCYTHSLDGAGLFLFDHAAEEYEHAKKLIIFLNENNVPVQLTSISAPEHKFEGLTQIFQKAYEHEQHISESINNIVDHAIKSKDHATFNFLQWYVAEQHEEEVLFKDILDKIELIGNENHGLYLADQYVKGIAKSRKS

SEQ ID NO: 4677 - protein, 1379 aa, Artificial Sequence
  SARS-CoV-2/Portugal/PT0035/2020__EPI_ISL_418020 spike protein (1-1211) Ferritin construct
MFVFLVLLPLVSSQCVNLTTRTQLPPAYTNSFTRGVYYPDKVFRSSVLHSTQDLFLPFFSNVTWFHAIHVSGTNGTKRFDNPVLPFNDGVYFASTEKSNIIRGWIFGTTLDSKTQSLLIVNNATNVVIKVCEFQFCNDPFLGVYYHKNNKSWMESEFRVYSSANNCTFEYVSQPFLMDLEGKQGNFKNLREFVFKNIDGYFKIYSKHTPINLVRDLPQGFSALEPLVDLPIGINITRFQTLLALHRSYLTPGDSSSGWTAGAAAYYVGYLQPRTFLLKYNENGTITDAVDCALDPLSETKCTLKSFTVEKGIYQTSNFRVQPTESIVRFPNITNLCPFGEVFNATRFASVYAWNRKRISNCVADYSVLYNSASFSTFKCYGVSPTKLNDLCFTNVYADSFVIRGDEVRQIAPGQTGKIADYNYKLPDDFTGCVIAWNSNNLDSKVGGNYNYLYRLFRKSNLKPFERDISTEIYQAGSTPCNGVEGFNCYFPLQSYGFQPTNGVGYQPYRVVVLSFELLHAPATVCGPKKSTNLVKNKCVNFNFNGLTGTGVLTESNKKFLPFQQFGRDIADTTDAVRDPQTLEILDITPCSFGGVSVITPGTNTSNQVAVLYQDVNCTEVPVAIHADQLTPTWRVYSTGSNVFQTRAGCLIGAEHVNNSYECDIPIGAGICASYQTQTNSPRRARSVASQSIIAYTMSLGAENSVAYSNNSIAIPTNFTISVTTEILPVSMTKTSVDCTMYICGDSTECSNLLLQYGSFCTQLNRALTGIAVEQDKNTQEVFAQVKQIYKTPPIKDFGGFNFSQILPDPSKPSKRSFIEDLLFNKVTLADAGFIKQYGDCLGDISARDLICAQKFNGLTVLPPLLTDEMIAQYTSALLAGTITSGWTFGAGAALQIPFAMQMAYRFNGIGVTQNVLYENQKLIANQFNSAIGKIQDSLSSTASALGKLQDVVNQNAQALNTLVKQLSSNFGAISSVLNDILSRLDKVEAEVQIDRLITGRLQSLQTYVTQQLIRAAEIRASANLAATKMSECVLGQSKRVDFCGKGYHLMSFPQSAPHGVVFLHVTYVPAQEKNFTTAPAICHDGKAHFPREGVFVSNGTHWFVTQRNFYEPQIITTDNTFVSGNCDVVIGIVNNTVYDPLQPELDSFKEELDKYFKNHTSPDVDLGDISGINASVVNIQKEIDRLNEVAKNLNESLIDLQELGKYEQYIKGGGGSDIIKLLNEQVNKEMQSSNLYMSMSSWCYTHSLDGAGLFLFDHAAEEYEHAKKLIIFLNENNVPVQLTSISAPEHKFEGLTQIFQKAYEHEQHISESINNIVDHAIKSKDHATFNFLQWYVAEQHEEEVLFKDILDKIELIGNENHGLYLADQYVKGIAKSRKS

SEQ ID NO: 4678 - protein, 1379 aa, Artificial Sequence
  SARS-CoV-2/USA/NY-NYUMC7/2020__EPI_ISL_418192 spike protein (1-1211) Ferritin construct
MFVFLVLLPLVSSQCVNLTTRTQLPPAYTNSFTRGVYYPDKVFRSSVLHSTQDLFLPFFSNVTWFHAIHVSGTNGTKRFDNPVLPFNDGVYFASTEKSNIIRGWIFGTTLDSKTQSLLIVNNATNVVIKVCEFQFCNDPFLGVYHHKNNKSWMESEFRVYSSANNCTFEYVSQPFLMDLEGKQGNFKNLREFVFKNIDGYFKIYSKHTPINLVRDLPQGFSALEPLVDLPIGINITRFQTLLALHRSYLTPGDSSSGWTAGAAAYYVGYLQPRTFLLKYNENGTITDAVDCALDPLSETKCTLKSFTVEKGIYQTSNFRVQPTESIVRFPNITNLCPFGEVFNATRFASVYAWNRKRISNCVADYSVLYNSASFSTFKCYGVSPTKLNDLCFTNVYADSFVIRGDEVRQIAPGQTGKIADYNYKLPDDFTGCVIAWNSNNLDSKVGGNYNYLYRLFRKSNLKPFERDISTEIYQAGSTPCNGVEGFNCYFPLQSYGFQPTNGVGYQPYRVVVLSFELLHAPATVCGPKKSTNLVKNKCVNFNFNGLTGTGVLTESNKKFLPFQQFGRDIADTTDAVRDPQTLEILDITPCSFGGVSVITPGTNTSNQVAVLYQGVNCTEVPVAIHADQLTPTWRVYSTGSNVFQTRAGCLIGAEHVNNSYECDIPIGAGICASYQTQTNSPRRARSVASQSIIAYTMSLGAENSVAYSNNSIAIPTNFTISVTTEILPVSMTKTSVDCTMYICGDSTECSNLLLQYGSFCTQLNRALTGIAVEQDKNTQEVFAQVKQIYKTPPIKDFGGFNFSQILPDPSKPSKRSFIEDLLFNKVTLADAGFIKQYGDCLGDIAARDLICAQKFNGLTVLPPLLTDEMIAQYTSALLAGTITSGWTFGAGAALQIPFAMQMAYRFNGIGVTQNVLYENQKLIANQFNSAIGKIQDSLSSTASALGKLQDVVNQNAQALNTLVKQLSSNFGAISSVLNDILSRLDKVEAEVQIDRLITGRLQSLQTYVTQQLIRAAEIRASANLAATKMSECVLGQSKRVDFCGKGYHLMSFPQSAPHGVVFLHVTYVPAQEKNFTTAPAICHDGKAHFPREGVFVSNGTHWFVTQRNFYEPQIITTDNTFVSGNCDVVIGIVNNTVYDPLQPELDSFKEELDKYFKNHTSPDVDLGDISGINASVVNIQKEIDRLNEVAKNLNESLIDLQELGKYEQYIKGGGGSDIIKLLNEQVNKEMQSSNLYMSMSSWCYTHSLDGAGLFLFDHAAEEYEHAKKLIIFLNENNVPVQLTSISAPEHKFEGLTQIFQKAYEHEQHISESINNIVDHAIKSKDHATFNFLQWYVAEQHEEEVLFKDILDKIELIGNENHGLYLADQYVKGIAKSRKS

SEQ ID NO: 4679 - protein, 1379 aa, Artificial Sequence
  SARS-CoV-2/Iceland/189/2020__EPI_ISL_417709 spike protein (1-1211) Ferritin construct
MFVFLVLLPLVSSQCVNLTTRTQLPPAYTNSFTRGVYYPDKVFRSSVLHSTQDLFLPFFSNVTWFHAIHVSGTNGTKRFDNPVLPFNDGVYFASTEKSNIIRGWIFGTTLDSKTQSLLIVNNATNVVIKVCEFQFCNDPFLGVYYHKNNKSWMESEFRVYSSANNCTFEYVSQPFLMDLEGKQGNFKNLREFVFKNIDGYFKIYSKHTPINLVRDLPQGFSALEPLVDLPIGINITRFQTLLALHRSYLTPGDSSSGWTAGAAAYYVGYLQPRTFLLKYNENGTITDAVDCALDPLSETKCTLKSFTVEKGIYQTSNFRVQPTESIVRFPNITNLCPFGEVFNATRFASVYAWNRKRISNCVADYSVLYNSASFSTFKCYGVSPTKLNDLCFTNVYADSFVIRGDEVRQIAPGQTGKIADYNYKLPDDFTGCVIAWNSNNLDSKVGGNYNYLYRLFRKSNLKPFERDISTEIYQAGSTPCNGVEGFNCYFPLQSYGFQPTNGVGYQPYRVVVLSFELLHAPATVCGPKKSTNLVKNKCVNFNFNGLTGTGVLTESNKKFLPFQQFGRDIADTTDAVRDPQTLEILDITPCSFGGVSVITPGTNTSNQVAVLYQGVNCTEVPVAIHADQLTPTWRVYSTGSNVFQTRAGCLIGAEHVNNSYECDIPIGAGICASYQTQTNSPRRARSVASQSIIAYTMSLGAENSVAYSNNSIAIPTNFTISVTTEILPVSMTKTSVDCTMYICGDSTECSNLLLQYGSFCTQLNRALTGIAVEQDKNTQEVFAQVKQIYKTPPIKDFGGFNFSQILPDPSKPSKRSFIEDLLFNKVTLADAGFTKQYGDCLGDIAARDLICAQKFNGLTVLPPLLTDEMIAQYTSALLAGTITSGWTFGAGAALQIPFAMQMAYRFNGIGVTQNVLYENQKLIANQFNSAIGKIQDSLSSTASALGKLQDVVNQNAQALNTLVKQLSSNFGAISSVLNDILSRLDKVEAEVQIDRLITGRLQSLQTYVTQQLIRAAEIRASANLAATKMSECVLGQSKRVDFCGKGYHLMSFPQSAPHGVVFLHVTYVPAQEKNFTTAPAICHDGKAHFPREGVFVSNGTHWFVTQRNFYEPQIITTDNTFVSGNCDVVIGIVNNTVYDPLQPELDSFKEELDKYFKNHTSPDVDLGDISGINASVVNIQKEIDRLNEVAKNLNESLIDLQELGKYEQYIKGGGGSDIIKLLNEQVNKEMQSSNLYMSMSSWCYTHSLDGAGLFLFDHAAEEYEHAKKLIIFLNENNVPVQLTSISAPEHKFEGLTQIFQKAYEHEQHISESINNIVDHAIKSKDHATFNFLQWYVAEQHEEEVLFKDILDKIELIGNENHGLYLADQYVKGIAKSRKS

SEQ ID NO: 4680 - protein, 1379 aa, Artificial Sequence
  SARS-CoV-2/Australia/NSW56/2020__EPI_ISL_417408 spike protein (1-1211) Ferritin construct
MFVFLVLLPLVSSQCVNLTTRTQLPPAYTNSFTRGVYYPDKVFRSSVLHSTQDLFLPFFSNVTWFHAIHVSGTNGTKRFDNPVLPFNDGVYFASTEKSNIIRGWIFGTTLDSKTQSLLIVNNATNVVIKVCEFQFCNDPFLGVYYHKNNKSWMESEFRVYSSANNCTFEYVSQPFLMDLEGKQGNFKNLREFVFKNIDGYFKIYSKHTPINLVRDLPQGFSALEPLVDLPIGINITRFQTLLALHRSYLTPGDSSSGWTAGAAAYYVGYLQPRTFLLKYNENGTITDAVDCALDPLSETKCTLKSFTVEKGIYQTSNFRVQPTESIVRFPNITNLCPFGEVFNATRFASVYAWNRKRISNCVADYSVLYNSASFSTFKCYGVSPTKLNDLCFTNVYADSFVIRGDEVRQIAPGQTGKIADYNYKLPDDFTGCVIAWNSNNLDSKVGGNYNYLYRLFRKSNLKPFERDISTEIYQAGSTPCNGVEGFNCYFPLQSYGFQPTNGVGYQPYRVVVLSFELLHAPATVCGPKKSTNLVKNKCVNFNFNGLTGTGVLTESNKKFLPFQQFGRDIADTTDAVRDPQTLEILDITPCSFGGVSVITPGTNTSNQVAVLYQDVNCTEVPVAIHADQLTPTWRVYSTGSNVFQTRAGCLIGAEHVNNSYECDIPIGAGICASYQTQTNSPRRARSVASQSIIAYTMSLGAENSVAYSNNSIAIPTNFTISVTTEILPVSMTKTSVDCTMYICGDSTECSNLLLQYGSFCTQLNRALTGIAVEQDKNTQEVFAQVKQIYKTPPIKDFGGFNFSQILPDSSKPSKRSFIEDLLFNKVTLADAGFIKQYGDCLGDIAARDLICAQKFNGLTVLPPLLTDEMIAQYTSALLAGTITSGWTFGAGAALQIPFAMQMAYRFNGIGVTQNVLYENQKLIANQFNSAIGKIQDSLSSTASALGKLQDVVNQNAQALNTLVKQLSSNFGAISSVLNDILSRLDKVEAEVQIDRLITGRLQSLQTYVTQQLIRAAEIRASANLAATKMSECVLGQSKRVDFCGKGYHLMSFPQSAPHGVVFLHVTYVPAQEKNFTTAPAICHDGKAHFPREGVFVSNGTHWFVTQRNFYEPQIITTDNTFVSGNCDVVIGIVNNTVYDPLQPELDSFKEELDKYFKNHTSPDVDLGDISGINASVVNIQKEIDRLNEVAKNLNESLIDLQELGKYEQYIKGGGGSDIIKLLNEQVNKEMQSSNLYMSMSSWCYTHSLDGAGLFLFDHAAEEYEHAKKLIIFLNENNVPVQLTSISAPEHKFEGLTQIFQKAYEHEQHISESINNIVDHAIKSKDHATFNFLQWYVAEQHEEEVLFKDILDKIELIGNENHGLYLADQYVKGIAKSRKS

SEQ ID NO: 4681 - protein, 1379 aa, Artificial Sequence
  SARS-CoV-2/Iceland/280/2020__EPI_ISL_417608 spike protein (1-1211) Ferritin construct
MFVFLVLLPLVSSQCVNLTTRTQLPPAYTNSFTRGVYYPDKVFRSSVLHSTQDLFLPFFSNVTWFHAIHVSGTNGTKRFDNPVLPFNDGVYFASTEKSNIIRGWIFGTTLDSKTQSLLIVNNATNVVIKVCEFQFCNDPFLGVYYHKNNKSWMESEFRVYSSANNCTFEYVSQPFLMDLEGKQGNFKNLREFVFKNIDGYFKIYSKHTPINLVRDLPQGFSALEPLVDLPIGINITRFQTLLALHRSYLTPGDSSSGWTAGAAAYYVGYLQPRTFLLKYNENGTITDAVDCALDPLSETKCTLKSFTVEKGIYQTSNFRVQPTESIVRFPNITNLCPFGEVFNATRFASVYAWNRKRISNCVADYSVLYNSASFSTFKCYGVSPTKLNDLCFTNVYADSFVIRGDEVRQIAPGQTGKIADYNYKLPDDFTGCVIAWNSNNLDSKVGGNYNYLYRLFRKSNLKPFERDISTEIYQAGSTPCNGVEGFNCYFPLQSYGFQPTNGVGYQPYRVVVLSFELLHAPATVCGPKKSTNLVKNKCVNFNFNGLTGTGVLTESNKKFLPFQQFGRDIADTTDAVRDPQTLEILDITPCSFGGVSVITPGTNTSNQVAVLYQGVNCTEVPVAIHADQLTPTWRVYSTGSNVFQTRAGCLIGAEHVNNSYECDIPIGAGICASYHTQTNSPRRARSVASQSIIAYTMSLGAENSVAYSNNSIAIPTNFTISVTTEILPVSMTKTSVDCTMYICGDSTECSNLLLQYGSFCTQLNRALTGIAVEQDKNTQEVFAQVKQIYKTPPIKDFGGFNFSQILPDPSKPSKRSFIEDLLFNKVTLADAGFIKQYGDCLGDIAARDLICAQKFNGLTVLPPLLTDEMIAQYTSALLAGTITSGWTFGAGAALQIPFAMQMAYRFNGIGVTQNVLYENQKLIANQFNSAIGKIQDSLSSTASALGKLQDVVNQNAQALNTLVKQLSSNFGAISSVLNDILSRLDKVEAEVQIDRLITGRLQSLQTYVTQQLIRAAEIRASANLAATKMSECVLGQSKRVDFCGKGYHLMSFPQSAPHGVVFLHVTYVPAQEKNFTTAPAICHDGKAHFPREGVFVSNGTHWFVTQRNFYEPQIITTDNTFVSGNCDVVIGIVNNTVYDPLQPELDSFKEELDKYFKNHTSPDVDLGDISGINASVVNIQKEIDRLNEVAKNLNESLIDLQELGKYEQYIKGGGGSDIIKLLNEQVNKEMQSSNLYMSMSSWCYTHSLDGAGLFLFDHAAEEYEHAKKLIIFLNENNVPVQLTSISAPEHKFEGLTQIFQKAYEHEQHISESINNIVDHAIKSKDHATFNFLQWYVAEQHEEEVLFKDILDKIELIGNENHGLYLADQYVKGIAKSRKS

SEQ ID NO: 4682 - protein, 1379 aa, Artificial Sequence; identical to SEQ ID NO: 4637
  SARS-CoV-2/Iceland/247/2020__EPI_ISL_417575 spike protein (1-1211) Ferritin construct

SEQ ID NO: 4683 - protein, 1379 aa, Artificial Sequence
  SARS-CoV-2/Iceland/238/2020__EPI_ISL_417566 spike protein (1-1211) Ferritin construct
MFVFLVLLPLVSSQCVNLTTRTQLPPAYTNSFTRGVYYPDKVFRSSVLHSTQDLFLPFFSNVTWFHAIHVSGTNGTKRFDNPVLPFNDGVYFASTEKSNIIRGWIFGTTLDSKTQSLLIVNNATNVVIKVCEFQFCNDPFLGVYYHKNNKSWMESEFRVYSSANNCTFEYVSQPFLMDLEGKQGNFKNLREFVFKNIDGYFKIYSKHTPINLVRDLPQGFSALEPLVDLPIGINITRFQTLLALHRSYLTPGDSSSGWTAGAAAYYVGYLQPRTFLLKYNENGTITDAVDCALDPLSETKCTLKSFTVEKGIYQTSNFRVQPTESIVRFPNITNLCPFGEVFNATRFASVYAWNRKRISNCVADYSVLYNSASFSTFKCYGVSPTKLNDLCFTNVYADSFVIRGDEVRQIAPGQTGKIADYNYKLPDDFTGCVIAWNSNNLDSKVGGNYNYLYRLFRKSNLKPFERDISTEIYQAGSTPCNGVEGFNCYFPLQSYGFQPTNGVGYQPYRVVVLSFELLHAPATVCGPKKSTNLVKNKCVNFNFNGLTGTGVLTESNKKFLPFQQFGRDIADTTDAVRDPQTLEILDITPCSFGGVSVITPGTNTSNQVAVLYQGVNCTEVPVAIHADQLTPTWRVYSTGSNVFQTRAGCLIGAEHVNNSYECDIPIGAGICASYQTQTNSPRRARSVASQSIIAYTMSLGAENSVAYSNNSIAIPTNFTISVTTEILPVSMTKTSVDCTMYICGDSTECSNLLLQYGSFCTQLNRALTGIAVEQDKNTQEVFAQVKQIYKTPPIKDFGGFNFSQILPDPSKPSKRSFIEDLLFNKVTLADVGFIKQYGDCLGDIAARDLICAQKFNGLTVLPPLLTDEMIAQYTSALLAGTITSGWTFGAGAALQIPFAMQMAYRFNGIGVTQNVLYENQKLIANQFNSAIGKIQDSLSSTASALGKLQDVVNQNAQALNTLVKQLSSNFGAISSVLNDILSRLDKVEAEVQIDRLITGRLQSLQTYVTQQLIRAAEIRASANLAATKMSECVLGQSKRVDFCGKGYHLMSFPQSAPHGVVFLHVTYVPAQEKNFTTAPAICHDGKAHFPREGVFVSNGTHWFVTQRNFYEPQIITTDNTFVSGNCDVVIGIVNNTVYDPLQPELDSFKEELDKYFKNHTSPDVDLGDISGINASVVNIQKEIDRLNEVAKNLNESLIDLQELGKYEQYIKGGGGSDIIKLLNEQVNKEMQSSNLYMSMSSWCYTHSLDGAGLFLFDHAAEEYEHAKKLIIFLNENNVPVQLTSISAPEHKFEGLTQIFQKAYEHEQHISESINNIVDHAIKSKDHATFNFLQWYVAEQHEEEVLFKDILDKIELIGNENHGLYLADQYVKGIAKSRKS

SEQ ID NO: 4684 - protein, 1379 aa, Artificial Sequence
  SARS-CoV-2/Greece/16/2020__EPI_ISL_418265 spike protein (1-1211) Ferritin construct
MFVFLVLLPLVSSQCVNLTTRTQLPPAYTNSFTRGVYYPDKVFRSSVLHSTQDLFLPFFSNVTWFHAIHVSGTNGTKRFDNPVLPFNDGVYFASTEKSNIIRGWIFGTTLDSKTQSLLIVNNATNVVIKVCEFQFCNDPFLGVYYHKNNKSWMESEFRVYSSANNCTFEYVSQPFLMDLEGKQGNFKNLREFVFKNVDGYFKIYSKHTPINLVRDLPQGFSALEPLVDLPIGINITRFQTLLALHRSYLTPGDSSSGWTAGAAAYYVGYLQPRTFLLKYNENGTITDAVDCALDPLSETKCTLKSFTVEKGIYQTSNFRVQPTESIVRFPNITNLCPFGEVFNATRFASVYAWNRKRISNCVADYSVLYNSASFSTFKCYGVSPTKLNDLCFTNVYADSFVIRGDEVRQIAPGQTGKIADYNYKLPDDFTGCVIAWNSNNLDSKVGGNYNYLYRLFRKSNLKPFERDISTEIYQAGSTPCNGVEGFNCYFPLQSYGFQPTNGVGYQPYRVVVLSFELLHAPATVCGPKKSTNLVKNKCVNFNFNGLTGTGVLTESNKKFLPFQQFGRDIADTTDAVRDPQTLEILDITPCSFGGVSVITPGTNTSNQVAVLYQDVNCTEVPVAIHADQLTPTWRVYSTGSNVFQTRAGCLIGAEHVNNSYECDIPIGAGICASYQTQTNSPRRARSVASQSIIAYTMSLGAENSVAYSNNSIAIPTNFTISVTTEILPVSMTKTSVDCTMYICGDSTECSNLLLQYGSFCTQLNRALTGIAVEQDKNTQEVFAQVKQIYKTPPIKDFGGFNFSQILPDPSKPSKRSFIEDLLFNKVTLADAGFIKQYGDCLGDIAARDLICAQKFNGLTVLPPLLTDEMIAQYTSALLAGTITSGWTFGAGAALQIPFAMQMAYRFNGIGVTQNVLYENQKLIANQFNSAIGKIQDSLSSTASALGKLQDVVNQNAQALNTLVKQLSSNFGAISSVLNDILSRLDKVEAEVQIDRLITGRLQSLQTYVTQQLIRAAEIRASANLAATKMSECVLGQSKRVDFCGKGYHLMSFPQSAPHGVVFLHVTYVPAQEKNFTTAPAICHDGKAHFPREGVFVSNGTHWFVTQRNFYEPQIITTDNTFVSGNCDVVIGIVNNTVYDPLQPELDSFKEELDKYFKNHTSPDVDLGDISGINASVVNIQKEIDRLNEVAKNLNESLIDLQELGKYEQYIKGGGGSDIIKLLNEQVNKEMQSSNLYMSMSSWCYTHSLDGAGLFLFDHAAEEYEHAKKLIIFLNENNVPVQLTSISAPEHKFEGLTQIFQKAYEHEQHISESINNIVDHAIKSKDHATFNFLQWYVAEQHEEEVLFKDILDKIELIGNENHGLYLADQYVKGIAKSRKS

SEQ ID NO: 4685 - protein, 1379 aa, Artificial Sequence
  SARS-CoV-2/Iceland/319/2020__EPI_ISL_417648 spike protein (1-1211) Ferritin construct
MFVFLVLLPLVSSQCVNLTTRTQLPPAYTNSFTRGVYYPDKVFRSSVLHSTQDLFLPFFSNVTWFHAIHVSGTNGTKRFDNPVLPFNDGVYFASTEKSNIIRGWIFGTTLDSKTQSLLIVNNATNVVIKVCEFQFCNDPFLGVYYHKNNKSWMESEFRVYSSANNCTFEYVSQPFLIDLEGKQGNFKNLREFVFKNIDGYFKIYSKHTPINLVRDLPQGFSALEPLVDLPIGINITRFQTLLALHRSYLTPGDSSSGWTAGAAAYYVGYLQPRTFLLKYNENGTITDAVDCALDPLSETKCTLKSFTVEKGIYQTSNFRVQPTESIVRFPNITNLCPFGEVFNATRFASVYAWNRKRISNCVADYSVLYNSASFSTFKCYGVSPTKLNDLCFTNVYADSFVIRGDEVRQIAPGQTGKIADYNYKLPDDFTGCVIAWNSNNLDSKVGGNYNYLYRLFRKSNLKPFERDISTEIYQAGSTPCNGVEGFNCYFPLQSYGFQPTNGVGYQPYRVVVLSFELLHAPATVCGPKKSTNLVKNKCVNFNFNGLTGTGVLTESNKKFLPFQQFGRDIADTTDAVRDPQTLEILDITPCSFGGVSVITPGTNTSNQVAVLYQGVNCTEVPVAIHADQLTPTWRVYSTGSNVFQTRAGCLIGAEHVNNSYECDIPIGAGICASYQTQTNSPRRARSVASQSIIAYTMSLGAENSVAYSNNSIAIPTNFTISVTTEILPVSMTKTSVDCTMYICGDSTECSNLLLQYGSFCTQLNRALTGIAVEQDKNTQEVFAQVKQIYKTPPIKDFGGFNFSQILPDPSKPSKRSFIEDLLFNKVTLADAGFIKQYGDCLGDIAARDLICAQKFNGLTVLPPLLTDEMIAQYTSALLAGTITSGWTFGAGAALQIPFAMQMAYRFNGIGVTQNVLYENQKLIANQFNSAIGKIQDSLSSTASALGKLQDVVNQNAQALNTLVKQLSSNFGAISSVLNDILSRLDKVEAEVQIDRLITGRLQSLQTYVTQQLIRAAEIRASANLAATKMSECVLGQSKRVDFCGKGYHLMSFPQSAPHGVVFLHVTYVPAQEKNFTTAPAICHDGKAHFPREGVFVSNGTHWFVTQRNFYEPQIITTDNTFVSGNCDVVIGIVNNTVYDPLQPELDSFKEELDKYFKNHTSPDVDLGDISGINASVVNIQKEIDRLNEVAKNLNESLIDLQELGKYEQYIKGGGGSDIIKLLNEQVNKEMQSSNLYMSMSSWCYTHSLDGAGLFLFDHAAEEYEHAKKLIIFLNENNVPVQLTSISAPEHKFEGLTQIFQKAYEHEQHISESINNIVDHAIKSKDHATFNFLQWYVAEQHEEEVLFKDILDKIELIGNENHGLYLADQYVKGIAKSRKS

SEQ ID NO: 4686 - protein, 1379 aa, Artificial Sequence
  SARS-CoV-2/Congo/94/2020__EPI_ISL_417947 spike protein (1-1211) Ferritin construct
MFVFLVLLPLVSSQCVNLTTRTQLPPAYTNSFTRGVYYPDKVFRSSVLHSTQDLFLPFFSNVTWFHAIHVSGTNGTKRFDNPVLPFNDGVYFASTEKSNIIRGWIFGTTLDSKTQSLLIVNNATNVVIKVCEFQFCNDPFLGVYYHKNNKSWMESEFRVYSSANNCTFEYVSQPFLMDLEGKQGNFKNLREFVFKNIDGYFKIYSKHTPINLVRDLPQGFSALEPLVDLPIGINITRFQTLLALHRSYLTPGDSSSGWTAGAAAYYVGYLQPRTFLLKYNENGTITDAVDCALDPLSETKCTLKSFTVEKGIYQTSNFRVQPTESIVRFPNITNLCPFGEVFNATRFASVYAWNRKRISNCVADYSVLYNSASFSTFKCYGVSPTKLNDLCFTNVYADSFVIRGDEVRQIAPGQTGKIADYNYKLPDDFTGCVIAWNSNNLDSKVGGNYNYLYRLFRKSNLKPFERDISTEIYQAGSTPCNGVEGFNCYFPLQSYGFQPTNGVGYQPYRVVVLSFELLHAPATVCGPKKSTNLVKNKCVNFNFNGLTGTGVLTESNKKFLPFQQFGRDIADTTDAVRDPQTLEILDITPCSFGGVSVITPGTNTSNQVAVLYQGVNCTEVPVAIHADQLTPTWRVYSTGSNVFQTRAGCLIGAEHVNNSYECDIPIGAGICASYQTQTNSPRRARSVASQSIIAYTMSLGAENSVAYSNNSIAIPTNFTISVTTEILPVSMTKTSVDCTMYICGDSTECSNLLLQYGSFCTQLNRALTGIAVEQDKNTQEVFAQVKQIYKTPPIKDFGGFNFSQILPDPSKPSKRSFIEDILFNKVTLADAGFIKQYGDCLGDIAARDLICAQKFNGLTVLPPLLTDEMIAQYTSALLAGTITSGWTFGAGAALQIPFAMQMAYRFNGIGVTQNVLYENQKLIANQFNSAIGKIQDSLSSTASALGKLQDVVNQNAQALNTLVKQLSSNFGAISSVLNDILSRLDKVEAEVQIDRLITGRLQSLQTYVTQQLIRAAEIRASANLAATKMSECVLGQSKRVDFCGKGYHLMSFPQSAPHGVVFLHVTYVPAQEKNFTTAPAICHDGKAHFPREGVFVSNGTHWFVTQRNFYEPQIITTDNTFVSGNCDVVIGIVNNTVYDPLQPELDSFKEELDKYFKNHTSPDVDLGDISGINASVVNIQKEIDRLNEVAKNLNESLIDLQELGKYEQYIKGGGGSDIIKLLNEQVNKEMQSSNLYMSMSSWCYTHSLDGAGLFLFDHAAEEYEHAKKLIIFLNENNVPVQLTSISAPEHKFEGLTQIFQKAYEHEQHISESINNIVDHAIKSKDHATFNFLQWYVAEQHEEEVLFKDILDKIELIGNENHGLYLADQYVKGIAKSRKS

SEQ ID NO: 4687 - protein, 1379 aa, Artificial Sequence
  SARS-CoV-2/Congo/158/2020__EPI_ISL_417950 spike protein (1-1211) Ferritin construct
MFVFLVLLPLVSSQCVNLTTRTQLPPAYTNSFTRGVYYPDKVFRSSVLHSTQDLFLPFFSNVTWFHAIHVSGTNGTKRFDNPVLPFNDGVYFASTEKSNIIRGWIFGTTLDSKTQSLLIVNNATNVVIKVCEFQFCNDPFLGVYYHKNNKSWMESEFRVYSSANNCTFEYVSQPFLMDLEGKQGNFKNLREFVFKNIDGYFKIYSKHTPINLVRDLPQGFSALEPLVDLPIGINITRFQTLLALHRSYLTPGDSSSGWTAGAAAYYVGYLQPRTFLLKYNENGTITDAVDCALDPLSETKCTLKSFTVEKGIYQTSNFRVQPTESIVRFPNITNLCPFGEVFNATRFASVYAWNRKRISNCVADYSVLYNSASFSTFKCYGVSPTKLNDLCFTNVYADSFVIRGDEVRQIAPGQTGKIADYNYKLPDDFTGCVIAWNSNNLDSKVGGNYNYLYRLFRKSNLKPFERDISTEIYQAGSTPCNGVEGFNCYFPLQSYGFQPTNGVGYQPYRVVVLSFELLHAPATVCGPKKSTNLVKNKCVNFNFNGLTGTGVLTESNKKFLPFQQFGRDIADTTDAVRDPQTLEILDITPCSFGGVSVITPGTNTSNQVAVLYQDVNCTEVPVAIHADQLTPTWRVYSTGSNVFQTRAGCLIGAEHVNNSYECDIPIGAGICASYQTQTNSPRRARSVASQSIIAYTMSLGAENSVAYSNNSIAIPTNFTISVTTEILPVSMTKTSVDCTMYICGDSTECSNLLLQYGSFCTQLNRALTGIAVEQDKNTQEVFAQVKQIYKTPPIKDFGGFNFSQILPDPSKPSKRSFIEDLLFNKVTLADAGFIKQYGDCLGDIAARDLICAQKFNGLTVLPPLLTDEMIAQYTSALLAGTITSGWTFGAGAALQIPFAMQMAYRFNGIGVTQNVLYENQKLIANQFNSAIGKIQDSLSSTASALGKLQDVVNQNAQALNTLVKQLSSNFGAISSVLNDILSRLDKVEAEVQIDRLITGRLQSLQTYVTQQLIRAAEIRASANLAATKMSECVLGQSKRVDFCGKGYHLMSFPQSAPHGVVFLHVTYVPAQEKNFTTAPAICHDGKAHFPREGVFVSNGTHWFVTQRNFYEPQIITTDNTFLSGNCDVVIGIVNNTVYDPLQPELDSFKEELDKYFKNHTSPDVDLGDISGINASVVNIQKEIDRLNEVAKNLNESLIDLQELGKYEQYIKGGGGSDIIKLLNEQVNKEMQSSNLYMSMSSWCYTHSLDGAGLFLFDHAAEEYEHAKKLIIFLNENNVPVQLTSISAPEHKFEGLTQIFQKAYEHEQHISESINNIVDHAIKSKDHATFNFLQWYVAEQHEEEVLFKDILDKIELIGNENHGLYLADQYVKGIAKSRKS

SEQ ID NO: 4688 - protein, 1379 aa, Artificial Sequence
  SARS-CoV-2/USA/UT-00034/2020__EPI_ISL_417977 spike protein (1-1211) Ferritin construct
MFVFLVLLPLVSSQCVNLTTRTQLPPAYTNSFTRGVYYPDKVFRSSVLHSTQDLFLPFFSNVTWFHAIHVSGTNGTKRFDNPVLPFNDGVYFASTEKSNIIRGWIFGTTLDSKTQSLLIVNNATNVVIKVCEFQFCNDPFLGVYYYKNNKSWMESEFRVYSSANNCTFEYVSQPFLMDLEGKQGNFKNLREFVFKNIDGYFKIYSKHTPINLVRDLPQGFSALEPLVDLPIGINITRFQTLLALHRSYLTPGDSSSGWTAGAAAYYVGYLQPRTFLLKYNENGTITDAVDCALDPLSETKCTLKSFTVEKGIYQTSNFRVQPTESIVRFPNITNLCPFGEVFNATRFASVYAWNRKRISNCVADYSVLYNSASFSTFKCYGVSPTKLNDLCFTNVYADSFVIRGDEVRQIAPGQTGKIADYNYKLPDDFTGCVIAWNSNNLDSKVGGNYNYLYRLFRKSNLKPFERDISTEIYQAGSTPCNGVEGFNCYFPLQSYGFQPTNGVGYQPYRVVVLSFELLHAPATVCGPKKSTNLVKNKCVNFNFNGLTGTGVLTESNKKFLPFQQFGRDIADTTDAVRDPQTLEILDITPCSFGGVSVITPGTNTSNQVAVLYQGVNCTEVPVAIHADQLTPTWRVYSTGSNVFQTRAGCLIGAEHVNNSYECDIPIGAGICASYQTQTNSPRRARSVASQSIIAYTMSLGAENSVAYSNNSIAIPTNFTISVTTEILPVSMTKTSVDCTMYICGDSTECSNLLLQYGSFCTQLNRALTGIAVEQDKNTQEVFAQVKQIYKTPPIKDFGGFNFSQILPDPSKPSKRSFIEDLLFNKVTLADAGFIKQYGDCLGDIAARDLICAQKFNGLTVLPPLLTDEMIAQYTSALLAGTITSGWTFGAGAALQIPFAMQMAYRFNGIGVTQNVLYENQKLIANQFNSAIGKIQDSLSSTASALGKLQDVVNQNAQALNTLVKQLSSNFGAISSVLNDILSRLDKVEAEVQIDRLITGRLQSLQTYVTQQLIRAAEIRASANLAATKMSECVLGQSKRVDFCGKGYHLMSFPQSAPHGVVFLHVTYVPAQEKNFTTAPAICHDGKAHFPREGVFVSNGTHWFVTQRNFYEPQIITTDNTFVSGNCDVVIGIVNNTVYDPLQPELDSFKEELDKYFKNHTSPDVDLGDISGINASVVNIQKEIDRLNEVAKNLNESLIDLQELGKYEQYIKGGGGSDIIKLLNEQVNKEMQSSNLYMSMSSWCYTHSLDGAGLFLFDHAAEEYEHAKKLIIFLNENNVPVQLTSISAPEHKFEGLTQIFQKAYEHEQHISESINNIVDHAIKSKDHATFNFLQWYVAEQHEEEVLFKDILDKIELIGNENHGLYLADQYVKGIAKSRKS

SEQ ID NO: 4689 - protein, 1379 aa, Artificial Sequence
  SARS-CoV-2/USA/UT-00033/2020__EPI_ISL_417976 spike protein (1-1211) Ferritin construct
MFVFLVLLPLVSSQCVNLTTRTQLPPAYTNSFTRGVYYPDKVFRSSVLHSTQDLFLPFFSNVTWFHAIHVSGTNGTKRFDNPVLPFNDGVYFASTEKSNIIRGWIFGTTLDSKTQSLLIVNNATNVVIKVCEFQFCNDPFLGVYYHKNNKSWMESEFRVYSSANNCTFEYVSQPFLMDLEGKQGNFKNLREFVFKNIDGYFKIYSKHTPINLVRDLPQGFSALEPLVDLPIGINITRFQTLLALHRSYLTPGDSSSGLTAGAAAYYVGYLQPRTFLLKYNENGTITDAVDCALDPLSETKCTLKSFTVEKGIYQTSNFRVQPTESIVRFPNITNLCPFGEVFNATRFASVYAWNRKRISNCVADYSVLYNSASFSTFKCYGVSPTKLNDLCFTNVYADSFVIRGDEVRQIAPGQTGKIADYNYKLPDDFTGCVIAWNSNNLDSKVGGNYNYLYRLFRKSNLKPFERDISTEIYQAGSTPCNGVEGFNCYFPLQSYGFQPTNGVGYQPYRVVVLSFELLHAPATVCGPKKSTNLVKNKCVNFNFNGLTGTGVLTESNKKFLPFQQFGRDIADTTDAVRDPQTLEILDITPCSFGGVSVITPGTNTSNQVAVLYQGVNCTEVPVAIHADQLTPTWRVYSTGSNVFQTRAGCLIGAEHVNNSYECDIPIGAGICASYQTQTNSPRRARSVASQSIIAYTMSLGAENSVAYSNNSIAIPTNFTISVTTEILPVSMTKTSVDCTMYICGDSTECSNLLLQYGSFCTQLNRALTGIAVEQDKNTQEVFAQVKQIYKTPPIKDFGGFNFSQILPDPSKPSKRSFIEDLLFNKVTLADAGFIKQYGDCLGDIAARDLICAQKFNGLTVLPPLLTDEMIAQYTSALLAGTITSGWTFGAGAALQIPFAMQMAYRFNGIGVTQNVLYENQKLIANQFNSAIGKIQDSLSSTASALGKLQDVVNQNAQALNTLVKQLSSNFGAISSVLNDILSRLDKVEAEVQIDRLITGRLQSLQTYVTQQLIRAAEIRASANLAATKMSECVLGQSKRVDFCGKGYHLMSFPQSAPHGVVFLHVTYVPAQEKNFTTAPAICHDGKAHFPREGVFVSNGTHWFVTQRNFYEPQIITTDNTFVSGNCDVVIGIVNNTVYDPLQPELDSFKEELDKYFKNHTSPDVDLGDISGINASVVNIQKEIDRLNEVAKNLNESLIDLQELGKYEQYIKGGGGSDIIKLLNEQVNKEMQSSNLYMSMSSWCYTHSLDGAGLFLFDHAAEEYEHAKKLIIFLNENNVPVQLTSISAPEHKFEGLTQIFQKAYEHEQHISESINNIVDHAIKSKDHATFNFLQWYVAEQHEEEVLFKDILDKIELIGNENHGLYLADQYVKGIAKSRKS

SEQ ID NO: 4690 - protein, 1379 aa, Artificial Sequence
  SARS-CoV-2/USA/WI-13/2020__EPI_ISL_417516 spike protein (1-1211) Ferritin construct
MFVFLVLLPLVSSQCVNLTTRTQLPPAYTNSFTRGVYYPDKVFRSSVLHSTQDLFLPFFSNVTWFHAIHVSGTNGTKRFDNPVLPFNDGVYFASTEKSNIIRGWIFGTTLDSKTQSLLIVNNATNVVIKVCEFQFCNDPFLGVYYHKNNKSWMESEFRVYSSANNCTFEYVSQPFLMDLEGKQGNFKNLREFVFKNIDGYFKIYSKHTPINLVRDLPQGFSALEPLVDLPIGINITRFQTLLALHRSYLTPGDSSSGWTAGAAAYYVGYLQPRTFLLKYNENGTITDAVDCALDPLSETKCTLKSFTVEKGIYQTSNFRVLPTESIVRFPNITNLCPFGEVFNATRFASVYAWNRKRISNCVADYSVLYNSASFSTFKCYGVSPTKLNDLCFTNVYADSFVIRGDEVRQIAPGQTGKIADYNYKLPDDFTGCVIAWNSNNLDSKVGGNYNYLYRLFRKSNLKPFERDISTEIYQAGSTPCNGVEGFNCYFPLQSYGFQPTNGVGYQPYRVVVLSFELLHAPATVCGPKKSTNLVKNKCVNFNFNGLTGTGVLTESNKKFLPFQQFGRDIADTTDAVRDPQTLEILDITPCSFGGVSVITPGTNTSNQVAVLYQGVNCTEVPVAIHADQLTPTWRVYSTGSNVFQTRAGCLIGAEHVNNSYECDIPIGAGICASYQTQTNSPRRARSVASQSIIAYTMSLGAENSVAYSNNSIAIPTNFTISVTTEILPVSMTKTSVDCTMYICGDSTECSNLLLQYGSFCTQLNRALTGIAVEQDKNTQEVFAQVKQIYKTPPIKDFGGFNFSQILPDPSKPSKRSFIEDLLFNKVTLADAGFIKQYGDCLGDIAARDLICAQKFNGLTVLPPLLTDEMIAQYTSALLAGTITSGWTFGAGAALQIPFAMQMAYRFNGIGVTQNVLYENQKLIANQFNSAIGKIQDSLSSTASALGKLQDVVNQNAQALNTLVKQLSSNFGAISSVLNDILSRLDKVEAEVQIDRLITGRLQSLQTYVTQQLIRAAEIRASANLAATKMSECVLGQSKRVDFCGKGYHLMSFPQSAPHGVVFLHVTYVPAQEKNFTTAPAICHDGKAHFPREGVFVSNGTHWFVTQRNFYEPQIITTDNTFVSGNCDVVIGIVNNTVYDPLQPELDSFKEELDKYFKNHTSPDVDLGDISGINASVVNIQKEIDRLNEVAKNLNESLIDLQELGKYEQYIKGGGGSDIIKLLNEQVNKEMQSSNLYMSMSSWCYTHSLDGAGLFLFDHAAEEYEHAKKLIIFLNENNVPVQLTSISAPEHKFEGLTQIFQKAYEHEQHISESINNIVDHAIKSKDHATFNFLQWYVAEQHEEEVLFKDILDKIELIGNENHGLYLADQYVKGIAKSRKS

SEQ ID NO: 4691 - protein, 1378 aa, Artificial Sequence
  SARS-CoV-2/India/1-27/2020__EPI_ISL_413522 spike protein (1-1210) Ferritin construct
MFVFLVLLPLVSSQCVNLTTRTQLPPAYTNSFTRGVYYPDKVFRSSVLHSTQDLFLPFFSNVTWFHAIHVSGTNGTKRFDNPVLPFNDGVYFASTEKSNIIRGWIFGTTLDSKTQSLLIVNNATNVVIKVCEFQFCNDPFLGVYHKNNKSWMESEFRVYSSANNCTFEYVSQPFLMDLEGKQGNFKNLREFVFKNIDGYFKIYSKHTPINLVRDLPQGFSALEPLVDLPIGINITRFQTLLALHRSYLTPGDSSSGWTAGAAAYYVGYLQPRTFLLKYNENGTITDAVDCALDPLSETKCTLKSFTVEKGIYQTSNFRVQPTESIVRFPNITNLCPFGEVFNATRFASVYAWNRKRISNCVADYSVLYNSASFSTFKCYGVSPTKLNDLCFTNVYADSFVIRGDEVIQIAPGQTGKIADYNYKLPDDFTGCVIAWNSNNLDSKVGGNYNYLYRLFRKSNLKPFERDISTEIYQAGSTPCNGVEGFNCYFPLQSYGFQPTNGVGYQPYRVVVLSFELLHAPATVCGPKKSTNLVKNKCVNFNFNGLTGTGVLTESNKKFLPFQQFGRDIADTTDAVRDPQTLEILDITPCSFGGVSVITPGTNTSNQVAVLYQDVNCTEVPVAIHADQLTPTWRVYSTGSNVFQTRAGCLIGAEHVNNSYECDIPIGAGICASYQTQTNSPRRARSVASQSIIAYTMSLGAENSVAYSNNSIAIPTNFTISVTTEILPVSMTKTSVDCTMYICGDSTECSNLLLQYGSFCTQLNRALTGIAVEQDKNTQEVFAQVKQIYKTPPIKDFGGFNFSQILPDPSKPSKRSFIEDLLFNKVTLADAGFIKQYGDCLGDIAARDLICAQKFNGLTVLPPLLTDEMIAQYTSALLAGTITSGWTFGAGAALQIPFAMQMAYRFNGIGVTQNVLYENQKLIANQFNSAIGKIQDSLSSTASALGKLQDVVNQNAQALNTLVKQLSSNFGAISSVLNDILSRLDKVEAEVQIDRLITGRLQSLQTYVTQQLIRAAEIRASANLAATKMSECVLGQSKRVDFCGKGYHLMSFPQSAPHGVVFLHVTYVPAQEKNFTTAPAICHDGKAHFPREGVFVSNGTHWFVTQRNFYEPQIITTDNTFVSGNCDVVIGIVNNTVYDPLQPELDSFKEELDKYFKNHTSPDVDLGDISGINASVVNIQKEIDRLNEVAKNLNESLIDLQELGKYEQYIKGGGGSDIIKLLNEQVNKEMQSSNLYMSMSSWCYTHSLDGAGLFLFDHAAEEYEHAKKLIIFLNENNVPVQLTSISAPEHKFEGLTQIFQKAYEHEQHISESINNIVDHAIKSKDHATFNFLQWYVAEQHEEEVLFKDILDKIELIGNENHGLYLADQYVKGIAKSRKS

SEQ ID NO: 4692 - protein, 1373 aa, Artificial Sequence
  SARS-CoV-2/pangolin/Guangxi/P4L/2017__EPI_ISL_410538 spike protein (1-1205) Ferritin construct
MFVFLFVLPLVSSQCVNLTTRTGIPPGYTNSSTRGVYYPDKVFRSSILHLTQDLFLPFFSNVTWFNTINYQGGFKKFDNPVLPFNDGVYFASTEKSNIIRGWIFGTTLDARTQSLLIVNNATNVVIKVCEFQFCTDPFLGVYYHNNNKTWVENEFRVYSSANNCTFEYISQPFLMDLEGKQGNFKNLREFVFKNVDGYFKIYSKHTPIDLVRDLPRGFAALEPLVDLPIGINITRFQTLLALHRSYLTPGNLESGWTTGAAAYYVGYLQQRTFLLSYNQNGTITDAVDCSLDPLSETKCTLKSLTVEKGIYQTSNFRVQPTISIVRFPNITNLCPFGEVFNASKFASVYAWNRKRISNCVADYSVLYNSTSFSTFKCYGVSPTKLNDLCFTNVYADSFVVKGDEVRQIAPGQTGVIADYNYKLPDDFTGCVIAWNSVKQDALTGGNYGYLYRLFRKSKLKPFERDISTEIYQAGSTPCNGQVGLNCYYPLERYGFHPTTGVNYQPFRVVVLSFELLNGPATVCGPKLSTTLVKDKCVNFNFNGLTGTGVLTTSKKQFLPFQQFGRDISDTTDAVRDPQTLEILDITPCSFGGVSVITPGTNTSNQVAVLYQDVNCTEVPMAIHAEQLTPAWRVYSAGANVFQTRAGCLVGAEHVNNSYECDIPVGAGICASYHSMSSLRSVNQRSIIAYTMSLGAENSVAYSNNSIAIPTNFTISVTTEILPVSMTKTSVDCTMYICGDSIECSNLLLQYGSFCTQLNRALTGIAVEQDKNTQEVFAQVKQIYKTPPIKDFGGFNFSQILPDPSKPSKRSFIEDLLFNKVTLADAGFIKQYGDCLGDIAARDLICAQKFNGLTVLPPLLTDEMIAQYTSALLAGTITSGWTFGAGAALQIPFAMQMAYRFNGIGVTQNVLYENQKLIANQFNSAIGKIQDSLSSTASALGKLQDVVNQNAQALNTLVKQLSSNFGAISSVLNDILSRLDKVEAEVQIDRLITGRLQSLQTYVTQQLIRAAEIRASANLAATKMSECVLGQSKRVDFCGKGYHLMSFPQSAPHGVVFLHVTYVPAQEKNFTTAPAICHEGKAHFPREGVFVSNGTHWFITQRNFYEPQIITTDNTFVSGSCDVVIGIVNNTVYDPLQPELDSFKEELDKYFKNHTSPDVDLGDISGINASVVNIQKEIDRLNEVAKNLNESPIDLQELGKYEQYIKGGGGSDIIKLLNEQVNKEMQSSNLYMSMSSWCYTHSLDGAGLFLFDHAAEEYEHAKKLIIFLNENNVPVQLTSISAPEHKFEGLTQIFQKAYEHEQHISESINNIVDHAIKSKDHATFNFLQWYVAEQHEEEVLFKDILDKIELIGNENHGLYLADQYVKGIAKSRKS

SEQ ID NO: 4693 - protein, 1373 aa, Artificial Sequence
  SARS-CoV-2/pangolin/Guangxi/P5L/2017__EPI_ISL_410540 spike protein (1-1205) Ferritin construct
MFVFLFVLPLVSSQCVNLTTRTGIPPGYTNSSTRGVYYPDKVFRSSILHLTQDLFLPFFSNVTWFNTINYQGGFKKFDNPVLPFNDGVYFASTEKSNIIRGWIFGTTLDARTQSLLIVNNATNVVIKVCEFQFCTDPFLGVYYHNNNKTWVENEFRVYSSANNCTFEYISQPFLMDLEGKQGNFKNLREFVFKNVDGYFKIYSKHTPIDLVRDLPRGFAALEPLVDLPIGINITRFQTLLALHRSYLTPGKLESGWTTGAAAYYVGYLQQRTFLLSYNQNGTITDAVDCSLDPLSETKCTLKSLTVEKGIYQTSNFRVQPTISIVRFPNITNLCPFGEVFNASKFASVYAWNRKRISNCVADYSVLYNSTSFSTFKCYGVSPTKLNDLCFTNVYADSFVVKGDEVRQIAPGQTGVIADYNYKLPDDFTGCVIAWNSVKQDALTGGNYGYLYRLFRKSKLKPFERDISTEIYQAGSTPCNGQVGLNCYYPLERYGFHPTTGVNYQPFRVVVLSFELLNGPATVCGPKLSTTLVKDKCVNFNFNGLTGTGVLTTSKKQFLPFQQFGRDISDTTDAVRDPQTLEILDITPCSFGGVSVITPGTNTSNQVAVLYQDVNCTEVPMAIHAEQLTPAWRVYSAGANVFQTRAGCLVGAEHVNNSYECDIPVGAGICASYHSMSSFRSVNQRSIIAYTMSLGAENSVAYSNNSIAIPTNFTISVTTEILPVSMTKTSVDCTMYICGDSIECSNLLLQYGSFCTQLNRALTGIAVEQDKNTQEVFAQVKQIYKTPPIKDFGGFNFSQILPDPSKPSKRSFIEDLLFNKVTLADAGFIKQYGDCLGDIAARDLICAQKFNGLTVLPPLLTDEMIAQYTSALLAGTITSGWTFGAGAALQIPFAMQMAYRFNGIGVTQNVLYENQKLIANQFNSAIGKIQDSLSSTASALGKLQDVVNQNAQALNTLVKQLSSNFGAISSVLNDILSRLDKVEAEVQIDRLITGRLQSLQTYVTQQLIRAAEIRASANLAATKMSECVLGQSKRVDFCGKGYHLMSFPQSAPHGVVFLHVTYVPAQEKNFTTAPAICHEGKAHFPREGVFVSNGTHWFITQRNFYEPQIITTDNTFVSGSCDVVIGIVNNTVYDPLQPELDSFKEELDKYFKNHTSPDVDLGDISGINASVVNIQKEIDRLNEVAKNLNESLIDLQELGKYEQYIKGGGGSDIIKLLNEQVNKEMQSSNLYMSMSSWCYTHSLDGAGLFLFDHAAEEYEHAKKLIIFLNENNVPVQLTSISAPEHKFEGLTQIFQKAYEHEQHISESINNIVDHAIKSKDHATFNFLQWYVAEQHEEEVLFKDILDKIELIGNENHGLYLADQYVKGIAKSRKS

SEQ ID NO: 4694 - protein, 1373 aa, Artificial Sequence
  SARS-CoV-2/pangolin/Guangxi/P5E/2017__EPI_ISL_410541 spike protein (1-1205) Ferritin construct
MFVFLFVLPLVSSQCVNLTTRTGIPPGYTNSSTRGVYYPDKVFRSSILHLTQDLFLPFFSNVTWFNTITYQGGSKKFDNPVLPFNDGVYFASTEKSNIIRGWIFGTTLDARTQSLLIVNNATNVVIKVCEFQFCTDPFLGVYYHNNNKTWVENEFRVYSSANNCTFEYISQPFLMDLEGKQGNFKNLREFVFKNVDGYFKIYSKHTPIDLVRDLPRGFAALEPLVDLPIGINITRFQTLLALHRSYLTPGKLESGWTTGAAAYYVGYLQQRTFLLSYNQNGTITDAVDCSLDPLSETKCTLKSLTVEKGIYQTSNFRVQPTISIVRFPNITNLCPFGEVFNASKFASVYAWNRKRISNCVADYSVLYNSTSFSTFKCYGVSPTKLNDLCFTNVYADSFVVKGDEVRQIAPGQTGVIADYNYKLPDDFTGCVIAWNSVKQDALTGDNYGYLYRLFRKSKLKPFERDISTEIYQAGSTPCNGQVGLNCYYPLERYGFHPTTGVNYQPFRVVVLSFELLNGPATVCGPKLSTTLVKDKCVNFNFNGLTGTGVLTTSKKQFLPFQQFGRDISDTTDAVRDPQTLEILDITPCSFGGVSVITPGTNTSNQVAVLYQDVNCTEVPMAIHAEQLTPAWRVYSAGANVFQTRAGCLVGAEHVNNSYECDIPVGAGICASYHSMSSFRSVNQRSIIAYTMSLGAENSVAYSNNSIAIPTNFTISVTTEILPVSMTKTSVDCTMYICGDSIECSNLLLQYGSFCTQLNRALTGIAVEQDKNTQEVFAQVKQIYKTPPIKDFGGFNFSQILPDPSKPSKRSFIEDLLFNKVTLADAGFIKQYGDCLGDIAARDLICAQKFNGLTVLPPLLTDEMIAQYTSALLAGTITSGWTFGAGAALQIPFAMQMAYRFNGIGVTQNVLYENQKLIANQFNSAIGKIQDSLSSTASALGKLQDVVNQNAQALNTLVKQLSSNFGAISSVLNDILSRLDKVEAEVQIDRLITGRLQSLQTYVTQQLIRAAEIRASANLAATKMSECVLGQSKRVDFCGKGYHLMSFPQSAPHGVVFLHVTYVPAQEKNFTTAPAICHEGKAHFPREGVFVSNGTHWFITQRNFYEPQIITTDNTFVSGSCDVVIGIVNNTVYDPLQPELDSFKEELDKYFKNHTSPDVDLGDISGINASVVNIQKEIDRLNEVAKNLNESLIDLQELGKYEQYIKGGGGSDIIKLLNEQVNKEMQSSNLYMSMSSWCYTHSLDGAGLFLFDHAAEEYEHAKKLIIFLNENNVPVQLTSISAPEHKFEGLTQIFQKAYEHEQHISESINNIVDHAIKSKDHATFNFLQWYVAEQHEEEVLFKDILDKIELIGNENHGLYLADQYVKGIAKSRKS

SEQ ID NO: 4695 - protein, 1371 aa, Artificial Sequence
  SARS-CoV-2/pangolin/Guangxi/P1E/2017__EPI_ISL_410539 spike protein (1-1203) Ferritin construct
MFVFLFVLPLVSSQCVNLTTRTGIQPGYTNSSTRGVYYPDKVFRSSILHLTQDLFLPFFSNVTWFNTINYQGGFKKFDNPVLPFNDGVYFASTEKSNIIRGWIFGTTLDARTQSLLIVNNATNVVIKVCEFQFCTDPFLGVYYHNNNKTWVENEFRVYSSANNCTFEYISQPFLMDLEGKQGNFKNLREFVFKNVDGYFKIYSKHTPIDLVRDLPRGFAALEPLVDLPIGINITRFQTLLALHRSYLTPGKLESGWTTGAAAYYVGYLQQRTFLLSYNQNGTITDAVDCSLDPLSETKCTLKSLTVEKGIYQTSNFRVQPTISIVRFPNITNLCPFGEVFNASKFASVYAWNRKRISNCVADYSVLYNSTSFSTFKCYGVSPTKLNDLCFTNVYADSFVVKGDEVRQIAPGQTGVIADYNYKLPDDFTGCVIAWNSVKQDALTGGNYLYRLFRKSKLKPFERDISTEIYQAGSTPCNGQVGLNCYYPLERYGFHPTTGVNYQPFRVVVLSFELLNGPATVCGPKLSTTLVKDKCVNFNFNGLTGTGVLTTSKKQFLPFQQFGRDISDTTDAVRDPQTLEILDITPCSFGGVSVITPGTNTSNQVAVLYQDVNCTEVPMAIHAEQLTPAWRVYSAGANVFQTRAGCLVGAEHVNNSYECDIPVGAGICASYHSMSSLRSVNQRSIIAYTMSLGAENSVAYSNNSIAIPTNFTISVTTEILPVSMTKTSVDCTMYICGDSIECSNLLLQYGSFCTQLNRALTGIAVEQDKNTQEVFAQVKQIYKTPPIKDFGGFNFSQILPDPSKPSKRSFIEDLLFNKVTLADAGFIKQYGDCLGDIAARDLICAQKFNGLTVLPPLLTDEMIAQYTSALLAGTITSGWTFGAGAALQIPFAMQMAYRFNGIGVTQNVLYENQKLIANQFNSAIGKIQDSLSSTASALGKLQDVVNQNAQALNTLVKQLSSNFGAISSVLNDILSRLDKVEAEVQIDRLITGRLQSLQTYVTQQLIRAAEIRASANLAATKMSECVLGQSKRVDFCGKGYHLMSFPQSAPHGVVFLHVTYVPAQEKNFTTAPAICHEGKAHFPREGVFVSNGTHWFITQRNFYEPQIITTDNTFVSGSCDVVIGIVNNTVYDPLQPELDSFKEELDKYFKNHTSPDVDLGDISGINASVVNIQKEIDRLNEVAKNLNESLIDLQELGKYEQYIKGGGGSDIIKLLNEQVNKEMQSSNLYMSMSSWCYTHSLDGAGLFLFDHAAEEYEHAKKLIIFLNENNVPVQLTSISAPEHKFEGLTQIFQKAYEHEQHISESINNIVDHAIKSKDHATFNFLQWYVAEQHEEEVLFKDILDKIELIGNENHGLYLADQYVKGIAKSRKS

SEQ ID NO: 4696 - protein, 1379 aa, Artificial Sequence
  SARS-CoV-2/Wuhan/WIV05/2019__EPI_ISL_402128 spike protein (1-1211)(K986P_V987P) Ferritin construct
MFVFLVLLPLVSSQCVNLTTRTQLPPAYTNSFTRGVYYPDKVFRSSVLHSTQDLFLPFFSNVTWFHAIHVSGTNGTKRFDNPVLPFNDGVYFASTEKSNIIRGWIFGTTLDSKTQSLLIVNNATNVVIKVCEFQFCNDPFLGVYYHKNNKSWMESEFRVYSSANNCTFEYVSQPFLMDLEGKQGNFKNLREFVFKNIDGYFKIYSKHTPINLVRDLPQGFSALEPLVDLPIGINITRFQTLLALHRSYLTPGDSSSGWTAGAAAYYVGYLQPRTFLLKYNENGTITDAVDCALDPLSETKCTLKSFTVEKGIYQTSNFRVQPTESIVRFPNITNLCPFGEVFNATRFASVYAWNRKRISNCVADYSVLYNSASFSTFKCYGVSPTKLNDLCFTNVYADSFVIRGDEVRQIAPGQTGKIADYNYKLPDDFTGCVIAWNSNNLDSKVGGNYNYLYRLFRKSNLKPFERDISTEIYQAGSTPCNGVEGFNCYFPLQSYGFQPTNGVGYQPYRVVVLSFELLHAPATVCGPKKSTNLVKNKCVNFNFNGLTGTGVLTESNKKFLPFQQFGRDIADTTDAVRDPQTLEILDITPCSFGGVSVITPGTNTSNQVAVLYQDVNCTEVPVAIHADQLTPTWRVYSTGSNVFQTRAGCLIGAEHVNNSYECDIPIGAGICASYQTQTNSPRRARSVASQSIIAYTMSLGAENSVAYSNNSIAIPTNFTISVTTEILPVSMTKTSVDCTMYICGDSTECSNLLLQYGSFCTQLNRALTGIAVEQDKNTQEVFAQVKQIYKTPPIKDFGGFNFSQILPDPSKPSKRSFIEDLLFNKVTLADAGFIKQYGDCLGDIAARDLICAQKFNGLTVLPPLLTDEMIAQYTSALLAGTITSGWTFGAGAALQIPFAMQMAYRFNGIGVTQNVLYENQKLIANQFNSAIGKIQDSLSSTASALGKLQDVVNQNAQALNTLVKQLSSNFGAISSVLNDILSRLDPPEAEVQIDRLITGRLQSLQTYVTQQLIRAAEIRASANLAATKMSECVLGQSKRVDFCGKGYHLMSFPQSAPHGVVFLHVTYVPAQEKNFTTAPAICHDGKAHFPREGVFVSNGTHWFVTQRNFYEPQIITTDNTFVSGNCDVVIGIVNNTVYDPLQPELDSFKEELDKYFKNHTSPDVDLGDISGINASVVNIQKEIDRLNEVAKNLNESLIDLQELGKYEQYIKGGGGSDIIKLLNEQVNKEMQSSNLYMSMSSWCYTHSLDGAGLFLFDHAAEEYEHAKKLIIFLNENNVPVQLTSISAPEHKFEGLTQIFQKAYEHEQHISESINNIVDHAIKSKDHATFNFLQWYVAEQHEEEVLFKDILDKIELIGNENHGLYLADQYVKGIAKSRKS

SEQ ID NO: 4697 - protein, 1375 aa, Artificial Sequence
  SARS-CoV-2/bat/Yunnan/RaTG13/2013__EPI_ISL_402131 spike protein (1-1207)(K982P_V983P) Ferritin construct
MFVFLVLLPLVSSQCVNLTTRTQLPPAYTNSSTRGVYYPDKVFRSSVLHLTQDLFLPFFSNVTWFHAIHVSGTNGIKRFDNPVLPFNDGVYFASTEKSNIIRGWIFGTTLDSKTQSLLIVNNATNVVIKVCEFQFCNDPFLGVYYHKNNKSWMESEFRVYSSANNCTFEYVSQPFLMDLEGKQGNFKNLREFVFKNIDGYFKIYSKHTPINLVRDLPPGFSALEPLVDLPIGINITRFQTLLALHRSYLTPGDSSSGWTAGAAAYYVGYLQPRTFLLKYNENGTITDAVDCALDPLSETKCTLKSFTVEKGIYQTSNFRVQPTDSIVRFPNITNLCPFGEVFNATTFASVYAWNRKRISNCVADYSVLYNSTSFSTFKCYGVSPTKLNDLCFTNVYADSFVITGDEVRQIAPGQTGKIADYNYKLPDDFTGCVIAWNSKHIDAKEGGNFNYLYRLFRKANLKPFERDISTEIYQAGSKPCNGQTGLNCYYPLYRYGFYPTDGVGHQPYRVVVLSFELLNAPATVCGPKKSTNLVKNKCVNFNFNGLTGTGVLTESNKKFLPFQQFGRDIADTTDAVRDPQTLEILDITPCSFGGVSVITPGTNASNQVAVLYQDVNCTEVPVAIHADQLTPTWRVYSTGSNVFQTRAGCLIGAEHVNNSYECDIPIGAGICASYQTQTNSRSVASQSIIAYTMSLGAENSVAYSNNSIAIPTNFTISVTTEILPVSMTKTSVDCTMYICGDSTECSNLLLQYGSFCTQLNRALTGIAVEQDKNTQEVFAQVKQIYKTPPIKDFGGFNFSQILPDPSKPSKRSFIEDLLFNKVTLADAGFIKQYGDCLGDIAARDLICAQKFNGLTVLPPLLTDEMIAQYTSALLAGTITSGWTFGAGAALQIPFAMQMAYRFNGIGVTQNVLYENQKLIANQFNSAIGKIQDSLSSTASALGKLQDVVNQNAQALNTLVKQLSSNFGAISSVLNDILSRLDPPEAEVQIDRLITGRLQSLQTYVTQQLIRAAEIRASANLAATKMSECVLGQSKRVDFCGKGYHLMSFPQSAPHGVVFLHVTYVPAQEKNFTTAPAICHDGKAHFPREGVFVSNGTHWFVTQRNFYEPQIITTDNTFVSGSCDVVIGIVNNTVYDPLQPELDSFKEELDKYFKNHTSPDVDLGDISGINASVVNIQKEIDRLNEVAKNLNESLIDLQELGKYEQYIKGGGGSDIIKLLNEQVNKEMQSSNLYMSMSSWCYTHSLDGAGLFLFDHAAEEYEHAKKLIIFLNENNVPVQLTSISAPEHKFEGLTQIFQKAYEHEQHISESINNIVDHAIKSKDHATFNFLQWYVAEQHEEEVLFKDILDKIELIGNENHGLYLADQYVKGIAKSRKS

SEQ ID NO: 4698 - protein, 1379 aa, Artificial Sequence
  SARS-CoV-2/Wuhan/HBCDC-HB-01/2019__EPI_ISL_402132 spike protein (1-1211)(K986P_V987P) Ferritin construct
MFVFLVLLPLVSSQCVNLTTRTQLPPAYTNSITRGVYYPDKVFRSSVLHSTQDLFLPFFSNVTWFHAIHVSGTNGTKRFDNPVLPFNDGVYFASTEKSNIIRGWIFGTTLDSKTQSLLIVNNATNVVIKVCEFQFCNDPFLGVYYHKNNKSWMESEFRVYSSANNCTFEYVSQPFLMDLEGKQGNFKNLREFVFKNIDGYFKIYSKHTPINLVRDLPQGFSALEPLVDLPIGINITRFQTLLALHRSYLTPGDSSSGWTAGAAAYYVGYLQPRTFLLKYNENGTITDAVDCALDPLSETKCTLKSFTVEKGIYQTSNFRVQPTESIVRFPNITNLCPFGEVFNATRFASVYAWNRKRISNCVADYSVLYNSASFSTFKCYGVSPTKLNDLCFTNVYADSFVIRGDEVRQIAPGQTGKIADYNYKLPDDFTGCVIAWNSNNLDSKVGGNYNYLYRLFRKSNLKPFERDISTEIYQAGSTPCNGVEGFNCYFPLQSYGFQPTNGVGYQPYRVVVLSFELLHAPATVCGPKKSTNLVKNKCVNFNFNGLTGTGVLTESNKKFLPFQQFGRDIADTTDAVRDPQTLEILDITPCSFGGVSVITPGTNTSNQVAVLYQDVNCTEVPVAIHADQLTPTWRVYSTGSNVFQTRAGCLIGAEHVNNSYECDIPIGAGICASYQTQTNSPRRARSVASQSIIAYTMSLGAENSVAYSNNSIAIPTNFTISVTTEILPVSMTKTSVDCTMYICGDSTECSNLLLQYGSFCTQLNRALTGIAVEQDKNTQEVFAQVKQIYKTPPIKDFGGFNFSQILPDPSKPSKRSFIEDLLFNKVTLADAGFIKQYGDCLGDIAARDLICAQKFNGLTVLPPLLTDEMIAQYTSALLAGTITSGWTFGAGAALQIPFAMQMAYRFNGIGVTQNVLYENQKLIANQFNSAIGKIQDSLSSTASALGKLQDVVNQNAQALNTLVKQLSSNFGAISSVLNDILSRLDPPEAEVQIDRLITGRLQSLQTYVTQQLIRAAEIRASANLAATKMSECVLGQSKRVDFCGKGYHLMSFPQSAPHGVVFLHVTYVPAQEKNFTTAPAICHDGKAHFPREGVFVSNGTHWFVTQRNFYEPQIITTDNTFVSGNCDVVIGIVNNTVYDPLQPELDSFKEELDKYFKNHTSPDVDLGDISGINASVVNIQKEIDRLNEVAKNLNESLIDLQELGKYEQYIKGGGGSDIIKLLNEQVNKEMQSSNLYMSMSSWCYTHSLDGAGLFLFDHAAEEYEHAKKLIIFLNENNVPVQLTSISAPEHKFEGLTQIFQKAYEHEQHISESINNIVDHAIKSKDHATFNFLQWYVAEQHEEEVLFKDILDKIELIGNENHGLYLADQYVKGIAKSRKS

SEQ ID NO: 4699 - protein, 1379 aa, Artificial Sequence
  SARS-CoV-2/Guangdong/20SF028/2020__EPI_ISL_403936 spike protein (1-1211)(K986P_V987P) Ferritin construct
MFVFLVLLPLVSSQCVNLTTRTQLPPAYTNSFTRGVYYPDKVFRSSVLYSTQDLFLPFFSNVTWFHAIHVSGTNGTKRFDNPVLPFNDGVYFASTEKSNIIRGWIFGTTLDSKTQSLLIVNNATNVVIKVCEFQFCNDPFLGVYYHKNNKSWMESEFRVYSSANNCTFEYVSQPFLMDLEGKQGNFKNLREFVFKNIDGYFKIYSKHTPINLVRDLPQGFSALEPLVDLPIGINITRFQTLLALHRSYLTPGDSSSGWTAGAAAYYVGYLQPRTFLLKYNENGTITDAVDCALDPLSETKCTLKSFTVEKGIYQTSNFRVQPTESIVRFPNITNLCPFGEVFNATRFASVYAWNRKRISNCVADYSVLYNSASFSTFKCYGVSPTKLNDLCFTNVYADSFVIRGDEVRQIAPGQTGKIADYNYKLPDDFTGCVIAWNSNNLDSKVGGNYNYLYRLFRKSNLKPFERDISTEIYQAGSTPCNGVEGFNCYFPLQSYGFQPTNGVGYQPYRVVVLSFELLHAPATVCGPKKSTNLVKNKCVNFNFNGLTGTGVLTESNKKFLPFQQFGRDIADTTDAVRDPQTLEILDITPCSFGGVSVITPGTNTSNQVAVLYQDVNCTEVPVAIHADQLTPTWRVYSTGSNVFQTRAGCLIGAEHVNNSYECDIPIGAGICASYQTQTNSPRRARSVASQSIIAYTMSLGAENSVAYSNNSIAIPTNFTISVTTEILPVSMTKTSVDCTMYICGDSTECSNLLLQYGSFCTQLNRALTGIAVEQDKNTQEVFAQVKQIYKTPPIKDFGGFNFSQILPDPSKPSKRSFIEDLLFNKVTLADAGFIKQYGDCLGDIAARDLICAQKFNGLTVLPPLLTDEMIAQYTSALLAGTITSGWTFGAGAALQIPFAMQMAYRFNGIGVTQNVLYENQKLIANQFNSAIGKIQDSLSSTASALGKLQDVVNQNAQALNTLVKQLSSNFGAISSVLNDILSRLDPPEAEVQIDRLITGRLQSLQTYVTQQLIRAAEIRASANLAATKMSECVLGQSKRVDFCGKGYHLMSFPQSAPHGVVFLHVTYVPAQEKNFTTAPAICHDGKAHFPREGVFVSNGTHWFVTQRNFYEPQIITTDNTFVSGNCDVVIGIVNNTVYDPLQPELDSFKEELDKYFKNHTSPDVDLGDISGINASVVNIQKEIDRLNEVAKNLNESLIDLQELGKYEQYIKGGGGSDIIKLLNEQVNKEMQSSNLYMSMSSWCYTHSLDGAGLFLFDHAAEEYEHAKKLIIFLNENNVPVQLTSISAPEHKFEGLTQIFQKAYEHEQHISESINNIVDHAIKSKDHATFNFLQWYVAEQHEEEVLFKDILDKIELIGNENHGLYLADQYVKGIAKSRKS

SEQ ID NO: 4700 - protein, 1379 aa, Artificial Sequence
  SARS-CoV-2/Shenzhen/SZTH-001/2020__EPI_ISL_406592 spike protein (1-1211)(K986P_V987P) Ferritin construct
MFVFLVLLPLVSSQCVNLTTRTQLPPAYTNSFTRGVYYPDKVFRSSVLHSTQDLFLPFFSNVTWFHAIHVSGTNGTKRFDNPVLPFNDGVYFASTEKSNIIRGWIFGTTLDSKTQSLLIVNNATNVVIKVCEFQFCNDPFLGVYYHKNNKSWMESEFRVYSSANNCTFEYVSQPFLMDLEGKQGNFKNLREFVFKNIDGYFKIYSKHTPINLVRDLPQGFSALEPLVDLPIGINITRFQTLLALHRSYLTPGDSSSGWTAGAAAYYVGYLQPRTFLLKYNENGTITDAVDCALDPLSETKCTLKSFTVEKGIYQTSNFRVQPTESIVRFPNITNLCPFGEVFNATRFASVYAWNRKRISNCVADYSVLYNSASFSTFKCYGVSPTKLNDLCFTNVYADSFVIRGDEVRQIAPGQTGKIADYNYKLPDDFTGCVIAWNSNNLDSKVGGNYNYLYRLFRKSNLKPFERDISTEIYQAGSTPCNGVEGFNCYFPLQSYGFQPTNGVGYQPYRVVVLSFELLHAPATVCGPKKSTNLVKNKCVNFNFNGLTGTGVLTESNKKFLPFQQFGRDIADTTDAVRDPQTLEILDITPCSFGGVSVITPGTNTSNQVAVLYQDVNCTEVPVAIHADQLTPTWRVYSTGSNVFQTRAGCLIGAEHVNNSYECDIPIGAGICASYQTQTNSPRRARSVASQSIIAYTMSLGAENSVAYSNNSIAIPTNFTISVTTEILPVSMTKTSVDCTMYICGDSTECSNLLLQYGSFCTQLNRALTGIAVEQDKNTQEVFAQVKQIYKTPPIKDFGGFNFSQILPDPSKPSKRSFIEDLLFNKVTLADAGFIKQYGDCLGDIAARDLICAQKFNGLTVLPPLLTDEMIAQYTSALLAGTITSGWTFGAGAALQIPFAMQMAYRFNGIGVTQNVLYENQKLIANQFNSAIGKIQDSLSSTASALGKLQDVVNQNAQALNTLVKQLSSNFGAISSVLNDILSRLDPPEAEVQIDRLITGRLQSLQTYVTQQLIRAAEIRASANLAATKMSECVLGQSKRVDFCGKGYHLMSFPQSAPHGVVFLHVTYVPAQEKNFTTAPAICHDGKAHFPREGVFVSNGTHWFVTQRNFYEPQIITTDNTFVSGNCDVLIGIVNNTVYDPLQPELDSFKEELDKYFKNHTSPDVDLGDISGINASVVNIQKEIDRLNEVAKNLNESLIDLQELGKYEQYIKGGGGSDIIKLLNEQVNKEMQSSNLYMSMSSWCYTHSLDGAGLFLFDHAAEEYEHAKKLIIFLNENNVPVQLTSISAPEHKFEGLTQIFQKAYEHEQHISESINNIVDHAIKSKDHATFNFLQWYVAEQHEEEVLFKDILDKIELIGNENHGLYLADQYVKGIAKSRKS

SEQ ID NO: 4701 - protein, 1379 aa, Artificial Sequence
  SARS-CoV-2/Shenzhen/SZTH-004/2020__EPI_ISL_406595 spike protein (1-1211)(K986P_V987P) Ferritin construct
MFVFLVLLPLVSSQCVNLTTRTQLPPAYTNSFTRGVYYPDKVFRSSVLHSTQDLFLPFFSNVTWFHAIHVSGTNGTKRFDNPVLPFNDGVYFASTEKSNIIRGWIFGTTLDSKTQSLLIVNNATNVVIKVCEFQFCNDPFLGVYYHKNNKSWMESEFRVYSSANNCTFEYVSQPFLMDLEGKQGNFKNLREFVFKNIDGYFKIYSKHTPINLVRDLPQGFSALEPLVDLPIGINITRFQTLLALHRSYLTPGDSSSGWTAGAAAYYVGYLQPRTFLLKYNENGTITDAVDCALDPLSETKCTLKSFTVEKGIYQTSNFRVQPTESIVRFPNITNLCPFGEVFNATRFASVYAWDRKRISNCVAYYSVLYNSASFSTFKCYGVSPTKLNDLCFTNVYADSFVIRGDEVRQIAPGQTGKIADYNYKLPDDFTGCVIAWNSNNLDSKVGGNYNYLYRLFRKSNLKPFERDISTEIYQAGSTPCNGVEGFNCYFPLQSYGFQPTNGVGYQPYRVVVLSFELLHAPATVCGPKKSTNLVKNKCVNFNFNGLTGTGVLTESNKKFLPFQQFGRDIADTTDAVRDPQTLEILDITPCSFGGVSVITPGTNTSNQVAVLYQDVNCTEVPVAIHADQLTPTWRVYSTGSNVFQTRAGCLIGAEHVNNSYECDIPIGAGICASYQTQTNSPRRARSVASQSIIAYTMSLGAENSVAYSNNSIAIPTNFTISVTTEILPVSMTKTSVDCTMYICGDSTECSNLLLQYGSFCTQLNRALTGIAVEQDKNTQEVFAQVKQIYKTPPIKDFGGFNFSQILPDPSKPSKRSFIEDLLFNKVTLADAGFIKQYGDCLGDIAARDLICAQKFNGLTVLPPLLTDEMIAQYTSALLAGTITSGWTFGAGAALQIPFAMQMAYRFNGIGVTQNVLYENQKLIANQFNSAIGKIQDSLSSTASALGKLQDVVNQNAQALNTLVKQLSSNFGAISSVLNDILSRLDPPEAEVQIDRLITGRLQSLQTYVTQQLIRAAEIRASANLAATKMSECVLGQSKRVDFCGKGYHLMSFPQSAPHGVVFLHVTYVPAQEKNFTTAPAICHDGKAHFPREGVFVSNGTHWFVTQRNFYEPQIITTDNTFVSGNCDVVIGIVNNTVYDPLQPELDSFKEELDKYFKNHTSPDVDLGDISGINASVVNIQKEIDRLNEVAKNLNESLIDLQELGKYEQYIKGGGGSDIIKLLNEQVNKEMQSSNLYMSMSSWCYTHSLDGAGLFLFDHAAEEYEHAKKLIIFLNENNVPVQLTSISAPEHKFEGLTQIFQKAYEHEQHISESINNIVDHAIKSKDHATFNFLQWYVAEQHEEEVLFKDILDKIELIGNENHGLYLADQYVKGIAKSRKS

SEQ ID NO: 4702 - protein, 1379 aa, Artificial Sequence
  SARS-CoV-2/France/IDF0372/2020__EPI_ISL_406596 spike protein (1-1211)(K986P_V987P) Ferritin construct
MFVFLVLLPLVSSQCVNLTTRTQLPPAYTNSFTRGVYYPDKVFRSSVLHSTQDLFLPFFSNVTWFHAIHVSGTNGTKRFDNPVLPFNDGVYFASTEKSNIIRGWIFGTTLDSKTQSLLIVNNATNVVIKVCEFQFCNDPFLGVYYHKNNKSWMESEFRVYSSANNCTFEYVSQPFLMDLEGKQGNFKNLREFVFKNIDGYFKIYSKHTPINLVRDLPQGFSALEPLVDLPIGINITRFQTLLALHRSYLTPGDSSSGWTAGAAAYYVGYLQPRTFLLKYNENGTITDAVDCALDPLSETKCTLKSFTVEKGIYQTSNFRVQPTESIVRFPNITNLCPFGEVFNATRFASVYAWNRKRISNCVADYSFLYNSASFSTFKCYGVSPTKLNDLCFTNVYADSFVIRGDEVRQIAPGQTGKIADYNYKLPDDFTGCVIAWNSNNLDSKVGGNYNYLYRLFRKSNLKPFERDISTEIYQAGSTPCNGVEGFNCYFPLQSYGFQPTNGVGYQPYRVVVLSFELLHAPATVCGPKKSTNLVKNKCVNFNFNGLTGTGVLTESNKKFLPFQQFGRDIADTTDAVRDPQTLEILDITPCSFGGVSVITPGTNTSNQVAVLYQDVNCTEVPVAIHADQLTPTWRVYSTGSNVFQTRAGCLIGAEHVNNSYECDIPIGAGICASYQTQTNSPRRARSVASQSIIAYTMSLGAENSVAYSNNSIAIPTNFTISVTTEILPVSMTKTSVDCTMYICGDSTECSNLLLQYGSFCTQLNRALTGIAVEQDKNTQEVFAQVKQIYKTPPIKDFGGFNFSQILPDPSKPSKRSFIEDLLFNKVTLADAGFIKQYGDCLGDIAARDLICAQKFNGLTVLPPLLTDEMIAQYTSALLAGTITSGWTFGAGAALQIPFAMQMAYRFNGIGVTQNVLYENQKLIANQFNSAIGKIQDSLSSTASALGKLQDVVNQNAQALNTLVKQLSSNFGAISSVLNDILSRLDPPEAEVQIDRLITGRLQSLQTYVTQQLIRAAEIRASANLAATKMSECVLGQSKRVDFCGKGYHLMSFPQSAPHGVVFLHVTYVPAQEKNFTTAPAICHDGKAHFPREGVFVSNGTHWFVTQRNFYEPQIITTDNTFVSGNCDVVIGIVNNTVYDPLQPELDSFKEELDKYFKNHTSPDVDLGDISGINASVVNIQKEIDRLNEVAKNLNESLIDLQELGKYEQYIKGGGGSDIIKLLNEQVNKEMQSSNLYMSMSSWCYTHSLDGAGLFLFDHAAEEYEHAKKLIIFLNENNVPVQLTSISAPEHKFEGLTQIFQKAYEHEQHISESINNIVDHAIKSKDHATFNFLQWYVAEQHEEEVLFKDILDKIELIGNENHGLYLADQYVKGIAKSRKS

SEQ ID NO: 4703 - protein, 1379 aa, Artificial Sequence
  SARS-CoV-2/Australia/VIC01/2020__EPI_ISL_406844 spike protein (1-1211)(K986P_V987P) Ferritin construct
MFVFLVLLPLVSSQCVNLTTRTQLPPAYTNSFTRGVYYPDKVFRSSVLHSTQDLFLPFFSNVTWFHAIHVSGTNGTKRFDNPVLPFNDGVYFASTEKSNIIRGWIFGTTLDSKTQSLLIVNNATNVVIKVCEFQFCNDPFLGVYYHKNNKSWMESEFRVYSSANNCTFEYVSQPFLMDLEGKQGNFKNLREFVFKNIDGYFKIYSKHTPINLVRDLPQGFSALEPLVDLPIGINITRFQTLLALHRRYLTPGDSSSGWTAGAAAYYVGYLQPRTFLLKYNENGTITDAVDCALDPLSETKCTLKSFTVEKGIYQTSNFRVQPTESIVRFPNITNLCPFGEVFNATRFASVYAWNRKRISNCVADYSVLYNSASFSTFKCYGVSPTKLNDLCFTNVYADSFVIRGDEVRQIAPGQTGKIADYNYKLPDDFTGCVIAWNSNNLDSKVGGNYNYLYRLFRKSNLKPFERDISTEIYQAGSTPCNGVEGFNCYFPLQSYGFQPTNGVGYQPYRVVVLSFELLHAPATVCGPKKSTNLVKNKCVNFNFNGLTGTGVLTESNKKFLPFQQFGRDIADTTDAVRDPQTLEILDITPCSFGGVSVITPGTNTSNQVAVLYQDVNCTEVPVAIHADQLTPTWRVYSTGSNVFQTRAGCLIGAEHVNNSYECDIPIGAGICASYQTQTNSPRRARSVASQSIIAYTMSLGAENSVAYSNNSIAIPTNFTISVTTEILPVSMTKTSVDCTMYICGDSTECSNLLLQYGSFCTQLNRALTGIAVEQDKNTQEVFAQVKQIYKTPPIKDFGGFNFSQILPDPSKPSKRSFIEDLLFNKVTLADAGFIKQYGDCLGDIAARDLICAQKFNGLTVLPPLLTDEMIAQYTSALLAGTITSGWTFGAGAALQIPFAMQMAYRFNGIGVTQNVLYENQKLIANQFNSAIGKIQDSLSSTASALGKLQDVVNQNAQALNTLVKQLSSNFGAISSVLNDILSRLDPPEAEVQIDRLITGRLQSLQTYVTQQLIRAAEIRASANLAATKMSECVLGQSKRVDFCGKGYHLMSFPQSAPHGVVFLHVTYVPAQEKNFTTAPAICHDGKAHFPREGVFVSNGTHWFVTQRNFYEPQIITTDNTFVSGNCDVVIGIVNNTVYDPLQPELDSFKEELDKYFKNHTSPDVDLGDISGINASVVNIQKEIDRLNEVAKNLNESLIDLQELGKYEQYIKGGGGSDIIKLLNEQVNKEMQSSNLYMSMSSWCYTHSLDGAGLFLFDHAAEEYEHAKKLIIFLNENNVPVQLTSISAPEHKFEGLTQIFQKAYEHEQHISESINNIVDHAIKSKDHATFNFLQWYVAEQHEEEVLFKDILDKIELIGNENHGLYLADQYVKGIAKSRKS

SEQ ID NO: 4704 - protein, 1379 aa, Artificial Sequence
  SARS-CoV-2/Germany/BavPat1/2020__EPI_ISL_406862 spike protein (1-1211)(K986P_V987P) Ferritin construct
MFVFLVLLPLVSSQCVNLTTRTQLPPAYTNSFTRGVYYPDKVFRSSVLHSTQDLFLPFFSNVTWFHAIHVSGTNGTKRFDNPVLPFNDGVYFASTEKSNIIRGWIFGTTLDSKTQSLLIVNNATNVVIKVCEFQFCNDPFLGVYYHKNNKSWMESEFRVYSSANNCTFEYVSQPFLMDLEGKQGNFKNLREFVFKNIDGYFKIYSKHTPINLVRDLPQGFSALEPLVDLPIGINITRFQTLLALHRSYLTPGDSSSGWTAGAAAYYVGYLQPRTFLLKYNENGTITDAVDCALDPLSETKCTLKSFTVEKGIYQTSNFRVQPTESIVRFPNITNLCPFGEVFNATRFASVYAWNRKRISNCVADYSVLYNSASFSTFKCYGVSPTKLNDLCFTNVYADSFVIRGDEVRQIAPGQTGKIADYNYKLPDDFTGCVIAWNSNNLDSKVGGNYNYLYRLFRKSNLKPFERDISTEIYQAGSTPCNGVEGFNCYFPLQSYGFQPTNGVGYQPYRVVVLSFELLHAPATVCGPKKSTNLVKNKCVNFNFNGLTGTGVLTESNKKFLPFQQFGRDIADTTDAVRDPQTLEILDITPCSFGGVSVITPGTNTSNQVAVLYQGVNCTEVPVAIHADQLTPTWRVYSTGSNVFQTRAGCLIGAEHVNNSYECDIPIGAGICASYQTQTNSPRRARSVASQSIIAYTMSLGAENSVAYSNNSIAIPTNFTISVTTEILPVSMTKTSVDCTMYICGDSTECSNLLLQYGSFCTQLNRALTGIAVEQDKNTQEVFAQVKQIYKTPPIKDFGGFNFSQILPDPSKPSKRSFIEDLLFNKVTLADAGFIKQYGDCLGDIAARDLICAQKFNGLTVLPPLLTDEMIAQYTSALLAGTITSGWTFGAGAALQIPFAMQMAYRFNGIGVTQNVLYENQKLIANQFNSAIGKIQDSLSSTASALGKLQDVVNQNAQALNTLVKQLSSNFGAISSVLNDILSRLDPPEAEVQIDRLITGRLQSLQTYVTQQLIRAAEIRASANLAATKMSECVLGQSKRVDFCGKGYHLMSFPQSAPHGVVFLHVTYVPAQEKNFTTAPAICHDGKAHFPREGVFVSNGTHWFVTQRNFYEPQIITTDNTFVSGNCDVVIGIVNNTVYDPLQPELDSFKEELDKYFKNHTSPDVDLGDISGINASVVNIQKEIDRLNEVAKNLNESLIDLQELGKYEQYIKGGGGSDIIKLLNEQVNKEMQSSNLYMSMSSWCYTHSLDGAGLFLFDHAAEEYEHAKKLIIFLNENNVPVQLTSISAPEHKFEGLTQIFQKAYEHEQHISESINNIVDHAIKSKDHATFNFLQWYVAEQHEEEVLFKDILDKIELIGNENHGLYLADQYVKGIAKSRKS

SEQ ID NO: 4705 - protein, 1379 aa, Artificial Sequence
  SARS-CoV-2/Wuhan/HBCDC-HB-02/2020__EPI_ISL_412978 spike protein (1-1211)(K986P_V987P) Ferritin construct
MFVFLVLLPLVSSQCVNLTTRTQLPPAYTNSFTRGVYYPDKVFRSSVLHSTQDLFLPFFSNVTWFHAIHVSGTNGTKRFDNPVLPFNDGVYFASTEKSNIIRGWIFGTTLDSKTQSLLIVNNATNVVIKVCEFQFCNDPFLGVYYHKNNKSWMESEFRVYSSANNCTFEYVSQPFLMDLEGKQGNFKNLREFVFKNIDGYFKIYSKHTPINLVRDLPQGFSALEPLVDLPIGINITRFQTLLALHRSYLTPGDSSSGWTAGAAAYYVGYLQPRTFLLKYNENGTITDAVDCALDPLSETKCTLKSFTVEKGIYQTSNFRVQPTESIVRFPNITNLCPFGEVFNATRFASVYAWNRKRISNCVADYSVLYNSASFSTFKCYGVSPTKLNDLCFTNVYADSFVIRGDEVRQIAPGQTGKIADYNYKLPDDFTGCVIAWNSNNLDSKVGGNYNYLYRLFRKSNLKPFERDISTEIYQAGSTPCNGVEGFNCYFPLQSYGFQPTNGVGYQPYRVVVLSFELLHAPATVCGPKKSTNLVKNKCVNFNFNGLTGTGVLTESNKKFLPFQQFGRDIADTTDAVRDPQTLEILDITPCSFGGVSVITPGTNTSNQVAVLYQDVNCTEVPVAIHADQLTPTWRVYSTGSNVFQTRAGCLIGAEHVNNSYECDIPIGAGICASYQTQTNSPRRARSVASQSIIAYTMSLGAENSVAYSNNSIAIPTNFTISVTTEILPVSMTKTSVDCTMYICGDSTECSNFLLQYGSFCTQLNRALTGIAVEQDKNTQEVFAQVKQIYKTPPIKDFGGFNFSQILPDPSKPSKRSFIEDLLFNKVTLADAGFIKQYGDCLGDIAARDLICAQKFNGLTVLPPLLTDEMIAQYTSALLAGTITSGWTFGAGAALQIPFAMQMAYRFNGIGVTQNVLYENQKLIANQFNSAIGKIQDSLSSTASALGKLQDVVNQNAQALNTLVKQLSSNFGAISSVLNDILSRLDPPEAEVQIDRLITGRLQSLQTYVTQQLIRAAEIRASANLAATKMSECVLGQSKRVDFCGKGYHLMSFPQSAPHGVVFLHVTYVPAQEKNFTTAPAICHDGKAHFPREGVFVSNGTHWFVTQRNFYEPQIITTDNTFVSGNCDVVIGIVNNTVYDPLQPELDSFKEELDKYFKNHTSPDVDLGDISGINASVVNIQKEIDRLNEVAKNLNESLIDLQELGKYEQYIKGGGGSDIIKLLNEQVNKEMQSSNLYMSMSSWCYTHSLDGAGLFLFDHAAEEYEHAKKLIIFLNENNVPVQLTSISAPEHKFEGLTQIFQKAYEHEQHISESINNIVDHAIKSKDHATFNFLQWYVAEQHEEEVLFKDILDKIELIGNENHGLYLADQYVKGIAKSRKS

SEQ ID NO: 4706 - protein, 1379 aa, Artificial Sequence
  SARS-CoV-2/Australia/QLD02/2020__EPI_ISL_407896 spike protein (1-1211)(K986P_V987P) Ferritin construct
MFVFLVLLPLVSSQCVNLTTRTQLPPAYTNSFTRGVYYPDKVFRSSVLHSTQDLFLPFFSNVTWFHAIHVSGTNGTKRFDNPVLPFNDGVYFASTEKSNIIRGWIFGTTLDSKTQSLLIVNNATNVVIKVCEFQFCNDPFLGVYYHKNNKSWMESEFRVYSSANNCTFEYVSQPFLMDLEGKQGNFKNLREFVFKNIDGYFKIYSKHTPINLVRDLPQGFSALEPLVDLPIGINITRFQTLLALHRSYLTPGDSSSGWTAGAAAYYVGYLQPRTFLLKYNENGTITDAVDCALDPLSETKCTLKSFTVEKGIYQTSNFRVQPTESIVRFPNITNLCPFGEVFNATRFASVYAWNRKRISNCVADYSVLYNSASFSTFKCYGVSPTKLNDLCFTNVYADSFVIRGDEVRQIAPGQTGKIADYNYKLPDDFTGCVIAWNSNNLDSKVGGNYNYLYRLFRKSNLKPFERDISTEIYQAGSTPCNGVEGFNCYFPLQSYGFQPTNGVGYQPYRVVVLSFELLHAPATVCGPKKSTNLVKNKCVNFNFNGLTGTGVLTESNKKFLPFQQFGRDIADTTDAVRDPQTLEILDITPCSFGGVSVITPGTNTSNQVAVLYQDVNCTEVPVAIHADQLTPTWRVYSTGSNVFQTRAGCLIGAEHVNNSYECDIPIGAGICASYQTQTNSPRRARSVASQSIIAYTMSLGAENSVAYSNNSIAIPTNFTISVTTEILPVSMTKTSVDCTMYICGDSTECSNLLLQYGSFCTQLNRALTGIAVEQDKNTQEVFAQVKQIYKTPPIKDFGGFNFSQILPDPSKPSKRSFIEDLLFNKVTLADAGFIKQYGDCLGDIAARDLICAQKFNGLTVLPPLLTDEMIAQYTSALLAGTITSGWTFGAGAALQIPFAMQMAYRFNGIGVTQNVLYENQKLIANQFNSAIGKIQDSLSSTASALGKLQDVVNQNAQALNTLVKQLSSNFGAISSVLNDILSRLDPPEAEVQIDRLITGRLQSLQTYVTQQLIRAAEIRASANLAATKMSECVLGQSKRVDFCGKGYHLMSFPQSAPHGVVFLHVTYVPAQEKNFTTAPAICHDGKAHFPREGVFVSNGTHWFVTQRNFYEPQIITTDNTFVSGNCDVVIGIVNNTVYDPLQLELDSFKEELDKYFKNHTSPDVDLGDISGINASVVNIQKEIDRLNEVAKNLNESLIDLQELGKYEQYIKGGGGSDIIKLLNEQVNKEMQSSNLYMSMSSWCYTHSLDGAGLFLFDHAAEEYEHAKKLIIFLNENNVPVQLTSISAPEHKFEGLTQIFQKAYEHEQHISESINNIVDHAIKSKDHATFNFLQWYVAEQHEEEVLFKDILDKIELIGNENHGLYLADQYVKGIAKSRKS

SEQ ID NO: 4707 - protein, 1379 aa, Artificial Sequence
  SARS-CoV-2/India/1-31/2020__EPI_ISL_413523 spike protein (1-1211)(K986P_V987P) Ferritin construct
MFVFLVLLPLVSSQCVNLTTRTQLPPAYTNSFTRGVYYPDKVFRSSVLHSTQDLFLPFFSNVTWFHAIHVSGTNGTKRFDNPVLPFNDGVYFASTEKSNIIRGWIFGTTLDSKTQSLLIVNNATNVVIKVCEFQFCNDPFLGVYYHKNNKSWMESEFRVYSSANNCTFEYVSQPFLMDLEGKQGNFKNLREFVFKNIDGYFKIYSKHTPINLVRDLPQGFSALEPLVDLPIGINITRFQTLLALHRSYLTPGDSSSGWTAGAAAYYVGYLQPRTFLLKYNENGTITDAVDCALDPLSETKCTLKSFTVEKGIYQTSNFRVQPTESIVRFPNITNLCPFGEVFNATRFASVYAWNRKRISNCVADYSVLYNSASFSTFKCYGVSPTKLNDLCFTNVYADSFVIRGDEVRQIAPGQTGKIADYNYKLPDDFTGCVIAWNSNNLDSKVGGNYNYLYRLFRKSNLKPFERDISTEIYQAGSTPCNGVEGFNCYFPLQSYGFQPTNGVGYQPYRVVVLSFELLHAPATVCGPKKSTNLVKNKCVNFNFNGLTGTGVLTESNKKFLPFQQFGRDIADTTDAVRDPQTLEILDITPCSFGGVSVITPGTNTSNQVAVLYQDVNCTEVPVAIHADQLTPTWRVYSTGSNVFQTRAGCLIGAEHVNNSYECDIPIGAGICASYQTQTNSPRRARSVASQSIIAYTMSLGAENSVAYSNNSIAIPTNFTISVTTEILPVSMTKTSVDCTMYICGDSTECSNLLLQYGSFCTQLNRALTGIAVEQDKNTQEVFAQVKQIYKTPPIKDFGGFNFSQILPDPSKPSKRSFIEDLLFNKVTLADAGFIKQYGDCLGDIAARDLICAQKFNGLTVLPPLLTDEMIAQYTSALLAGTITSGWTFGAGAALQIPFAMQMAYRFNGIGVTQNVLYENQKLIANQFNSVIGKIQDSLSSTASALGKLQDVVNQNAQALNTLVKQLSSNFGAISSVLNDILSRLDPPEAEVQIDRLITGRLQSLQTYVTQQLIRAAEIRASANLAATKMSECVLGQSKRVDFCGKGYHLMSFPQSAPHGVVFLHVTYVPAQEKNFTTAPAICHDGKAHFPREGVFVSNGTHWFVTQRNFYEPQIITTDNTFVSGNCDVVIGIVNNTVYDPLQPELDSFKEELDKYFKNHTSPDVDLGDISGINASVVNIQKEIDRLNEVAKNLNESLIDLQELGKYEQYIKGGGGSDIIKLLNEQVNKEMQSSNLYMSMSSWCYTHSLDGAGLFLFDHAAEEYEHAKKLIIFLNENNVPVQLTSISAPEHKFEGLTQIFQKAYEHEQHISESINNIVDHAIKSKDHATFNFLQWYVAEQHEEEVLFKDILDKIELIGNENHGLYLADQYVKGIAKSRKS

SEQ ID NO: 4708 - protein, 1379 aa, Artificial Sequence
  SARS-CoV-2/Guangdong/GD2020087-P0008/2020__EPI_ISL_413863 spike protein (1-1211)(K986P_V987P) Ferritin construct
MFVFLVLLPLVSSQCVNLTTRTQLPPAYTNSFTRGVYYPDKVFRSSVLHSTQDLFLPFFSNVTWFHAIHVSGTNGTKRFDNPVLPFNDGVYFASTEKSNIIRGWIFGTTLDSKTQSLLIVNNATNVVIKVCEFQFCNDPFLGVYYHKNNKSWMESEFRVYSSANNCTFEYVSQPFLMDLEGKQGNFKNLREFVFKNIDGYFKIYSKHTPINLVRDLPQGFSALEPLVDLPIGINITRFQTLLALHRSYLTPGDSSSGWTAGAAAYYVGYLQPRTFLLKYNENGTITDAVDCALDPLSETKCTLKSFTVEKGIYQTSNFRVQPTESIVRFPNITNLCPFGEVFNATRFASVYAWNRKRISNCVADYSVLYNSASFSTFKCYGVSPTKLNDLCFTNVYADSFVIRGDEVREIAPGQTGKIADYNYKLPDDFTGCVIAWNSNNLDSKVGGNYNYLYRLFRKSNLKPFERDISTEIYQAGSTPCNGVEGFNCYFPLQSYGFQPTNGVGYQPYRVVVLSFELLHAPATVCGPKKSTNLVKNKCVNFNFNGLTGTGVLTESNKKFLPFQQFGRDIADTTDAVRDPQTLEILDITPCSFGGVSVITPGTNTSNQVAVLYQDVNCTEVPVAIHADQLTPTWRVYSTGSNVFQTRAGCLIGAEHVNNSYECDIPIGAGICASYQTQTNSPRRARSVASQSIIAYTMSLGAENSVAYSNNSIAIPTNFTISVTTEILPVSMTKTSVDCTMYICGDSTECSNLLLQYGSFCTQLNRALTGIAVEQDKNTQEVFAQVKQIYKTPPIKDFGGFNFSQILPDPSKPSKRSFIEDLLFNKVTLADAGFIKQYGDCLGDIAARDLICAQKFNGLTVLPPLLTDEMIAQYTSALLAGTITSGWTFGAGAALQIPFAMQMAYRFNGIGVTQNVLYENQKLIANQFNSAIGKIQDSLSSTASALGKLQDVVNQNAQALNTLVKQLSSNFGAISSVLNDILSRLDPPEAEVQIDRLITGRLQSLQTYVTQQLIRAAEIRASANLAATKMSECVLGQSKRVDFCGKGYHLMSFPQSAPHGVVFLHVTYVPAQEKNFTTAPAICHDGKAHFPREGVFVSNGTHWFVTQRNFYEPQIITTDNTFVSGNCDVVIGIVNNTVYDPLQPELDSFKEELDKYFKNHTSPDVDLGDISGINASVVNIQKEIDRLNEVAKNLNESLIDLQELGKYEQYIKGGGGSDIIKLLNEQVNKEMQSSNLYMSMSSWCYTHSLDGAGLFLFDHAAEEYEHAKKLIIFLNENNVPVQLTSISAPEHKFEGLTQIFQKAYEHEQHISESINNIVDHAIKSKDHATFNFLQWYVAEQHEEEVLFKDILDKIELIGNENHGLYLADQYVKGIAKSRKS

SEQ ID NO: 4709 - protein, 1379 aa, Artificial Sequence
  SARS-CoV-2/Sweden/01/2020__EPI_ISL_411951 spike protein (1-1211)(K986P_V987P) Ferritin construct
MFVFLVLLPLVSSQCVNLTTRTQLPPAYTNSFTRGVYYPDKVFRSSVLHSTQDLFLPFFSNVTWFHAIHVSGTNGTKRFDNPVLPFNDGVYFASTEKSNIIRGWIFGTTLDSKTQSLLIVNNATNVVIKVCEFQFCNDPFLGVYYHKNNKSWMESEFRVYSSANNCTFEYVSQPFLMDLEGKQGNFKNLREFVFKNIDGYFKIYSKHTPINLVRDLPQGFSALEPLVDLPIGINITRFQTLLALHRSYLTPGDSSSGWTAGAAAYYVGYLQPRTFLLKYNENGTITDAVDCALDPLSETKCTLKSFTVEKGIYQTSNFRVQPTESIVRFPNITNLCPFGEVFNATRFASVYAWNRKRISNCVADYSVLYNSASFSTFKCYGVSPTKLNDLCFTNVYADSFVIRGDEVRQIAPGQTGKIADYNYKLPDDFTGCVIAWNSNNLDSKVGGNYNYLYRLFRKSNLKPFERDISTEIYQAGSTPCNGVEGFNCYFPLQSYGFQPTNGVGYQPYRVVVLSFELLHAPATVCGPKKSTNLVKNKCVNFNFNGLTGTGVLTESNKKFLPFQQFGRDIADTTDAVRDPQTLEILDITPCSFGGVSVITPGTNTSNQVAVLYQDVNCTEVPVAIHADQLTPTWRVYSTGSNVFQTRAGCLIGAEHVNNSYECDIPIGAGICASYQTQTNSPRRARSVASQSIIAYTMSLGAENSVAYSNNSIAIPTNFTISVTTEILPVSMTKTSVDCTMYICGDSTECSNLLLQYGSFCTQLNRALTGIAVEQDKNTQEVFAQVKQIYKTPPIKDCGGFNFSQILPDPSKPSKRSFIEDLLFNKVTLADAGFIKQYGDCLGDIAARDLICAQKFNGLTVLPPLLTDEMIAQYTSALLAGTITSGWTFGAGAALQIPFAMQMAYRFNGIGVTQNVLYENQKLIANQFNSAIGKIQDSLSSTASALGKLQDVVNQNAQALNTLVKQLSSNFGAISSVLNDILSRLDPPEAEVQIDRLITGRLQSLQTYVTQQLIRAAEIRASANLAATKMSECVLGQSKRVDFCGKGYHLMSFPQSAPHGVVFLHVTYVPAQEKNFTTAPAICHDGKAHFPREGVFVSNGTHWFVTQRNFYEPQIITTDNTFVSGNCDVVIGIVNNTVYDPLQPELDSFKEELDKYFKNHTSPDVDLGDISGINASVVNIQKEIDRLNEVAKNLNESLIDLQELGKYEQYIKGGGGSDIIKLLNEQVNKEMQSSNLYMSMSSWCYTHSLDGAGLFLFDHAAEEYEHAKKLIIFLNENNVPVQLTSISAPEHKFEGLTQIFQKAYEHEQHISESINNIVDHAIKSKDHATFNFLQWYVAEQHEEEVLFKDILDKIELIGNENHGLYLADQYVKGIAKSRKS

SEQ ID NO: 4710 - protein, 1379 aa, Artificial Sequence
  SARS-CoV-2/Tianmen/HBCDC-HB-07/2020__EPI_ISL_412983 spike protein (1-1211)(K986P_V987P) Ferritin construct
MFVFLVLLPLVSSQCVNLTTRTQLPPAYTNSFTRGVYYPDKVFRSSVLHSTQDLFLPFFSNVTWFHAIHVSGTNGTKRFDNPVLPFNDGVYFASTEKSNIIRGWIFGTTLDSKTQSLLIVNNATNVVIKVCEFQFCNDPFLGVYYHKNNKSWMESEFRVYSSANNCTFEYVSQPFLMDLEGKQGNFKNLREFVFKNIDGYFKIYSKHTPINLVRDLPQGFSALEPLVDLPIGINITRFQTLLALHRSYLTPGDSSSGWTAGAAAYYVGYLQPRTFLLKYNENGTITDAVDCALDPLSETKCTLKSFTVEKGIYQTSNFRVQPTESIVRFPNITNLCPFGEVFNATRFASVYAWNRKRISNCVADYSVLYNSASFSTFKCYGVSPTKLNDLCFTNVYADSFVIRGDEVRQIAPGQTGKIADYNYKLPDDFTGCVIAWNSNNLDSKVGGNYNYLYRLFRKSNLKPFERDISTEIYQAGSTPCNGVEGFNCYFPLQSYGFQPTNGVGYQPYRVVVLSFELLHAPATVCGPKKSTNLVKNKCVNFNFNGLTGTGVLTESNKKFLPFQQFGRDIADTTDAVRDPQTLEILDITPCSFGGVSVITPGTNTSNQVAVLYQDLNCTEVPVAIHADQLTPTWRVYSTGSNVFQTRAGCLIGAEHVNNSYECDIPIGAGICASYQTQTNSPRRARSVASQSIIAYTMSLGAENSVAYSNNSIAIPTNFTISVTTEILPVSMTKTSVDCTMYICGDSTECSNLLLQYGSFCTQLNRALTGIAVEQDKNTQEVFAQVKQIYKTPPIKDFGGFNFSQILPDPSKPSKRSFIEDLLFNKVTLADAGFIKQYGDCLGDIAARDLICAQKFNGLTVLPPLLTDEMIAQYTSALLAGTITSGWTFGAGAALQIPFAMQMAYRFNGIGVTQNVLYENQKLIANQFNSAIGKIQDSLSSTASALGKLQDVVNQNAQALNTLVKQLSSNFGAISSVLNDILSRLDPPEAEVQIDRLITGRLQSLQTYVTQQLIRAAEIRASANLAATKMSECVLGQSKRVDFCGKGYHLMSFPQSAPHGVVFLHVTYVPAQEKNFTTAPAICHDGKAHFPREGVFVSNGTHWFVTQRNFYEPQIITTDNTFVSGNCDVVIGIVNNTVYDPLQPELDSFKEELDKYFKNHTSPDVDLGDISGINASVVNIQKEIDRLNEVAKNLNESLIDLQELGKYEQYIKGGGGSDIIKLLNEQVNKEMQSSNLYMSMSSWCYTHSLDGAGLFLFDHAAEEYEHAKKLIIFLNENNVPVQLTSISAPEHKFEGLTQIFQKAYEHEQHISESINNIVDHAIKSKDHATFNFLQWYVAEQHEEEVLFKDILDKIELIGNENHGLYLADQYVKGIAKSRKS

SEQ ID NO: 4711 - protein, 1379 aa, Artificial Sequence
  SARS-CoV-2/Hong Kong/case42_VM20002493/2020__EPI_ISL_414527 spike protein (1-1211)(K986P_V987P) Ferritin construct
MFVFLVLLPLVSSQCVNLTTRTQLPPAYTNSFTRGVYYPDKVFRSSVLHSTQDLFLPFFSNVTWFHAIHVSGTNGTKRFDNPVLPFNDGVYFASTEKSNIIRGWIFGTTLDSKTQSLLIVNNATNVVIKVCEFQFCNDPFLGVYYHKNNKSWMESEFRVYSSANNCTFEYVSQPFLMDLEGKQGNFKNLREFVFKNIDGYFKIYSKHTPINLVRDLPQGFSALEPLVDLPIGINITRFQTLLALHRSYLTPGDSSSGWTAGAAAYYVGYLQPRTFLLKYNENGTITDAVDCALDPLSETKCTLKSFTVEKGIYQTSNFRVQPTESIVRFPNITNLCPFGEVFNATRFASVYAWNRKRISNCVADYSVLYNSASFSTFKCYGVSPTKLNDLCFTNVYADSFVIRGDEVRQIAPGQTGKIADYNYKLPDDFTGCVIAWNSNNLDSKVGGNYNYLYRLFRKSNLKPFERDISTEIYQAGSTPCNGVEGFNCYFPLQSYGFQPTNGVGYQPYRVVVLSFELLHAPATVCGPKKSTNLVKNKCVNFNFNGLTGTGVLTESNKKFLPFQQFGRDIADTTDAVRDPQTLEILDITPCSFGGVSVITPGTNTSNQVAVLYQDVNCTEVPVAIHADQLTPTWRVYSTGSNVFQTRAGCLIGAEHVNNSYECDIPIGAGICASYQTQTNSPRRARSVASQSIIAYTMSLGAENSVAYSNNSIAIPTNFAISVTTEILPVSMTKTSVDCTMYICGDSTECSNLLLQYGSFCTQLNRALTGIAVEQDKNTQEVFAQVKQIYKTPPIKDFGGFNFSQILPDPSKPSKRSFIEDLLFNKVTLADAGFIKQYGDCLGDIAARDLICAQKFNGLTVLPPLLTDEMIAQYTSALLAGTITSGWTFGAGAALQIPFAMQMAYRFNGIGVTQNVLYENQKLIANQFNSAIGKIQDSLSSTASALGKLQDVVNQNAQALNTLVKQLSSNFGAISSVLNDILSRLDPPEAEVQIDRLITGRLQSLQTYVTQQLIRAAEIRASANLAATKMSECVLGQSKRVDFCGKGYHLMSFPQSAPHGVVFLHVTYVPAQEKNFTTAPAICHDGKAHFPREGVFVSNGTHWFVTQRNFYEPQIITTDNTFVSGNCDVVIGIVNNTVYDPLQPELDSFKEELDKYFKNHTSPDVDLGDISGINASVVNIQKEIDRLNEVAKNLNESLIDLQELGKYEQYIKGGGGSDIIKLLNEQVNKEMQSSNLYMSMSSWCYTHSLDGAGLFLFDHAAEEYEHAKKLIIFLNENNVPVQLTSISAPEHKFEGLTQIFQKAYEHEQHISESINNIVDHAIKSKDHATFNFLQWYVAEQHEEEVLFKDILDKIELIGNENHGLYLADQYVKGIAKSRKS

SEQ ID NO: 4712 - protein, 1379 aa, Artificial Sequence
  SARS-CoV-2/USA/CruiseA-23/2020__EPI_ISL_414482 spike protein (1-1211)(K986P_V987P) Ferritin construct
MFVFLVLLPLVSSQCVNLTTRTQLPPAYTNSFTRGVYYPDKVFRSSVLHSTQDLFLPFFSNVTWFHAIHVSGTNGTKRFDNPVLPFNDGVYFASTEKSNIIRGWIFGTTLDSKTQSLLIVNNATNVVIKVCEFQFCNDPFLGVYYHKNNKSWMESEFRVYSSANNCTFEYVSQPFLMDLEVKQGNFKNLREFVFKNIDGYFKIYSKHTPINLVRDLPQGFSALEPLVDLPIGINITRFQTLLALHRSYLTPGDSSSGWTAGAAAYYVGYLQPRTFLLKYNENGTITDAVDCALDPLSETKCTLKSFTVEKGIYQTSNFRVQPTESIVRFPNITNLCPFGEVFNATRFASVYAWNRKRISNCVADYSVLYNSASFSTFKCYGVSPTKLNDLCFTNVYADSFVIRGDEVRQIAPGQTGKIADYNYKLPDDFTGCVIAWNSNNLDSKVGGNYNYLYRLFRKSNLKPFERDISTEIYQAGSTPCNGVEGFNCYFPLQSYGFQPTNGVGYQPYRVVVLSFELLHAPATVCGPKKSTNLVKNKCVNFNFNGLTGTGVLTESNKKFLPFQQFGRDIADTTDAVRDPQTLEILDITPCSFGGVSVITPGTNTSNQVAVLYQDVNCTEVPVAIHADQLTPTWRVYSTGSNVFQTRAGCLIGAEHVNNSYECDIPIGAGICASYQTQTNSPRRARSVASQSIIAYTMSLGAENSVAYSNNSIAIPTNFTISVTTEILPVSMTKTSVDCTMYICGDSTECSNLLLQYGSFCTQLNRALTGIAVEQDKNTQEVFAQVKQIYKTPPIKDFGGFNFSQILPDPSKPSKRSFIEDLLFNKVTLADAGFIKQYGDCLGDIAARDLICAQKFNGLTVLPPLLTDEMIAQYTSALLAGTITSGWTFGAGAALQIPFAMQMAYRFNGIGVTQNVLYENQKLIANQFNSAIGKIQDSLSSTASALGKLQDVVNQNAQALNTLVKQLSSNFGAISSVLNDILSRLDPPEAEVQIDRLITGRLQSLQTYVTQQLIRAAEIRASANLAATKMSECVLGQSKRVDFCGKGYHLMSFPQSAPHGVVFLHVTYVPAQEKNFTTAPAICHDGKAHFPREGVFVSNGTHWFVTQRNFYEPQIITTDNTFVSGNCDVVIGIVNNTVYDPLQPELDSFKEELDKYFKNHTSPDVDLGDISGINASVVNIQKEIDRLNEVAKNLNESLIDLQELGKYEQYIKGGGGSDIIKLLNEQVNKEMQSSNLYMSMSSWCYTHSLDGAGLFLFDHAAEEYEHAKKLIIFLNENNVPVQLTSISAPEHKFEGLTQIFQKAYEHEQHISESINNIVDHAIKSKDHATFNFLQWYVAEQHEEEVLFKDILDKIELIGNENHGLYLADQYVKGIAKSRKS

SEQ ID NO: 4713 - protein, 1379 aa, Artificial Sequence
  SARS-CoV-2/Hong Kong/case85_VM20002868/2020__EPI_ISL_414519 spike protein (1-1211)(K986P_V987P) Ferritin construct
MFVFLVLVPLVSSQCVNLTTRTQLPPAYTNSFTRGVYYPDKVFRSSVLHSTQDLFLPFFSNVTWFHAIHVSGTNGTKRFDNPVLPFNDGVYFASTEKSNIIRGWIFGTTLDSKTQSLLIVNNATNVVIKVCEFQFCNDPFLGVYYHKNNKSWMESEFRVYSSANNCTFEYVSQPFLMDLEGKQGNFKNLREFVFKNIDGYFKIYSKHTPINLVRDLPQGFSALEPLVDLPIGINITRFQTLLALHRSYLTPGDSSSGWTAGAAAYYVGYLQPRTFLLKYNENGTITDAVDCALDPLSETKCTLKSFTVEKGIYQTSNFRVQPTESIVRFPNITNLCPFGEVFNATRFASVYAWNRKRISNCVADYSVLYNSASFSTFKCYGVSPTKLNDLCFTNVYADSFVIRGDEVRQIAPGQTGKIADYNYKLPDDFTGCVIAWNSNNLDSKVGGNYNYLYRLFRKSNLKPFERDISTEIYQAGSTPCNGVEGFNCYFPLQSYGFQPTNGVGYQPYRVVVLSFELLHAPATVCGPKKSTNLVKNKCVNFNFNGLTGTGVLTESNKKFLPFQQFGRDIADTTDAVRDPQTLEILDITPCSFGGVSVITPGTNTSNQVAVLYQDVNCTEVPVAIHADQLTPTWRVYSTGSNVFQTRAGCLIGAEHVNNSYECDIPIGAGICASYQTQTNSPRRARSVASQSIIAYTMSLGAENSVAYSNNSIAIPTNFTISVTTEILPVSMTKTSVDCTMYICGDSTECSNLLLQYGSFCTQLNRALTGIAVEQDKNTQEVFAQVKQIYKTPPIKDFGGFNFSQILPDPSKPSKRSFIEDLLFNKVTLADAGFIKQYGDCLGDIAARDLICAQKFNGLTVLPPLLTDEMIAQYTSALLAGTITSGWTFGAGAALQIPFAMQMAYRFNGIGVTQNVLYENQKLIANQFNSAIGKIQDSLSSTASALGKLQDVVNQNAQALNTLVKQLSSNFGAISSVLNDILSRLDPPEAEVQIDRLITGRLQSLQTYVTQQLIRAAEIRASANLAATKMSECVLGQSKRVDFCGKGYHLMSFPQSAPHGVVFLHVTYVPAQEKNFTTAPAICHDGKAHFPREGVFVSNGTHWFVTQRNFYEPQIITTDNTFVSGNCDVVIGIVNNTVYDPLQPELDSFKEELDKYFKNHTSPDVDLGDISGINASVVNIQKEIDRLNEVAKNLNESLIDLQELGKYEQYIKGGGGSDIIKLLNEQVNKEMQSSNLYMSMSSWCYTHSLDGAGLFLFDHAAEEYEHAKKLIIFLNENNVPVQLTSISAPEHKFEGLTQIFQKAYEHEQHISESINNIVDHAIKSKDHATFNFLQWYVAEQHEEEVLFKDILDKIELIGNENHGLYLADQYVKGIAKSRKS

SEQ ID NO: 4714 - protein, 1379 aa, Artificial Sequence; identical to SEQ ID NO: 4704
  SARS-CoV-2/England/200990660/2020__EPI_ISL_414523 spike protein (1-1211)(K986P_V987P) Ferritin construct

SEQ ID NO: 4715 - protein, 1379 aa, Artificial Sequence
  SARS-CoV-2/Australia/NSW09/2020__EPI_ISL_413595 spike protein (1-1211)(K986P_V987P) Ferritin construct
MFVFLVLLPLVSSQCVNLTTRTQLPPAYTNSFTRGVYYPDKVFRSSVLHSTQDLFLPFFSNVTWFHAIHVSGTNGTKRFDNPVLPFNDGVYFASTEKSNIIRGWIFGTTLDSKTQSLLIVNNATNVVIKVCEFQFCNDPFLGVYYHKNNKSWMESEFRVYSSANNCTFEYVSQPFLMDLEGKQGNFKNLREFVFKNIDGYFKIYSKHTPINLVRDLPQGFSALEPLVDLPIGINITRFQTLLALHRSYLTPGDSSSGWTAGAAAYYVGYLQPRTFLLKYNENGTITDAVDCALDPLSETKCTLKSFTVEKGIYQTSNFRVQPTESIVRFPNITNLCPFGEVFNATRFASVYAWNRKRISNCVADYSVLYNSASFSTFKCYGVSPTKLNDLCFTNVYADSFVIRGDEVRQIAPGQTGKIADYNYKLPDDFTGCVIAWNSNNLDSKVGGNYNYLYRLFRKSNLKPFERDISTEIYQAGSTPCNGVEGFNCYFPLQSYGFQPTNGVGYQPYRVVVLSFELLHAPATVCGPKKSTNLVKNKCVNFNFNGLTGTGVLTESNKKFLPFQQFGRDIADTTDAVRDPQTLEILDITPCSFGGVSVITPGTNTSNQVAVLYQDVNCTEVPVAIHADQLTPTWRVYSTGSNVFQTRAGCLIGAEHVNNSYECDIPIGAGICASYQTQTNSPRRARSVASQSIIAYTMSLGAENSVAYSNNSIAIPTNFTISVTTEILPVSMTKTSVDCTMYICGDSTECSNLLLQYGSFCTQLNRALTGIAVEQDKNTQEVFAQVKQIYKTPPIKDFGGFNFSQILPDPSKPSKRSFIEDLLFNKVTLADAGFIKQYGDCLGDIAARDLICAQKFNGLTVLPPLLTDEMIAQYTSALLAGTITSGWTFGAGAALQIPFAMQMAYRFNGIGVTQNVLYENQKLIANQFNSAIGKIQDSLSFTASALGKLQDVVNQNAQALNTLVKQLSSNFGAISSVLNDILSRLDPPEAEVQIDRLITGRLQSLQTYVTQQLIRAAEIRASANLAATKMSECVLGQSKRVDFCGKGYHLMSFPQSAPHGVVFLHVTYVPAQEKNFTTAPAICHDGKAHFPREGVFVSNGTHWFVTQRNFYEPQIITTDNTFVSGNCDVVIGIVNNTVYDPLQPELDSFKEELDKYFKNHTSPDVDLGDISGINASVVNIQKEIDRLNEVAKNLNESLIDLQELGKYEQYIKGGGGSDIIKLLNEQVNKEMQSSNLYMSMSSWCYTHSLDGAGLFLFDHAAEEYEHAKKLIIFLNENNVPVQLTSISAPEHKFEGLTQIFQKAYEHEQHISESINNIVDHAIKSKDHATFNFLQWYVAEQHEEEVLFKDILDKIELIGNENHGLYLADQYVKGIAKSRKS

SEQ ID NO: 4716 - protein, 1379 aa, Artificial Sequence; identical to SEQ ID NO: 4696
  SARS-CoV-2/Australia/NSW10/2020__EPI_ISL_413596 spike protein (1-1211)(K986P_V987P) Ferritin construct

SEQ ID NO: 4717 - protein, 1379 aa, Artificial Sequence
  SARS-CoV-2/Switzerland/1000477797/2020__EPI_ISL_413023 spike protein (1-1211)(K986P_V987P) Ferritin construct
MFVFLVLLPLVSSQCVNLTTRTQLPPAYTNSFTRGVYYPDKVFRSSVLHSTQDLFLPFFSNVTWFHAIHVSGTNGTKRFDNPVLPFNDGVYFASTEKSNIIRGWIFGTTLDSKTQSLLIVNNATNVVIKVCEFQFCNDPFLGVYYHKNNKSWMESEFRVYSSANNCTFEYVSQPFLMDLEGKQGNFKNLREFVFKNIDGYFNIYSKHTPINLVRDLPQGFSALEPLVDLPIGINITRFQTLLALHRSYLTPGDSSSGWTAGAAAYYVGYLQPRTFLLKYNENGTITDAVDCALDPLSETKCTLKSFTVEKGIYQTSNFRVQPTESIVRFPNITNLCPFGEVFNATRFASVYAWNRKRISNCVADYSVLYNSASFSTFKCYGVSPTKLNDLCFTNVYADSFVIRGDEVRQIAPGQTGKIADYNYKLPDDFTGCVIAWNSNNLDSKVGGNYNYLYRLFRKSNLKPFERDISTEIYQAGSTPCNGVEGFNCYFPLQSYGFQPTNGVGYQPYRVVVLSFELLHAPATVCGPKKSTNLVKNKCVNFNFNGLTGTGVLTESNKKFLPFQQFGRDIADTTDAVRDPQTLEILDITPCSFGGVSVITPGTNTSNQVAVLYQGVNCTEVPVAIHADQLTPTWRVYSTGSNVFQTRAGCLIGAEHVNNSYECDIPIGAGICASYQTQTNSPRRARSVASQSIIAYTMSLGAENSVAYSNNSIAIPTNFTISVTTEILPVSMTKTSVDCTMYICGDSTECSNLLLQYGSFCTQLNRALTGIAVEQDKNTQEVFAQVKQIYKTPPIKDFGGFNFSQILPDPSKPSKRSFIEDLLFNKVTLADAGFIKQYGDCLGDIAARDLICAQKFNGLTVLPPLLTDEMIAQYTSALLAGTITSGWTFGAGAALQIPFAMQMAYRFNGIGVTQNVLYENQKLIANQFNSAIGKIQDSLSSTASALGKLQDVVNQNAQALNTLVKQLSSNFGAISSVLNDILSRLDPPEAEVQIDRLITGRLQSLQTYVTQQLIRAAEIRASANLAATKMSECVLGQSKRVDFCGKGYHLMSFPQSAPHGVVFLHVTYVPAQEKNFTTAPAICHDGKAHFPREGVFVSNGTHWFVTQRNFYEPQIITTDNTFVSGNCDVVIGIVNNTVYDPLQPELDSFKEELDKYFKNHTSPDVDLGDISGINASVVNIQKEIDRLNEVAKNLNESLIDLQELGKYEQYIKGGGGSDIIKLLNEQVNKEMQSSNLYMSMSSWCYTHSLDGAGLFLFDHAAEEYEHAKKLIIFLNENNVPVQLTSISAPEHKFEGLTQIFQKAYEHEQHISESINNIVDHAIKSKDHATFNFLQWYVAEQHEEEVLFKDILDKIELIGNENHGLYLADQYVKGIAKSRKS

SEQ ID NO: 4718 - protein, 1379 aa, Artificial Sequence
  SARS-CoV-2/Belgium/BA-02291/2020__EPI_ISL_415159 spike protein (1-1211)(K986P_V987P) Ferritin construct
MFVFLVLLPLVSSQCVNLTTRTQLPPAYTNSFTRGVYYPDKVFRSSVLHSTQDLFLPFFSNVTWFHAIHVSGTNGTKRFDNPVLPFNDGVYFASTEKSNIIRGWIFGTTLDSKTQSLLIVNNATNVVIKVCEFQFCNDPFLGVYYHKNNKSWMESEFRVYSSANNCTFEYVSQPFLMDLEGKQGNFKNLREFVFKNIDGYFKIYSKHTPINLVRDLPQGFSALEPLVDLPIGINITRFQTLLALHRSYLTPGDSSSGWTAGAAAYYVGYLQPRTFLLKYNENGTITDAVDCALDPLSETKCTLKSFTVEKGIYQTSNFRVQPTESIVRFPNITNLCPFGEVFNATRFASVYAWNRKRISNCVADYSVLYNSASFSTFKCYGVSPTKLNDLCFTNVYADSFVIRGDEVRQIAPGQTGKIADYNYKLPDDFTGCVIAWNSNNLDSKVGGNYNYLYRLFRRSNLKPFERDISTEIYQAGSTPCNGVEGFNCYFPLQSYGFQPTNGVGYQPYRVVVLSFELLPAPATVCGPKKSTNLVKNKCVNFNFNGLTGTGVLTESNKKFLPFQQFGRDIADTTDAVRDPQTLEILDITPCSFGGVSVITPGTNTSNQVAVLYQGVNCTEVPVAIHADQLTPTWRVYSTGSNVFQTRAGCLIGAEHVNNSYECDIPIGAGICASYQTQTNSPRRARSVASQSIIAYTMSLGAENSVAYSNNSIAIPTNFTISVTTEILPVSMTKTSVDCTMYICGDSTECSNLLLQYGSFCTQLNRALTGIAVEQDKNTQEVFAQVKQIYKTPPIKDFGGFNFSQILPDPSKPSKRSFIEDLLFNKVTLADAGFIKQYGDCLGDIAARDLICAQKFNGLTVLPPLLTDEMIAQYTSALLAGTITSGWTFGAGAALQIPFAMQMAYRFNGIGVTQNVLYENQKLIANQFNSAIGKIQDSLSSAAPALGKLQDVVNQNAQALNTLVKQLSSNFGAISSVLNDILSRLDPPEAEVQIDRLITGRLQSLQTYVTQQLIRAAEIRASANLAATKMSECVLGQSKRVDFCGKGYHLMSFPQSAPHGVVFLHVTYVPAQEKNFTTAPAICHDGKAHFPREGVFVSNGTHWFVTQRNFYEPQIITTDNTFVSGNCDVVIGIVNNTVYDPLQPELDSFKEELDKYFKNHTSPDVDLGDISGINASVVNIQKEIDRLNEVAKNLNESLIDLQELGKYEQYIKGGGGSDIIKLLNEQVNKEMQSSNLYMSMSSWCYTHSLDGAGLFLFDHAAEEYEHAKKLIIFLNENNVPVQLTSISAPEHKFEGLTQIFQKAYEHEQHISESINNIVDHAIKSKDHATFNFLQWYVAEQHEEEVLFKDILDKIELIGNENHGLYLADQYVKGIAKSRKS

SEQ ID NO: 4719 - protein, 1379 aa, Artificial Sequence
  SARS-CoV-2/USA/WA8-UW5/2020__EPI_ISL_413486 spike protein (1-1211)(K986P_V987P) Ferritin construct
MFVFLVLLPLVSSQCVNLTTRTQLPPAYTNSFTRGVYYPDKVFRSSVLHSTQDLFLPFFSNVTWFHAIHVSGTNGTKRFDNPVLPFNDGVYFASTEKSNIIRGWIFGTTLDSKTQSLLIVNNATNVVIKVCEFQFCNDPFLGVYYHKNNKSWMESEFRVYSSANNCTFEYVSQPFLMDLEGKQGNFKNLREFVFKNIDGYFKIYSKHTPINLVRDLPQGFSALEPLVDLPIGINITRFQTLLALHRSYLTPGDSSSGWTAGAAAYYVGYLQPRTFLLKYNENGTITDAVDCALDPLSETKCTLKSFTVEKGIYQTSNFRVQPTESIVRFPNITNLCPFGEVFNATRFASVYAWNRKRISNCVADYSVLYNSASFSTFKCYGVSPTKLNDLCFTNVYADSFVIRGDEVRQIAPGQTGKIADYNYKLPDDFTGCVIAWNSNNLDSKVGGNYNYLYRLFRKSNLKPFERDISTEIYQAGSTPCNGVEGFNCYFPLQSYGFQPTNGVGYQPYRVVVLSFELLHAPATVCGPKKSTNLVKNKCVNFNFNGLTGTGVLTESNKKFLPFQQFGRDIADTTDAVRDPQTLEILDITPCSFGGVSVITPGTNTSNQVAVLYQDVNCTEVPVAIHADQLTPTWRVYSTGSNVFQTRAGCLIGAEYVNNSYECDIPIGAGICASYQTQTNSPRRARSVASQSIIAYTMSLGAENSVAYSNNSIAIPTNFTISVTTEILPVSMTKTSVDCTMYICGDSTECSNLLLQYGSFCTQLNRALTGIAVEQDKNTQEVFAQVKQIYKTPPIKDFGGFNFSQILPDPSKPSKRSFIEDLLFNKVTLADAGFIKQYGDCLGDIAARDLICAQKFNGLTVLPPLLTDEMIAQYTSALLAGTITSGWTFGAGAALQIPFAMQMAYRFNGIGVTQNVLYENQKLIANQFNSAIGKIQDSLSSTASALGKLQDVVNQNAQALNTLVKQLSSNFGAISSVLNDILSRLDPPEAEVQIDRLITGRLQSLQTYVTQQLIRAAEIRASANLAATKMSECVLGQSKRVDFCGKGYHLMSFPQSAPHGVVFLHVTYVPAQEKNFTTAPAICHDGKAHFPREGVFVSNGTHWFVTQRNFYEPQIITTDNTFVSGNCDVVIGIVNNTVYDPLQPELDSFKEELDKYFKNHTSPDVDLGDISGINASVVNIQKEIDRLNEVAKNLNESLIDLQELGKYEQYIKGGGGSDIIKLLNEQVNKEMQSSNLYMSMSSWCYTHSLDGAGLFLFDHAAEEYEHAKKLIIFLNENNVPVQLTSISAPEHKFEGLTQIFQKAYEHEQHISESINNIVDHAIKSKDHATFNFLQWYVAEQHEEEVLFKDILDKIELIGNENHGLYLADQYVKGIAKSRKS

SEQ ID NO: 4720 - protein, 1379 aa, Artificial Sequence
  SARS-CoV-2/England/20102000506/2020__EPI_ISL_415147 spike protein (1-1211)(K986P_V987P) Ferritin construct
MFVFLVLLPLVSSQCVNLTTRTQLPPAYTNSFTRGVYYPDKVFRSSVLHSTQDLFLPFFSNVTWFHAIHVSGTNGTKRFDNPVLPFNDGVYFASTEKSNIIRGWIFGTTLDSKTQSLLIVNNATNVVIKVCEFQFCNDPFLGVYYHKNNKSWMESEFRVYSSANNCTFEYVSQPFLMDLEGKQGNFKNLREFVFKNIDGYFKIYSKHTPINLVRDLPQGFSALEPLVDLPIGINITRFQTLLALHRSYLTPGDSSSGWTAGAAAYYVGYLQPRTFLLKYNENGTITDAVDCALDPLSETKCTLKSFTVEKGIYQTSNFRVQPTESIVRFPNITNLCPFGEVFNATRFASVYAWNRKRISNCVADYSVLYNSASFSTFKCYGVSPTKLNDLCFTNVYADSFVIRGDEVRQIAPGQTGKIADYNYKLPDDFTGCVIAWNSNNLDSKVGGNYNYLYRLFRKSNLKPFERDISTEIYQAGSTPCNGVEGFNCYFPLQSYGFQPTNGVGYQPYRVVVLSFELLHAPATVCGPKKSTNLVKNKCVNFNFNGLTGTGVLTESNKKFLPFQQFGRDIADTTDAVRDPQTLEILDITPCSFGGVSVITPGTNTSNQVAVLYQGVNCTEVPVAIHADQLTPTWRVYSTGSNVFQTRAGCLIGAEHVNNSYECDIPIGAGICASYQTQTNSPRRARSVASQSIIAYTMSLGAENSVAYSNNSIAIPTNFTISVTTEILPVSMTKTSVDCTMYICGDSTECSNLLLQYGSFCTQLNRALTGIAVEQDKNTQEVFAQVKQIYKTPPIKDFGGFNFSQILPDPSKPSKRSFIEDLLFNKVTLADAGFIKQYGYCLGDIAARDLICAQKFNGLTVLPPLLTDEMIAQYTSALLAGTITSGWTFGAGAALQIPFAMQMAYRFNGIGVTQNVLYENQKLIANQFNSAIGKIQDSLSSTASALGKLQDVVNQNAQALNTLVKQLSSNFGAISSVLNDILSRLDPPEAEVQIDRLITGRLQSLQTYVTQQLIRAAEIRASANLAATKMSECVLGQSKRVDFCGKGYHLMSFPQSAPHGVVFLHVTYVPAQEKNFTTAPAICHDGKAHFPREGVFVSNGTHWFVTQRNFYEPQIITTDNTFVSGNCDVVIGIVNNTVYDPLQPELDSFKEELDKYFKNHTSPDVDLGDISGINASVVNIQKEIDRLNEVAKNLNESLIDLQELGKYEQYIKGGGGSDIIKLLNEQVNKEMQSSNLYMSMSSWCYTHSLDGAGLFLFDHAAEEYEHAKKLIIFLNENNVPVQLTSISAPEHKFEGLTQIFQKAYEHEQHISESINNIVDHAIKSKDHATFNFLQWYVAEQHEEEVLFKDILDKIELIGNENHGLYLADQYVKGIAKSRKS

SEQ ID NO: 4721 - protein, 1379 aa, Artificial Sequence
  SARS-CoV-2/Belgium/VAG-03013/2020__EPI_ISL_415155 spike protein (1-1211)(K986P_V987P) Ferritin construct
MFVFLVLLPLVSSQCVNLTTRTQLPPAYTNSFTRGVYYPDKVFRSSVLHSTQDLFLPFFSNVTWFHAIHVSGTNGTKRFDNPVLPFNDGVYFASTEKSNIIRGWIFGTTLDSKTQSLLIVNNATNVVIKVCEFQFCNDPFLGVYYHKNNKSWMESEFRVYSSANNCTFEYVSQPFLMDLEGKQGNFKNLREFVFKNIDGYFKIYSKHTPINLVRDLPQGFSALEPLVDLPIGINITRFQTLLALHRSYLTPGDSSSGWTAGAAAYYVGYLQPRTFLLKYNENGTITDAVDCALDPLSETKCTLKSFTVEKGIYQTSNFRVQPTESIVRFPNITNLCPFGEVFNATRFASVYAWNRKRISNCVADYSVLYNSASFSTFKCYGVSPTKLNDLCFTNVYADSFVIRGDEVRQIAPGQTGKIADYNYKLPDDFTGCVIAWNSNNLDSKVGGNYNYLYRLFRKSNLKPFERDISTEIYQAGSTPCNGVEGFNCYFPLQSYGFQPTNGVGYQPYRVVVLSFELLHAPATVCGPKKSTNLVKNKCVNFNFNGLTGTGVLTESNKKFLPFQQFGRDIADTTDAVRDPQTLEILDITPCSFGGVSVITPGTNTSNQVAVLYQGVNCTEVPVAIHADQLTPTWRVYSTGSNVFQTRAGCLIGAEHVNNSYECDIPIGAGICASYQTQTNSPRRARSVASQSIIAYTMSLGAENSVAYSNNSIAIPTNFTISVTTEILPVSMTKTSVDCTMYICGDSTECSNLLLQYGSFCTQLNRALTGIAVEQDKNTQEVFAQVKQIYKTPPIKDFGGFNFSQILPDPSKPSKRSFIEDLLFNKVTLADAGFIKQYGDCLGDIAARDLICAQKFNGLTVLPPLLTDEMIAQYTSALLAGTITSGWTFGAGAALQIPFAMQMAYRFNGIGVTQNVLYENQKLIANQFNSAIGKIQDSLSSTATALGKLQDVVNQNAQALNTLVKQLSSNFGAISSVLNDILSRLDPPEAEVQIDRLITGRLQSLQTYVTQQLIRAAEIRASANLAATKMSECVLGQSKRVDFCGKGYHLMSFPQSAPHGVVFLHVTYVPAQEKNFTTAPAICHDGKAHFPREGVFVSNGTHWFVTQRNFYEPQIITTDNTFVSGNCDVVIGIVNNTVYDPLQPELDSFKEELDKYFKNHTSPDVDLGDISGINASVVNIQKEIDRLNEVAKNLNESLIDLQELGKYEQYIKGGGGSDIIKLLNEQVNKEMQSSNLYMSMSSWCYTHSLDGAGLFLFDHAAEEYEHAKKLIIFLNENNVPVQLTSISAPEHKFEGLTQIFQKAYEHEQHISESINNIVDHAIKSKDHATFNFLQWYVAEQHEEEVLFKDILDKIELIGNENHGLYLADQYVKGIAKSRKS

SEQ ID NO: 4722 - protein, 1379 aa, Artificial Sequence
  SARS-CoV-2/Belgium/BC-03016/2020__EPI_ISL_415157 spike protein (1-1211)(K986P_V987P) Ferritin construct
MFVFLVLLPLVSSQCVNLTTRTQLPPAYTNSFTRGVYYPDKVFRSSVLHSTQDLFLPFFSNVTWFHAIHVSGTNGTKRFDNPVLPFNDGVYFASTEKSNIIRGWIFGTTLDSKTQSLLIVNNATNVVIKVCEFQFCNDPFLGVYYHKNNKSWMESEFRVYSSANNCTFEYVSQPFLMDLEGKQGNFKNLREFVFKNIDGYFKIYSKHTPINLVRDLPQGFSALEPLVDLPIGINITRFQTLLALHRSYLTPGDSSSGWTAGAAAYYVGYLQPRTFLLKYNENGTITDAVDCALDPLSETKCTLKSFTVEKGIYQTSNFRVQPTESIVRFPNITNLCPFGEVFNATRFASVYAWNRKRISNCVADYSVLYNSASFSTFKCYGVSPTKLNDLCFTNVYADSFVIRGDEVRQIAPGQTGKIADYNYKLPDDFTGCVIAWNSNNLDSKVGGNYNYLYRLFRKSNLKPFERDISTEIYQAGSTPCNGVEGFNCYFPLQSYGFQPTNGVGYQPYRVVVLSFELLHAPATVCGPKKSTNLVKNKCVNFNFNGLTGTGVLTESNKKFLPFQQFGRDIADTTDAVRDPQTLEILDITPCSFGGVSVITPGTNTSNQVAVLYQGVNCTEVPVAIHADQLTPTWRVYSTGSNVFQTRAGCLIGAEHVNNSYECDIPIGAGICASYQTQTNSPRRARSVASQSIIAYTMSLGAENSVAYSNNSIAIPTNFTISVTTEILPVSMTKTSVDCTMYICGDSTECSNLLLQYGSFCTQLNRALTGIAVEQDKNTQEVFAQVKQIYKTPPIKDFGGFNFSQILPDPSKPSKRSFIEDLLFNKVTLADAGFIKQYGDCLGDIAARDLICAQKFNGLTVLPPLLTDEMIAQYTSALLAGTITSGWTFGAGAALQIPFAMQMAYRFNGIGVTQNVLYENQKLIANQFNSAIGKIQDSLSSTAPALGKLQDVVNQNAQALNTLVKQLSSNFGAISSVLNDILSRLDPPEAEVQIDRLITGRLQSLQTYVTQQLIRAAEIRASANLAATKMSECVLGQSKRVDFCGKGYHLMSFPQSAPHGVVFLHVTYVPAQEKNFTTAPAICHDGKAHFPREGVFVSNGTHWFVTQRNFYEPQIITTDNTFVSGNCDVVIGIVNNTVYDPLQPELDSFKEELDKYFKNHTSPDVDLGDISGINASVVNIQKEIDRLNEVAKNLNESLIDLQELGKYEQYIKGGGGSDIIKLLNEQVNKEMQSSNLYMSMSSWCYTHSLDGAGLFLFDHAAEEYEHAKKLIIFLNENNVPVQLTSISAPEHKFEGLTQIFQKAYEHEQHISESINNIVDHAIKSKDHATFNFLQWYVAEQHEEEVLFKDILDKIELIGNENHGLYLADQYVKGIAKSRKS

SEQ ID NO: 4723 - protein, 1379 aa, Artificial Sequence
  SARS-CoV-2/Germany/BavPat3/2020__EPI_ISL_414521 spike protein (1-1211)(K986P_V987P) Ferritin construct
MFVFLVLLPLVSSQCVNLTTRTQLPPAYTNSFTRGVYYPDKVFRSSVLHSTQDLFLPFFSNVTWFHAIHVSGTNGTKRFDNPVLPFNDGVYFASTEKSNIIRGWIFGTTLDSKTQSLLIVNNATNVVIKVCEFQFCNDPFLGVYYHKNNKSWMESEFRVYSSANNCTFEYVSQPFLMDLEGKQGNFKNLREFVFKNIDGYFKIYSKHTPINLVRDLPQGFSALEPLVDLPIGINITRFQTLLALHRSYLTPGDSSSGWTAGAAAYYVGYLQPRTFLLKYNENGTITDAVDCALDPLSETKCTLKSFTVEKGIYQTSNFRVQPTESIVRFPNITNLCPFGEVFNATRFASVYAWNRKRISNCVADYSVLYNSASFSTFKCYGVSPTKLNDLCFTNVYADSFVIRGDEVRQIAPGQTGKIADYNYKLPDDFTGCVIAWNSNNLDSKVGGNYNYLYRLFRKSNLKPFERDISTEIYQAGSTPCNGVEGFNCYFPLQSYGFQPTNGVGYQPYRVVVLSFELLHAPATVCGPKKSTNLVKNKCVNFNFNGLTGTGVLTESNKKFLPFQQFGRDIADTTDAVRDPQTLEILDITPCSFGGVSVITPGTNTSNQVAVLYQDVNCTEVPVAIHADQLTPTWRVYSTGSNVFQTRAGCLIGAEHVNNSYECDIPIGAGICASYQTQTNSPRRARSVASQSIIAYTMSLGAENSVAYSNNSIAIPTNFTISVTTEILPVSMTKTSVDCTMYICGDSTECSNLLLQYGSFCTQLNRALTGIAVEQDKNTQQVFAQVKQIYKTPPIKDFGGFNFSQILPDPSKPSKRSFIEDLLFNKVTLADAGFIKQYGDCLGDIAARDLICAQKFNGLTVLPPLLTDEMIAQYTSALLAGTITSGWTFGAGAALQIPFAMQMAYRFNGIGVTQNVLYENQKLIANQFNSAIGKIQDSLSSTASALGKLQDVVNQNAQALNTLVKQLSSNFGAISSVLNDILSRLDPPEAEVQIDRLITGRLQSLQTYVTQQLIRAAEIRASANLAATKMSECVLGQSKRVDFCGKGYHLMSFPQSAPHGVVFLHVTYVPAQEKNFTTAPAICHDGKAHFPREGVFVSNGTHWFVTQRNFYEPQIITTDNTFVSGNCDVVIGIVNNTVYDPLQPELDSFKEELDKYFKNHTSPDVDLGDISGINASVVNIQKEIDRLNEVAKNLNESLIDLQELGKYEQYIKGGGGSDIIKLLNEQVNKEMQSSNLYMSMSSWCYTHSLDGAGLFLFDHAAEEYEHAKKLIIFLNENNVPVQLTSISAPEHKFEGLTQIFQKAYEHEQHISESINNIVDHAIKSKDHATFNFLQWYVAEQHEEEVLFKDILDKIELIGNENHGLYLADQYVKGIAKSRKS

SEQ ID NO: 4724 - protein, 1379 aa, Artificial Sequence
  SARS-CoV-2/France/HF1805/2020__EPI_ISL_414628 spike protein (1-1211)(K986P_V987P) Ferritin construct
MFVFLVLLPLVSSQCVNLTTRTQLPPAYTNSFTRGVYYPDKVFRSSVLHSTQDLFLPFFSNVTWFHAIHVSGTNGTKRFDNPVLPFNDGVYFASTEKSNIIRGWIFGTTLDSKTQSLLIVNNATNVVIKVCEFQFCNDPFLGVYYHKNNKSWMESEFRVYSSANNCTFEYVSQPFLMDLEGKQGNFKNLREFVFKNIDGYFKIYSKHTPINLVRDLPQGFSALEPLVDLPIGINITRFQTLLALHRSYLTPGDSSSGWTAGAAAYYVGYLQPRTFLLKYNENGTITDAVDCALDPLSETKCTLKSFTVEKGIYQTSNFRVQPTESIVRFPNITNLCPFGEVFNATRFASVYAWNRKRISNCVADYSVLYNSASFSTFKCYGVSPTKLNDLCFTNVYADSFVIRGDEVRQIAPGQTGKIADYNYKLPDDFTGCVIAWNSNNLDSKVGGNYNYLYRLFRKSNLKPFERDISTEIYQAGSTPCNGVEGFNCYFPLQSYGFQPTNGVGYQPYRVVVLSFELLHAPATVCGPKKSTNLVKNKCVNFNFNGLTGTGVLTESNKKFLPFQQFGRDIADTTDAVRDPQTLEILDITPCSFGGVSVITPGTNTSNQVAVLYQGVNCTEVPVAIHADQLTPTWRVYSTGSNVFQTRAGCLIGAEHVNNSYECDIPIGAGICASYQTQTNSPRRARSVASQSIIAYTMSLGAENSVAYSNNSIAIPTNFTISVTTEILPVSMTKTSVDCTMYICGDSTECSNLLLQYGSFCTQLNRALTGIAVEQDKNTQEVFAQVKQIYKTPPIKDFGGFNFSQILPDPSKPSKRSFIEDLLFNKVTLADAGFIKQYGDCLGDIAARDLICAQKFNGLTVLPPLLTDEMIAQYTSALLAGTITSGWTFGAGAALQIPFAMQMAYRFNGIGVTQNVLYENQKLIANQFNSAIGKIQDSLSSTASALGKLQDVVNQNAQALNTLVKQLSSNFGAISSVLNDILSRLDPPEAEVQIDRLITGRLQSLQTYVTQQLIRAAEIRASANLAATKMSECVLGQSKRVDFCGKGYHLMSFPQSAPHGVVFLHVTYVPAQEKNFTTAPAICHDGKAHFPREGVFVSNGTHWFVTQRNFYEPQIITTDNTFVSGNCDVVIGVVNNTVYDPLQPELDSFKEELDKYFKNHTSPDVDLGDISGINASVVNIQKEIDRLNEVAKNLNESLIDLQELGKYEQYIKGGGGSDIIKLLNEQVNKEMQSSNLYMSMSSWCYTHSLDGAGLFLFDHAAEEYEHAKKLIIFLNENNVPVQLTSISAPEHKFEGLTQIFQKAYEHEQHISESINNIVDHAIKSKDHATFNFLQWYVAEQHEEEVLFKDILDKIELIGNENHGLYLADQYVKGIAKSRKS

SEQ ID NO: 4725 - protein, 1379 aa, Artificial Sequence
  SARS-CoV-2/Netherlands/ZuidHolland_9/2020__EPI_ISL_414445 spike protein (1-1211)(K986P_V987P) Ferritin construct
MFVFLVLLPLVSSQCVNLTTRTQLPPAYTNSFTRGVYYPDKVFRSSVLHSTQDLFLPFFSNVTWFHAIHVSGTNGTKRFDNPVLPFNDGVYFASTEKSNIIRGWIFGTTLDSKTQSLLIVNNATNVVIKVCEFQFCNDPFLGVYYHKNNKSWMESEFRVYSSANNCTFEYVSQPFLMDLEGKQGNFKNLREFVFKNIDGYFKIYSKHTPINLVRDLPQGFSALEPLVDLPIGINITRFQTLLALHRSYLTPGDSSSGWTAGAAAYYVGYLQPRTFLLKYNENGTITDAVDCALDPLSETKCTLKSFTVEKGIYQTSNFRVQPTESIVRFPNITNLCPFGEVFNATRFASVYAWNRKRISNCVADYSVLYNSASFSTFKCYGVSPTKLNDLCFTNVYADSFVIRGDEVRQIAPGQTGKIADYNYKLPDDFTGCVIAWNSNNLDSKVGGNYNYLYRLFRKSNLKPFERDISTEIYQAGSTPCNGVEGFNCYFPLQSYGFQPTNGVGYQPYRVVVLSFELLHAPATVCGPKKSTNLVKNKCVNFNFNGLTGTGVLTESNKKFLPFQQFGRDIADTTDAVRDPQTLEILDITPCSFGGVSVITPGTNTSNQVAVLYQGVNCTEVPVAIHADQLTPTWRVYSTGSNVFQTRAGCLIGAEHVNNSYECDIPIGAGICASYQTQTNSPRRARSVASQSIIAYTMSLGAENSVAYSNNSIAIPTNFTISVTTEILPVSMTKTSVDCTMYICGDSTECSNLLLQYGSFCTQLNRALTGIAVEQDKNTQEVFAQVKQIYKTPPIKDFGGFNFSQILPDPSKPSKRSFIEDLLFNKVTLADAGFIKQYGDCLGDIAARDLICVQKFNGLTVLPPLLTDEMIAQYTSALLAGTITSGWTFGAGAALQIPFAMQMAYRFNGIGVTQNVLYENQKLIANQFNSAIGKIQDSLSSTASALGKLQDVVNQNAQALNTLVKQLSSNFGAISSVLNDILSRLDPPEAEVQIDRLITGRLQSLQTYVTQQLIRAAEIRASANLAATKMSECVLGQSKRVDFCGKGYHLMSFPQSAPHGVVFLHVTYVPAQEKNFTTAPAICHDGKAHFPREGVFVSNGTHWFVTQRNFYEPQIITTDNTFVSGNCDVVIGIVNNTVYDPLQPELDSFKEELDKYFKNHTSPDVDLGDISGINASVVNIQKEIDRLNEVAKNLNESLIDLQELGKYEQYIKGGGGSDIIKLLNEQVNKEMQSSNLYMSMSSWCYTHSLDGAGLFLFDHAAEEYEHAKKLIIFLNENNVPVQLTSISAPEHKFEGLTQIFQKAYEHEQHISESINNIVDHAIKSKDHATFNFLQWYVAEQHEEEVLFKDILDKIELIGNENHGLYLADQYVKGIAKSRKS

SEQ ID NO: 4726 - protein, 1379 aa, Artificial Sequence
  SARS-CoV-2/Finland/FIN03032020A/2020__EPI_ISL_413602 spike protein (1-1211)(K986P_V987P) Ferritin construct
MFVFLVLLPLVSSQCVNLTTRTQLPPAYTNSFTRGVYYPDKVFRSSVLHSTQDLFLPFFSNVTWFHAIHVSGTNGTKRFDNPVLPFNDGVYFASTEKSNIIRGWIFGTTLDSKTQSLLIVNNATNVVIKVCEFQFCNDPFLGVYYHKNNKSWMESEFRVYSSANNCTFEYVSQPFLMDLEGKQGNFKNLREFVFKNIDGYFKIYSKHTPINLVRDLPQGFSALEPLVDLPIGINITRFQTLLALHRSYLTPGDSSSGWTAGAAAYYVGYLQPRTFLLKYNENGTITDAVDCALDPLSETKCTLKSFTVEKGIYQTSNFRVQPTESIVRFPNITNLCPFGEVFNATRFASVYAWNRKRISNCVADYSVLYNSASFSTFKCYGVSPTKLNDLCFTNVYADSFVIRGDEVRQIAPGQTGKIADYNYKLPDDFTGCVISWNSNNLDSKVGGNYNYLYRLFRKSNLKPFERDISTEIYQAGSTPCNGVEGFNCYFPLQSYGFQPTNGVGYQPYRVVVLSFELLHAPATVCGPKKSTNLVKNKCVNFNFNGLTGTGVLTESNKKFLPFQQFGRDIADTTDAVRDPQTLEILDITPCSFGGVSVITPGTNTSNQVAVLYQGVNCTEVPVAIHADQLTPTWRVYSTGSNVFQTRAGCLIGAEHVNNSYECDIPIGAGICASYQTQTNSPRRARSVASQSIIAYTMSLGAENSVAYSNNSIAIPTNFTISVTTEILPVSMTKTSVDCTMYICGDSTECSNLLLQYGSFCTQLNRALTGIAVEQDKNTQEVFAQVKQIYKTPPIKDFGGFNFSQILPDPSKPSKRSFIEDLLFNKVTLADAGFIKQYGDCLGDIAARDLICAQKFNGLTVLPPLLTDEMIAQYTSALLAGTITSGWTFGAGAALQIPFAMQMAYRFNGIGVTQNVLYENQKLIANQFNSAIGKIQDSLSSTASALGKLQDVVNQNAQALNTLVKQLSSNFGAISSVLNDILSRLDPPEAEVQIDRLITGRLQSLQTYVTQQLIRAAEIRASANLAATKMSECVLGQSKRVDFCGKGYHLMSFPQSAPHGVVFLHVTYVPAQEKNFTTAPAICHDGKAHFPREGVFVSNGTHWFVTQRNFYEPQIITTDNTFVSGNCDVVIGIVNNTVYDPLQPELDSFKEELDKYFKNHTSPDVDLGDISGINASVVNIQKEIDRLNEVAKNLNESLIDLQELGKYEQYIKGGGGSDIIKLLNEQVNKEMQSSNLYMSMSSWCYTHSLDGAGLFLFDHAAEEYEHAKKLIIFLNENNVPVQLTSISAPEHKFEGLTQIFQKAYEHEQHISESINNIVDHAIKSKDHATFNFLQWYVAEQHEEEVLFKDILDKIELIGNENHGLYLADQYVKGIAKSRKS

SEQ ID NO: 4727 - protein, 1379 aa, Artificial Sequence
  SARS-CoV-2/France/GE1977/2020__EPI_ISL_414632 spike protein (1-1211)(K986P_V987P) Ferritin construct
MFVFLVLLPLVSSQCVNLTTRTQLPPAYTNSFTRGVYYPDKVFRSSVLHSTQDLFLPFFSNVTWFHAIHVSGTNGTKRFDNPVLPFNDGVYFASTEKSNIIRGWIFGTTLDSKTQSLLIVNNATNVVIKVCEFQFCNDPFLGVYYHKNNKSWMESEFRVYSSANNCTFEYVSQPFLMDLEGKQGNFKNLREFVFKNIDGYFKIYSKHTPINLVRDLPQGFSALEPLVDLPIGINITRFQTLLALHRSYLTPGDSSSGWTAGAAAYYVGYLQPRTFLLKYNENGTITDAVDCALDPLSETKCTLKSFTVEKGIYQTSNFRVQPTESIVRFPNITNLCPFGEVFNATRFASVYAWNRKRISNCVADYSVLYNSASFSTFKCYGVSPTKLNDLCFTNVYADSFVIRGDEVRQIAPGQTGKIADYNYKLPDDFTGCVIAWNSNNLDSKVGGNYNYLYRLFRKSNLKPFERDISTEIYQAGSTPCNGVEGFNCYFPLQSYGFQPTNGVGYQPYRVVVLSFELLHAPATVCGPKKSTNLVKNKCVNFNFNGLTGTGVLTESNKKFLPFQQFGRDIADTTDAVRDPQTLEILDITPCSFGGVSVITPGTNTSNQVAVLYQGVNCTEVPVAIHADQLTPTWRVYSTGSNVFQTRAGCLIGAEHVNNSYECDIPIGAGICASYQTQTNSPRRARSVASQSIIAYTMSLGAENSVAYSNNSIAIPTNFTISVTTEILPVSMTKTSVDCTMYICGDSTECSNLLLQYGSFCTQLNRALTGIAVEQDKNTQEVFAQVKQIYKTPPIKDFGGFNFSQILPDPSKPSKRSFIEDLLFNKVTLADAGFIKQYGDCLGDIAARDLICAQKFNGLTVLPPLLTDEMIAQYTSALLAGTITSGWTFGAGAALQIPFAMQMAYRFNGIGVTQNVLYENQKLIANQFNSAIGKIQDSLFSTASALGKLQDVVNQNAQALNTLVKQLSSNFGAISSVLNDILSRLDPPEAEVQIDRLITGRLQSLQTYVTQQLIRAAEIRASANLAATKMSECVLGQSKRVDFCGKGYHLMSFPQSAPHGVVFLHVTYVPAQEKNFTTAPAICHDGKAHFPREGVFVSNGTHWFVTQRNFYEPQIITTDNTFVSGNCDVVIGIVNNTVYDPLQPELDSFKEELDKYFKNHTSPDVDLGDISGINASVVNIQKEIDRLNEVAKNLNESLIDLQELGKYEQYIKGGGGSDIIKLLNEQVNKEMQSSNLYMSMSSWCYTHSLDGAGLFLFDHAAEEYEHAKKLIIFLNENNVPVQLTSISAPEHKFEGLTQIFQKAYEHEQHISESINNIVDHAIKSKDHATFNFLQWYVAEQHEEEVLFKDILDKIELIGNENHGLYLADQYVKGIAKSRKS

SEQ ID NO: 4728 - protein, 1379 aa, Artificial Sequence
  SARS-CoV-2/Finland/FIN-313/2020__EPI_ISL_414641 spike protein (1-1211)(K986P_V987P) Ferritin construct
MFVFLVLLPLVSSQCVNLTTRTQLPPAYTNSFTRGVYYPDKVFRSSVLHSTQDLFLPFFSNVTWFHAIHVSGTNGTKRFDNPVLPFNDGVYFASTEKSNIIRGWIFGTTLDSKTQSLLIVNNATNVVIKVCEFQFCNDPFLGVYYHKNNKSWMESEFRVYSSANNCTFEYVSQPFLMDLEGKQGNFKNLREFVFKNIDGYFKIYSKHTPINLVRDLPQGFSALEPLVDLPIGINITRFKTLLALHRSYLTPGDSSSGWTAGAAAYYVGYLQPRTFLLKYNENGTITDAVDCALDPLSETKCTLKSFTVEKGIYQTSNFRVQPTESIVRFPNITNLCPFGEVFNATRFASVYAWNRKRISNCVADYSVLYNSASFSTFKCYGVSPTKLNDLCFTNVYADSFVIRGDEVRQIAPGQTGKIADYNYKLPDDFTGCVIAWNSNNLDSKVGGNYNYLYRLFRKSNLKPFERDISTEIYQAGSTPCNGVEGFNCYFPLQSYGFQPTNGVGYQPYRVVVLSFELLHAPATVCGPKKSTNLVKNKCVNFNFNGLTGTGVLTESNKKFLPFQQFGRDIADTTDAVRDPQTLEILDITPCSFGGVSVITPGTNTSNQVAVLYQGVNCTEVPVAIHADQLTPTWRVYSTGSNVFQTRAGCLIGAEHVNNSYECDIPIGAGICASYQTQTNSPRRARSVASQSIIAYTMSLGAENSVAYSNNSIAIPTNFTISVTTEILPVSMTKTSVDCTMYICGDSTECSNLLLQYGSFCTQLNRALTGIAVEQDKNTQEVFAQVKQIYKTPPIKDFGGFNFSQILPDPSKPSKRSFIEDLLFNKVTLADAGFIKQYGDCLGDIAARDLICAQKFNGLTVLPPLLTDEMIAQYTSALLAGTITSGWTFGAGAALQIPFAMQMAYRFNGIGVTQNVLYENQKLIANQFNSAIGKIQDSLSSTASALGKLQDVVNQNAQALNTLVKQLSSNFGAISSVLNDILSRLDPPEAEVQIDRLITGRLQSLQTYVTQQLIRAAEIRASANLAATKMSECVLGQSKRVDFCGKGYHLMSFPQSAPHGVVFLHVTYVPAQEKNFTTAPAICHDGKAHFPREGVFVSNGTHWFVTQRNFYEPQIITTDNTFVSGNCDVVIGIVNNTVYDPLQPELDSFKEELDKYFKNHTSPDVDLGDISGINASVVNIQKEIDRLNEVAKNLNESLIDLQELGKYEQYIKGGGGSDIIKLLNEQVNKEMQSSNLYMSMSSWCYTHSLDGAGLFLFDHAAEEYEHAKKLIIFLNENNVPVQLTSISAPEHKFEGLTQIFQKAYEHEQHISESINNIVDHAIKSKDHATFNFLQWYVAEQHEEEVLFKDILDKIELIGNENHGLYLADQYVKGIAKSRKS

SEQ ID NO: 4729 - protein, 1379 aa, Artificial Sequence
  SARS-CoV-2/Netherlands/ZuidHolland_2/2020__EPI_ISL_414556 spike protein (1-1211)(K986P_V987P) Ferritin construct
MFVFLVLLPLVSSQCVNLTTRTQLPPAYTNSFTRGVYYPDKVFRSSVLHSTQDLFLPFFSNVTWFHAIHVSGTNGTKRFDNPVLPFNDGVYFASTEKSNIIRGWIFGTTLDSKTQSLLIVNNATNVVIKVCEFQFCNDPFLGVYYHKNNKSWMESEFRVYSSANNCTFEYVSQPFLMDLEGKQGNFKNLREFVFKNIDGYFKIYSKHTPINLVRDLPQGFSALEPLVDLPIGINITRFQTLLALHRSYLTPGDSSSGWTAGAAAYYVGYLQPRTFLLKYNENGTITDAVDCALDPLSETKCTLKSFTVEKGIYQTSNFRVQPTESIVRFPNITNLCPFGEVFNATRFASVYAWNRKRISNCVADYSVLYNSASFSTFKCYGVSPTKLNDLCFTNVYADSFVIRGDEVRQIAPGQTGKIADYNYKLPDDFTGCVIAWNSNNLDSKVGGNYNYLYRLFRKSNLKPFERDISTEIYQAGSTPCNGVEGFNCYFPLQSYGFQPTNGVGYQPYRVVVLSFELLHAPATVCGPKKSTNLVKNKCVNFNFNGLTGTGVLTESNKKFLPFQQFGRDIADTTDAVRDPQTLEILDITPCSFGGVSVITPGTNTSNQVAVLYQGVNCTEVPVAIHADQLTPTWRVYSTGSNVFQTRAGCLIGAEHVNNSYECDIPIGAGICASYQTQTNSPRRARSVASQSIIAYTMSLGAENSVAYSNNSIAIPTNFTISVTTEILPVSMTKTSVDCTMYICGDSTECSNLLLQYGSFCTQLNRALTGIALEQDKNTQEVFAQVKQIYKTPPIKDFGGFNFSQILPDPSKPSKRSFIEDLLFNKVTLADAGFIKQYGDCLGDIAARDLICAQKFNGLTVLPPLLTDEMIAQYTSALLAGTITSGWTFGAGAALQIPFAMQMAYRFNGIGVTQNVLYENQKLIANQFNSAIGKIQDSLSSTASALGKLQDVVNQNAQALNTLVKQLSSNFGAISSVLNDILSRLDPPEAEVQIDRLITGRLQSLQTYVTQQLIRAAEIRASANLAATKMSECVLGQSKRVDFCGKGYHLMSFPQSAPHGVVFLHVTYVPAQEKNFTTAPAICHDGKAHFPREGVFVSNGTHWFVTQRNFYEPQIITTDNTFVSGNCDVVIGIVNNTVYDPLQPELDSFKEELDKYFKNHTSPDVDLGDISGINASVVNIQKEIDRLNEVAKNLNESLIDLQELGKYEQYIKGGGGSDIIKLLNEQVNKEMQSSNLYMSMSSWCYTHSLDGAGLFLFDHAAEEYEHAKKLIIFLNENNVPVQLTSISAPEHKFEGLTQIFQKAYEHEQHISESINNIVDHAIKSKDHATFNFLQWYVAEQHEEEVLFKDILDKIELIGNENHGLYLADQYVKGIAKSRKS

SEQ ID NO: 4730 - protein, 1379 aa, Artificial Sequence
  SARS-CoV-2/USA/WA-UW31/2020__EPI_ISL_414618 spike protein (1-1211)(K986P_V987P) Ferritin construct
MFVFLVLLPLVSSQCVNLTTRTQLPPAYTNSFTRGVYYPDKVFRSSVLHSTQDLFLPFFSNVTWFHAIHVSGTNGTKRFDNPVLPFNDGVYFASTEKSNIIRGWIFGTTLDSKTQSLLIVNNATNVVIKVCEFQFCNDPFLGVYYHKNNKSWMESEFRVYSSANNCTFEYVSQPFLMDLEGKQGNFKNLREFVFKNIDGYFKIYSKHTPINLVRDLPQGFSALEPLVDLPIGINITRFQTLLALHRSYLTPGDSSSGWTAGAAAYYVGYLQPRTFLLKYNENGTITDAVDCALDPLSETKCTLKSFTVEKGIYQTSNFRVQPTESIVRFPNITNLCPFGEVFNATRFASVYAWNRKRISNCVADYSVLYNSASFSTFKCYGVSPTKLNDLCFTNVYADSFVIRGDEVRQIAPGQTGKIADYNYKLPDDFTGCVIAWNSNNLDSKVGGNYNYLYRLFRKSNLKPFERDISTEIYQAGSTPCNGAEGFNCYFPLQSYGFQPTNGVGYQPYRVVVLSFELLHAPATVCGPKKSTNLVKNKCVNFNFNGLTGTGVLTESNKKFLPFQQFGRDIADTTDAVRDPQTLEILDITPCSFGGVSVITPGTNTSNQVAVLYQDVNCTEVPVAIHADQLTPTWRVYSTGSNVFQTRAGCLIGAEHVNNSYECDIPIGAGICASYQTQTNSPRRARSVASQSIIAYTMSLGAENSVAYSNNSIAIPTNFTISVTTEILPVSMTKTSVDCTMYICGDSTECSNLLLQYGSFCTQLNRALTGIAVEQDKNTQEVFAQVKQIYKTPPIKDFGGFNFSQILPDPSKPSKRSFIEDLLFNKVTLADAGFIKQYGDCLGDIAARDLICAQKFNGLTVLPPLLTDEMIAQYTSALLAGTITSGWTFGAGAALQIPFAMQMAYRFNGIGVTQNVLYENQKLIANQFNSAIGKIQDSLSSTASALGKLQDVVNQNAQALNTLVKQLSSNFGAISSVLNDILSRLDPPEAEVQIDRLITGRLQSLQTYVTQQLIRAAEIRASANLAATKMSECVLGQSKRVDFCGKGYHLMSFPQSAPHGVVFLHVTYVPAQEKNFTTAPAICHDGKAHFPREGVFVSNGTHWFVTQRNFYEPQIITTDNTFVSGNCDVVIGIVNNTVYDPLQPELDSFKEELDKYFKNHTSPDVDLGDISGINASVVNIQKEIDRLNEVAKNLNESLIDLQELGKYEQYIKGGGGSDIIKLLNEQVNKEMQSSNLYMSMSSWCYTHSLDGAGLFLFDHAAEEYEHAKKLIIFLNENNVPVQLTSISAPEHKFEGLTQIFQKAYEHEQHISESINNIVDHAIKSKDHATFNFLQWYVAEQHEEEVLFKDILDKIELIGNENHGLYLADQYVKGIAKSRKS

SEQ ID NO: 4731 - protein, 1379 aa, Artificial Sequence
  SARS-CoV-2/South Korea/SNU01/2020__EPI_ISL_411929 spike protein (1-1211)(K986P_V987P) Ferritin construct
MFVFLVLLPLVSSQCVNLTTRTQLPPAYTNSFTRGVYYPDKVFRSSVLHSTQDLFLPFFSNVTWFHAIHVSGTNGTKRFDNPVLPFNDGVYFASTEKSNIIRGWIFGTTLDSKTQSLLIVNNATNVVIKVCEFQFCNDPFLGVYYHKNNKSWMESEFRVYSSANNCTFEYVSQPFLMDLEGKQGNFKNLREFVFKNIDGYFKIYSKHTPINLVRDLPQGFWALEPLVDLPIGINITRFQTLLALHRSYLTPGDSSSGWTAGAAAYYVGYLQPRTFLLKYNENGTITDAVDCALDPLSETKCTLKSFTVEKGIYQTSNFRVQPTESIVRFPNITNLCPFGEVFNATRFASVYAWNRKRISNCVADYSVLYNSASFSTFKCYGVSPTKLNDLCFTNVYADSFVIRGDEVRQIAPGQTGKIADYNYKLPDDFTGCVIAWNSNNLDSKVGGNYNYLYRLFRKSNLKPFERDISTEIYQAGSTPCNGVEGFNCYFPLQSYGFQPTNGVGYQPYRVVVLSFELLHAPATVCGPKKSTNLVKNKCVNFNFNGLTGTGVLTESNKKFLPFQQFGRDIADTTDAVRDPQTLEILDITPCSFGGVSVITPGTNTSNQVAVLYQDVNCTEVPVAIHADQLTPTWRVYSTGSNVFQTRAGCLIGAEHVNNSYECDIPIGAGICASYQTQTNSPRRARSVASQSIIAYTMSLGAENSVAYSNNSIAIPTNFTISVTTEILPVSMTKTSVDCTMYICGDSTECSNLLLQYGSFCTQLNRALTGIAVEQDKNTQEVFAQVKQIYKTPPIKDFGGFNFSQILPDPSKPSKRSFIEDLLFNKVTLADAGFIKQYGDCLGDIAARDLICAQKFNGLTVLPPLLTDEMIAQYTSALLAGTITSGWTFGAGAALQIPFAMQMAYRFNGIGVTQNVLYENQKLIANQFNSAIGKIQDSLSSTASALGKLQDVVNQNAQALNTLVKQLSSNFGAISSVLNDILSRLDPPEAEVQIDRLITGRLQSLQTYVTQQLIRAAEIRASANLAATKMSECVLGQSKRVDFCGKGYHLMSFPQSAPHGVVFLHVTYVPAQEKNFTTAPAICHDGKAHFPREGVFVSNGTHWFVTQRNFYEPQIITTDNTFVSGNCDVVIGIVNNTVYDPLQPELDSFKEELDKYFKNHTSPDVDLGDISGINASVVNIQKEIDRLNEVAKNLNESLIDLQELGKYEQYIKGGGGSDIIKLLNEQVNKEMQSSNLYMSMSSWCYTHSLDGAGLFLFDHAAEEYEHAKKLIIFLNENNVPVQLTSISAPEHKFEGLTQIFQKAYEHEQHISESINNIVDHAIKSKDHATFNFLQWYVAEQHEEEVLFKDILDKIELIGNENHGLYLADQYVKGIAKSRKS

SEQ ID NO: 4732 - protein, 1379 aa, Artificial Sequence
  SARS-CoV-2/China/WF0004/2020__EPI_ISL_413694 spike protein (1-1211)(K986P_V987P) Ferritin construct
MFVFLVLLPLVSSQCVNLTTRTQLPPAYTNSFTRGVYYPDKVFRSSVLHSTQDLFLPFFSNVTWFHAIHVSGTNGTKRFDNPVLPFNDGVYFASTEKSNIIRGWIFGTTLDSKTQSLLIVNNATNVVIKVCEFQFCNDPFLGVYYHKNNKSWTESEFRVYSSANNCTFEYVSQPFLMDLEGKQGNFKNLREFVFKNIDGYFKIYSKHTPINLVRDLPQGFSALEPLVDLPIGINITRFQTLLALHRSYLTPGDSSSGWTAGAAAYYVGYLQPRTFLLKYNENGTITDAVDCALDPLSETKCTLKSFTVEKGIYQTSNFRVQPTESIVRFPNITNLCPFGEVFNATRFASVYAWNRKRISNCVADYSVLYNSASFSTFKCYGVSPTKLNDLCFTNVYADSFVIRGDEVRQIAPGQTGKIADYNYKLPDDFTGCVIAWNSNNLDSKVGGNYNYLYRLFRKSNLKPFERDISTEIYQAGSTPCNGVEGFNCYFPLQSYGFQPTNGVGYQPYRVVVLSFELLHAPATVCGPKKSTNLVKNKCVNFNFNGLTGTGVLTESNKKFLPFQQFGRDIADTTDAVRDPQTLEILDITPCSFGGVSVITPGTNTSNQVAVLYQDVNCTEVPVAIHADQLTPTWRVYSTGSNVFQTRAGCLIGAEHVNNSYECDIPIGAGICASYQTQTNSPRRARSVASQSIIAYTMSLGAENSVAYSNNSIAIPTNFTISVTTEILPVSMTKTSVDCTMYICGDSTECSNLLLQYGSFCTQLNRALTGIAVEQDKNTQEVFAQVKQIYKTPPIKDFGGFNFSQILPDPSKPSKRSFIEDLLFNKVTLADAGFIKQYGDCLGDIAARDLICAQKFNGLTVLPPLLTDEMIAQYTSALLAGTITSGWTFGAGAALQIPFAMQMAYRFNGIGVTQNVLYENQKLIANQFNSAIGKIQDSLSSTASALGKLQDVVNQNAQALNTLVKQLSSNFGAISSVLNDILSRLDPPEAEVQIDRLITGRLQSLQTYVTQQLIRAAEIRASANLAATKMSECVLGQSKRFDFCGKGYHLMSFPQSAPHGVVFLHVTYVPAQEKNFTTAPAICHDGKAHFPREGVFVSNGTHWFVTQRNFYEPQIITTDNTFVSGNCDVVIGIVNNTVYDPLQPELDSFKEELDKYFKNHTSPDVDLGDISGINASVVNIQKEIDRLNEVAKNLNESLIDLQELGKYEQYIKGGGGSDIIKLLNEQVNKEMQSSNLYMSMSSWCYTHSLDGAGLFLFDHAAEEYEHAKKLIIFLNENNVPVQLTSISAPEHKFEGLTQIFQKAYEHEQHISESINNIVDHAIKSKDHATFNFLQWYVAEQHEEEVLFKDILDKIELIGNENHGLYLADQYVKGIAKSRKS

SEQ ID NO: 4733 - protein, 1379 aa, Artificial Sequence
  SARS-CoV-2/China/WF0028/2020__EPI_ISL_413791 spike protein (1-1211)(K986P_V987P) Ferritin construct
MFVFLVLLPLVSSQCVNLTTRTQLPPAYTNSFTRGVYYPDKVFRSSVLHSTQDLFLPFFSNVTWFHAIHVSGTNGTKRFDNPVLPFNDGVYFASTEKSNIIRGWIFGTTLDSKTQSLLIVNNATNVVIKVCEFQFCNDPFLGVYYHKNNKSWMESEFRVYSSANNCTFEYVSQPFLMDLEGKQGNFKNLREFVFKNIDGYFKIYSKHTPINLVRDLPQGFSALEPLVDLPIGINITRFQTLLALHRSYLTPGDSSSGWTAGAAAYYVGYLQPRTFLLKYNENGTITDAVDCALDPLSETKCTLKSFTVEKGIYQTSNFRVQPTESIVRFPNITNLCPFGEVFNATRFASVYAWNRKRISNCVADYSVLYNSASFSTFKCYGVSPTKLNDLCFTNVYADSFVIRGDEVRQIAPGQTGKIADYNYKLPDDFTGCVIAWNSNNLDSKVGGNYNYLYRLFRKSNLKPFERDISTEIYQAGSTPCNGVEGFNCYFPLQSYGFQPTNGVGYQPYRVVVLSFELLHAPATVCGPKKSTNLVKNKCVNFNFNGLTGTGVLTESNKKFLPFQQFGRDIADTTDAVRDPQTLEILDITPCSFGGVSVITPGTNTSNQVAVLYQDVNCTEVPVAIHADQLTPTWRVYSTGSNVFQTRAGCLIGAEHVNNSYECDIPIGAGICASYQTQTNSPRRARSVASQSIIAYTMSLGAENSVAYSNNSIAIPTNFTISVTTEILPVSMTKTSVDCTMYICGDSTECSNLLLQYGSFCTQLNRALTGIAVEQDKNTQEVFAQVKQIYKTPPIKDFGGFNFSQILPDPSKPSKRSFIEDLLFNKVTLADAGFIKQYGDCLGDIAARDLICAQKFNGLTVLPPLLTDEMIAQYTSALLAGTITSGWTFGAGAALQIPFAMQMAYRFNGIGVTQNVLYENQKLIANQFNSAIGKIQDSLSSTASALGKLQDVVNQNAQALNTLVKQLSSNFGAISSVLNDILSRLDPPEAEVQIDRLITGRLQSLQTYVTQQLIRAAEIRASANLAATKMSECVLGQSKRVDFCGKGYHLMSFPQSAPHGVVFLHVTYVPAQEKNFTTAPAICHDGKAHFPREGVFVSNGTHWFVTQRNFYEPQIITTDNTFVSGNCDVVIGIVNNTVYDPLQPELESFKEELDKYFKNHTSPDVDLGDISGINASVVNIQKEIDRLNEVAKNLNESLIDLQELGKYEQYIKGGGGSDIIKLLNEQVNKEMQSSNLYMSMSSWCYTHSLDGAGLFLFDHAAEEYEHAKKLIIFLNENNVPVQLTSISAPEHKFEGLTQIFQKAYEHEQHISESINNIVDHAIKSKDHATFNFLQWYVAEQHEEEVLFKDILDKIELIGNENHGLYLADQYVKGIAKSRKS

SEQ ID NO: 4734 - protein, 1379 aa, Artificial Sequence
  SARS-CoV-2/2019-nCoV/USA-CruiseA-18/2020__MT159716.1 spike protein (1-1211)(K986P_V987P) Ferritin construct
MFVFLVLLPLVSSQCVNLTTRTQLPPAYTNSFTRGVYYPDKVFRSSVLHSTQDLFLPFFSNVTWFHAIHVSGTNGTKRFDNPVLPFNDGVYFASTEKSNIIRGWIFGTTLDSKTQSLLIVNNATNVVIKVCEFQFCNDPFLGVYYHKNNKSWMESELRVYSSANNCTFEYVSQPFLMDLEGKQGNFKNLREFVFKNIDGYFKIYSKHTPINLVRDLPQGFSALEPLVDLPIGINITRFQTLLALHRSYLTPGDSSSGWTAGAAAYYVGYLQPRTFLLKYNENGTITDAVDCALDPLSETKCTLKSFTVEKGIYQTSNFRVQPTESIVRFPNITNLCPFGEVFNATRFASVYAWNRKRISNCVADYSVLYNSASFSTFKCYGVSPTKLNDLCFTNVYADSFVIRGDEVRQIAPGQTGKIADYNYKLPDDFTGCVIAWNSNNLDSKVGGNYNYLYRLFRKSNLKPFERDISTEIYQAGSTPCNGVEGFNCYFPLQSYGFQPTNGVGYQPYRVVVLSFELLHAPATVCGPKKSTNLVKNKCVNFNFNGLTGTGVLTESNKKFLPFQQFGRDIADTTDAVRDPQTLEILDITPCSFGGVSVITPGTNTSNQVAVLYQDVNCTEVPVAIHADQLTPTWRVYSTGSNVFQTRAGCLIGAEHVNNSYECDIPIGAGICASYQTQTNSPRRARSVASQSIIAYTMSLGAENSVAYSNNSIAIPTNFTISVTTEILPVSMTKTSVDCTMYICGDSTECSNLLLQYGSFCTQLNRALTGIAVEQDKNTQEVFAQVKQIYKTPPIKDFGGFNFSQILPDPSKPSKRSFIEDLLFNKVTLADAGFIKQYGDCLGDIAARDLICAQKFNGLTVLPPLLTDEMIAQYTSALLAGTITSGWTFGAGAALQIPFAMQMAYRFNGIGVTQNVLYENQKLIANQFNSAIGKIQDSLSSTASALGKLQDVVNQNAQALNTLVKQLSSNFGAISSVLNDILSRLDPPEAEVQIDRLITGRLQSLQTYVTQQLIRAAEIRASANLAATKMSECVLGQSKRVDFCGKGYHLMSFPQSAPHGVVFLHVTYVPAQEKNFTTAPAICHDGKAHFPREGVFVSNGTHWFVTQRNFYEPQIITTDNTFVSGNCDVVIGIVNNTVYDPLQPELDSFKEELDKYFKNHTSPDVDLGDISGINASVVNIQKEIDRLNEVAKNLNESLIDLQELGKYEQYIKGGGGSDIIKLLNEQVNKEMQSSNLYMSMSSWCYTHSLDGAGLFLFDHAAEEYEHAKKLIIFLNENNVPVQLTSISAPEHKFEGLTQIFQKAYEHEQHISESINNIVDHAIKSKDHATFNFLQWYVAEQHEEEVLFKDILDKIELIGNENHGLYLADQYVKGIAKSRKS

SEQ ID NO: 4735 - protein, 1379 aa, Artificial Sequence
  SARS-CoV-2/SARS-CoV-2/Yunnan-01/human/2020/CHN__MT049951.1 spike protein (1-1211)(K986P_V987P) Ferritin construct
MFVFLVLLPLVSSQCVNLTTRTQLPPANTNSFTRGVYYPDKVFRSSVLHSTQDLFLPFFSNVTWFHAIHVSGTNGTKRFDNPVLPFNDGVYFASTEKSNIIRGWIFGTTLDSKTQSLLIVNNATNVVIKVCEFQFCNDPFLGVYYHKNNKSWMESEFRVYSSANNCTFEYVSQPFLMDLEGKQGNFKNLREFVFKNIDGYFKIYSKHTPINLVRDLPQGFSALEPLVDLPIGINITRFQTLLALHRSYLTPGDSSSGWTAGAAAYYVGYLQPRTFLLKYNENGTITDAVDCALDPLSETKCTLKSFTVEKGIYQTSNFRVQPTESIVRFPNITNLCPFGEVFNATRFASVYAWNRKRISNCVADYSVLYNSASFSTFKCYGVSPTKLNDLCFTNVYADSFVIRGDEVRQIAPGQTGKIADYNYKLPDDFTGCVIAWNSNNLDSKVGGNYNYLYRLFRKSNLKPFERDISTEIYQAGSTPCNGVEGFNCYFPLQSYGFQPTNGVGYQPYRVVVLSFELLHAPATVCGPKKSTNLVKNKCVNFNFNGLTGTGVLTESNKKFLPFQQFGRDIADTTDAVRDPQTLEILDITPCSFGGVSVITPGTNTSNQVAVLYQDVNCTEVPVAIHADQLTPTWRVYSTGSNVFQTRAGCLIGAEHVNNSYECDIPIGAGICASYQTQTNSPRRARSVASQSIIAYTMSLGAENSVAYSNNSIAIPTNFTISVTTEILPVSMTKTSVDCTMYICGDSTECSNLLLQYGSFCTQLNRALTGIAVEQDKNTQEVFAQVKQIYKTPPIKDFGGFNFSQILPDPSKPSKRSFIEDLLFNKVTLADAGFIKQYGDCLGDIAARDLICAQKFNGLTVLPPLLTDEMIAQYTSALLAGTITSGWTFGAGAALQIPFAMQMAYRFNGIGVTQNVLYENQKLIANQFNSAIGKIQDSLSSTASALGKLQDVVNQNAQALNTLVKQLSSNFGAISSVLNDILSRLDPPEAEVQIDRLITGRLQSLQTYVTQQLIRAAEIRASANLAATKMSECVLGQSKRVDFCGKGYHLMSFPQSAPHGVVFLHVTYVPAQEKNFTTAPAICHDGKAHFPREGVFVSNGTHWFVTQRNFYEPQIITTDNTFVSGNCDVVIGIVNNTVYDPLQPELDSFKEELDKYFKNHTSPDVDLGDISGINASVVNIQKEIDRLNEVAKNLNESLIDLQELGKYEQYIKGGGGSDIIKLLNEQVNKEMQSSNLYMSMSSWCYTHSLDGAGLFLFDHAAEEYEHAKKLIIFLNENNVPVQLTSISAPEHKFEGLTQIFQKAYEHEQHISESINNIVDHAIKSKDHATFNFLQWYVAEQHEEEVLFKDILDKIELIGNENHGLYLADQYVKGIAKSRKS

SEQ ID NO: 4736 - protein, 1379 aa, Artificial Sequence
  SARS-CoV-2/USA/WA-UW292/2020__EPI_ISL_418077 spike protein (1-1211)(K986P_V987P) Ferritin construct
MFVFLVLLPLVSSQCVNLTTRTQLPPAYTNSFTRGVYYPDKVFRSSVLHSTQDLFLPFFSNVTWFHAIHVSGTNGTKRFDNPVLPFNDGVYFASTEKSNIIRGWIFGTTLDSKTQSLLIVNNATNVVIKVCEFQFCNDPFLGVYYHKNNKSWMESEFRVYSSANNCTFEYVSQPFLMDLEGKQGNFKNLREFVFKNIDGYFKIYSKHTPINLVRDLPQGFSALEPLVDLPIGINITRFQTLLALHRSYLTPGDSSSGWTAGAAAYYVGYLQPRTFLLKYNENGTITDAVDCALDPLSETKCTLKSFTVEKGIYQTSNFRVQPTESIVRFPNITNLCPFGEVFNATRFASVYAWNRKRISNCVADYSVLYNSASFSTFKCYGVSPTKLNDLCFTNVYADSFVIRGDEVRQIAPGQTGKIADYNYKLPDDFTGCVIAWNSNNLDSKVGGNYNYLYRLFRKSNLKPFERDISTEIYQASSTPCNGVEGFNCYFPLQSYGFQPTNGVGYQPYRVVVLSFELLHAPATVCGPKKSTNLVKNKCVNFNFNGLTGTGVLTESNKKFLPFQQFGRDIADTTDAVRDPQTLEILDITPCSFGGVSVITPGTNTSNQVAVLYQDVNCTEVPVAIHADQLTPTWRVYSTGSNVFQTRAGCLIGAEHVNNSYECDIPIGAGICASYQTQTNSPRRARSVASQSIIAYTMSLGAENSVAYSNNSIAIPTNFTISVTTEILPVSMTKTSVDCTMYICGDSTECSNLLLQYGSFCTQLNRALTGIAVEQDKNTQEVFAQVKQIYKTPPIKDFGGFNFSQILPDPSKPSKRSFIEDLLFNKVTLADAGFIKQYGDCLGDIAARDLICAQKFNGLTVLPPLLTDEMIAQYTSALLAGTITSGWTFGAGAALQIPFAMQMAYRFNGIGVTQNVLYENQKLIANQFNSAIGKIQDSLSSTASALGKLQDVVNQNAQALNTLVKQLSSNFGAISSVLNDILSRLDPPEAEVQIDRLITGRLQSLQTYVTQQLIRAAEIRASANLAATKMSECVLGQSKRVDFCGKGYHLMSFPQSAPHGVVFLHVTYVPAQEKNFTTAPAICHDGKAHFPREGVFVSNGTHWFVTQRNFYEPQIITTDNTFVSGNCDVVIGIVNNTVYDPLQPELDSFKEELDKYFKNHTSPDVDLGDISGINASVVNIQKEIDRLNEVAKNLNESLIDLQELGKYEQYIKGGGGSDIIKLLNEQVNKEMQSSNLYMSMSSWCYTHSLDGAGLFLFDHAAEEYEHAKKLIIFLNENNVPVQLTSISAPEHKFEGLTQIFQKAYEHEQHISESINNIVDHAIKSKDHATFNFLQWYVAEQHEEEVLFKDILDKIELIGNENHGLYLADQYVKGIAKSRKS

SEQ ID NO: 4737 - protein, 1379 aa, Artificial Sequence
  SARS-CoV-2/Iceland/192/2020__EPI_ISL_417819 spike protein (1-1211)(K986P_V987P) Ferritin construct
MFVFFVLLPLVSSQCVNLTTRTQLPPAYTNSFTRGVYYPDKVFRSSVLHSTQDLFLPFFSNVTWFHAIHVSGTNGTKRFDNPVLPFNDGVYFASTEKSNIIRGWIFGTTLDSKTQSLLIVNNATNVVIKVCEFQFCNDPFLGVYYHKNNKSWMESEFRVYSSANNCTFEYVSQPFLMDLEGKQGNFKNLREFVFKNIDGYFKIYSKHTPINLVRDLPQGFSALEPLVDLPIGINITRFQTLLALHRSYLTPGDSSSGWTAGAAAYYVGYLQPRTFLLKYNENGTITDAVDCALDPLSETKCTLKSFTVEKGIYQTSNFRVQPTESIVRFPNITNLCPFGEVFNATRFASVYAWNRKRISNCVADYSVLYNSASFSTFKCYGVSPTKLNDLCFTNVYADSFVIRGDEVRQIAPGQTGKIADYNYKLPDDFTGCVIAWNSNNLDSKVGGNYNYLYRLFRKSNLKPFERDISTEIYQAGSTPCNGVEGFNCYFPLQSYGFQPTNGVGYQPYRVVVLSFELLHAPATVCGPKKSTNLVKNKCVNFNFNGLTGTGVLTESNKKFLPFQQFGRDIADTTDAVRDPQTLEILDITPCSFGGVSVITPGTNTSNQVAVLYQGVNCTEVPVAIHADQLTPTWRVYSTGSNVFQTRAGCLIGAEHVNNSYECDIPIGAGICASYQTQTNSPRRARSVASQSIIAYTMSLGAENSVAYSNNSIAIPTNFTISVTTEILPVSMTKTSVDCTMYICGDSTECSNLLLQYGSFCTQLNRALTGIAVEQDKNTQEVFAQVKQIYKTPPIKDFGGFNFSQILPDPSKPSKRSFIEDLLFNKVTLADAGFIKQYGDCLGDIAARDLICAQKFNGLTVLPPLLTDEMIAQYTSALLAGTITSGWTFGAGAALQIPFAMQMAYRFNGIGVTQNVLYENQKLIANQFNSAIGKIQDSLSSTASALGKLQDVVNQNAQALNTLVKQLSSNFGAISSVLNDILSRLDPPEAEVQIDRLITGRLQSLQTYVTQQLIRAAEIRASANLAATKMSECVLGQSKRVDFCGKGYHLMSFPQSAPHGVVFLHVTYVPAQEKNFTTAPAICHDGKAHFPREGVFVSNGTHWFVTQRNFYEPQIITTDNTFVSGNCDVVIGIVNNTVYDPLQPELDSFKEELDKYFKNHTSPDVDLGDISGINASVVNIQKEIDRLNEVAKNLNESLIDLQELGKYEQYIKGGGGSDIIKLLNEQVNKEMQSSNLYMSMSSWCYTHSLDGAGLFLFDHAAEEYEHAKKLIIFLNENNVPVQLTSISAPEHKFEGLTQIFQKAYEHEQHISESINNIVDHAIKSKDHATFNFLQWYVAEQHEEEVLFKDILDKIELIGNENHGLYLADQYVKGIAKSRKS

SEQ ID NO: 4738 - protein, 1379 aa, Artificial Sequence
  SARS-CoV-2/Belgium/ULG-6939/2020__EPI_ISL_417020 spike protein (1-1211)(K986P_V987P) Ferritin construct
MFVFLVLLPLVSSQCVNLTTRTQLPPAYTNSFTRGVYYPDKVFRSSVLHSTQDLFLPFFSNVTWFHAIHVSGTNGTKRFDNPVLPFNDGVYFASTEKSNIIRGWIFGTTLDSKTQSLLIVNNATNVVIKVCEFQFCNDPFLGVYYHKNNKSWMESEFRVYSSANNCTFEYVSQPFLMDLEGKQGNFKNLREFVFKNIDGYFKIYSKHTPINLVRDLPQGFSALEPLVDLPIGINITRFQTLLALHRSYLTPGDSSSGWTAGAAAYYVGYLQPRTFLLKYNENGTITDAVDCALDPLSETKCTLKSFTVEKGIYQTSNFRVQPTESIVRFPNITNLCPFGEVFNATRFASVYAWNRKRISNCVADYSVLYNSASFSTFKCYGVSPTKLNDLCFTNVYADSFVIRGDEVRQIAPGQTGKIADYNYKLPDDFTGCVIAWNSNNLDSKVGGNYNYLYRLFRKSNLKPFERDISTEIYQAGSTPCNGVEGFNCYFPLQSYGFQPTNGVGYQPYRVVVLSFELLHAPATVCGPKKSTNLVKNKCVNFNFNGLTGTGVLTESNKKFLPFQQFGRDIADTTDAVRDPQTLEILDITPCSFGGVSVITPGTNTSNQVAVLYQGVNCTEVPVAIHADQLTPTWRVYSTGSNVFQTRAGCLIGAEHVNNSYECDIPIGAGICASYQTQTNSPRRARSVASQSIIAYTMSLGAENSVVYSNNSIAIPTNFTISVTTEILPVSMTKTSVDCTMYICGDSTECSNLLLQYGSFCTQLNRALTGIAVEQDKNTQEVFAQVKQIYKTPPIKDFGGFNFSQILPDPSKPSKRSFIEDLLFNKVTLADAGFIKQYGDCLGDIAARDLICAQKFNGLTVLPPLLTDEMIAQYTSALLAGTITSGWTFGAGAALQIPFAMQMAYRFNGIGVTQNVLYENQKLIANQFNSAIGKIQDSLSSTASALGKLQDVVNQNAQALNTLVKQLSSNFGAISSVLNDILSRLDPPEAEVQIDRLITGRLQSLQTYVTQQLIRAAEIRASANLAATKMSECVLGQSKRVDFCGKGYHLMSFPQSAPHGVVFLHVTYVPAQEKNFTTAPAICHDGKAHFPREGVFVSNGTHWFVTQRNFYEPQIITTDNTFVSGNCDVVIGIVNNTVYDPLQPELDSFKEELDKYFKNHTSPDVDLGDISGINASVVNIQKEIDRLNEVAKNLNESLIDLQELGKYEQYIKGGGGSDIIKLLNEQVNKEMQSSNLYMSMSSWCYTHSLDGAGLFLFDHAAEEYEHAKKLIIFLNENNVPVQLTSISAPEHKFEGLTQIFQKAYEHEQHISESINNIVDHAIKSKDHATFNFLQWYVAEQHEEEVLFKDILDKIELIGNENHGLYLADQYVKGIAKSRKS

SEQ ID NO: 4739 - protein, 1379 aa, Artificial Sequence
  SARS-CoV-2/France/HF2496/2020__EPI_ISL_418231 spike protein (1-1211)(K986P_V987P) Ferritin construct
MFVFLVLLPLVSSQCVNLTTRTQLPPAYTNSFTRGVYYPDKVFRSSVLHSTQDLFLPFFSNVTWFHAIHVSGTNGTKRFDNPVLPFNDGVYFASTEKSNIIRGWIFGTTLDSKTQSLLIVNNATNVVIKVCEFQFCNDPFLGVYYHKNNKSWMESEFRVYSSANNCTFEYVSQPFLMDLEGKQGNFKNLREFVFKNIDGYFKIYSKHTPINLVRDLPQGFSALEPLVDLPIGINITRFQTLLALHRSYLTPGDSSSGWTAGAAAYYVGYLQPRTFLLKYNENGTITDAVDCALDPLSETKCTLKSFTVEKGIYQTSNFRVQPTESIVRFPNITNLCPFGEVFNATRFASVYAWNRKRISNCVADYSVLYNSASFSTFKCYGVSPTKLNDLCFTNVYADSFVIRGDEVRQIAPGQTGKIADYNYKLPDDFTGCVIAWNSNNLDSKVGGNYNYLYRLFRKSNLKPFERDISTEIYQAGSTPCNGVEGFNCYFPLQSYGFQPTNGVGYQPYRVVVLSFELLHAPATVCGPKKSTNLVKNKCVNFNFNGLTGTGVLTESNKKFLPFQQFGRDIADTTDAVRDPQTLEILDITPCSFGGVSVITPGTNTSNQVAVLYQGVNCTEVPVAIHADQLTPTWRVYSTGSNVFQTRAGCLIGAEHVNNSYECDIPIGAGICASYQTQTNSPRRARSVASQSIIAYTMSLGAENSVAYSNNSIAIPTNFTISVTTEILPVSMTKTSVDCTMYICGDSTECSNLLLQYGSFCTQLNRALTGIAVEQDKNTQEVFAQVKQIYKTPPIKDFGGFNFSQILPDPSKPSKRSFIEDLLFNKVTLADAGFIKQYGDCLGDIVARDLICAQKFNGLTVLPPLLTDEMIAQYTSALLAGTITSGWTFGAGAALQIPFAMQMAYRFNGIGVTQNVLYENQKLIANQFNSAIGKIQDSLSSTASALGKLQDVVNQNAQALNTLVKQLSSNFGAISSVLNDILSRLDPPEAEVQIDRLITGRLQSLQTYVTQQLIRAAEIRASANLAATKMSECVLGQSKRVDFCGKGYHLMSFPQSAPHGVVFLHVTYVPAQEKNFTTAPAICHDGKAHFPREGVFVSNGTHWFVTQRNFYEPQIITTDNTFVSGNCDVVIGIVNNTVYDPLQPELDSFKEELDKYFKNHTSPDVDLGDISGINASVVNIQKEIDRLNEVAKNLNESLIDLQELGKYEQYIKGGGGSDIIKLLNEQVNKEMQSSNLYMSMSSWCYTHSLDGAGLFLFDHAAEEYEHAKKLIIFLNENNVPVQLTSISAPEHKFEGLTQIFQKAYEHEQHISESINNIVDHAIKSKDHATFNFLQWYVAEQHEEEVLFKDILDKIELIGNENHGLYLADQYVKGIAKSRKS

SEQ ID NO: 4740 - protein, 1379 aa, Artificial Sequence
  SARS-CoV-2/USA/WA-UW291/2020__EPI_ISL_418076 spike protein (1-1211)(K986P_V987P) Ferritin construct
MFVFLVLLPLVSSQCVNLTTRTQLPPAYTNSFTRGVYYPDKVFRSSVLHSTQDLFLPFFSNVTWFHAIHVSGTNGTKRFDNPVLPFNDGVYFASTEKSNIIRGWIFGTTLDSKTQSLLIVNNATNVVIKVCEFQFCNDPFLGVYYHKNNKSWMESEFRVYSSANNCTFEYVSQPFLMDLEGKQGNFKNLREFVFKNIDGYFKIYSKHTPINLVRDLPQGFSALEPLVDLPIGINITRFQTLLALHRSYLTPGDSSSGWTAGAAAYYVGYLQPRTFLLKYNENGTITDAVDCALDPLSETKCTLKSFTVEKGIYQTSNFRVQPTESIVRFPNITNLCPFGEVFNATRFASVYAWNRKRISNCVADYSVLYNSASFSTFKCYGVSPTKLNDLCFTNVYADSFVIRGDEVRQIAPGQTGKIADYNYKLPDDFTGCVIAWNSNNLDSKVGGNYNYLYRLFRKSNLKPFERDISTEIYQAGSTPCNGVEGFNCYFPLQSYGFQPTNGVGYQPYRVVVLSFELLHAPATVCGPKKSTNLVKNKCVNFNFNGLTGTGVLTESNKKFLPFQQFGRDIADTTDAVRDPQTLEILDITPCSFGGVSVITPGTNTSNQVAVLYQGVNCTEVPVAIHADQLTPTWRVYSTGSNVFQTRAGCLIGAEHVNNSYECDIPIGAGICASYQTQTNSPRRARSVASQSIIAYTMSLGAENSVAYSNNSIAIPTNFTISVTTEILPVSMTKTSVDCTMYICGDSTECSNLLLQYGSFCTQLNRALTGIAVEQDKNTQEVFAQVKQIYKTPPIKDFGGFNFSQILPDPSKPSKRSFIEDLLFNKVTLADAGFIKQYGDCLGDIAARDLICAQKFNGLTVLPPLLTDEMIAQYTSALLAGTITSGWTFGAGAALQIPFAMQMAYRFNGIGVTQNVLYENQKLIANQFNSAIGKIQYSLSSTASALGKLQDVVNQNAQALNTLVKQLSSNFGAISSVLNDILSRLDPPEAEVQIDRLITGRLQSLQTYVTQQLIRAAEIRASANLAATKMSECVLGQSKRVDFCGKGYHLMSFPQSAPHGVVFLHVTYVPAQEKNFTTAPAICHDGKAHFPREGVFVSNGTHWFVTQRNFYEPQIITTDNTFVSGNCDVVIGIVNNTVYDPLQPELDSFKEELDKYFKNHTSPDVDLGDISGINASVVNIQKEIDRLNEVAKNLNESLIDLQELGKYEQYIKGGGGSDIIKLLNEQVNKEMQSSNLYMSMSSWCYTHSLDGAGLFLFDHAAEEYEHAKKLIIFLNENNVPVQLTSISAPEHKFEGLTQIFQKAYEHEQHISESINNIVDHAIKSKDHATFNFLQWYVAEQHEEEVLFKDILDKIELIGNENHGLYLADQYVKGIAKSRKS

SEQ ID NO: 4741 - protein, 1379 aa, Artificial Sequence; identical to SEQ ID NO: 4704
  SARS-CoV-2/Portugal/PT0034/2020__EPI_ISL_418019 spike protein (1-1211)(K986P_V987P) Ferritin construct

SEQ ID NO: 4742 - protein, 1379 aa, Artificial Sequence
  SARS-CoV-2/Iceland/202/2020__EPI_ISL_417750 spike protein (1-1211)(K986P_V987P) Ferritin construct
MFVFLVLLPLVSSQCVNLTTRTQLPPAYTNSFTRGVYYPDKVFRSSVLHSTQDLFLPFFSNVTWFHAIHVSGTNGTKRFDNPVLPFNDGVYFASTEKSNIIRGWIFGTTLDSKTQSLLIVNNATNVVIKVCEFQFCNDPFLGVYYHKNNKSWMESEFRVYSSANNCTFEYVSQPFLMDLEGKQGNFKNLREFVFKNIDGYFKIYSKHTPINLVRDLPQGFSALEPLVDLPIGINITRFQTLLALHRSYLTPGDSSSGWTAGAAAYYVGYLQPRTFLLKYNENGTITDAVDCALDPLSETKCTLKSFTVEKGIYQTSNFRVQPTESIVRFPNITNLCPFGEVFNATRFASVYAWNRKRISNCVADYSVLYNSASFSTFKCYGVSPTKLNDLCFTNVYADSFVIRGDEVRQIAPGQTGKIADYNYKLPDDFTGCVIAWNSNNLDSKVGGNYNYLYRLFRKSNLKPFERDISTEIYQAGSTPCNGVEGFNCYFPLQSYGFQPTNGVGYQPYRVVVLSFELLHAPATVCGPKKSTNLVKNKCVNFNFNGLTGTGVLTESNKKFLPFQQFGRDIADTTDAVRDPQTLEILDITPCSFGGVSVITPGTNTSNQVAVLYQDVNCTEVPVAIHADQLTPTWRVYSTGSNVFQTRAGCLIGAEHVNNSYECDIPIGAGICASYQTQTNSPRRARSVASQSIIAYTMSLGAENSVAYSNNSIAIPTNFTISVTTEILPVSMTKTSVDCTMYICGDSTECSNLLLQYGSFCTQLNRALTGIAVEQDKNTQEVFAQVKQIYKTPPIKDFGGFNFSQILPDPSKPSKRSFIEDLLFNKVTLADAGFIKQYGDCLGDIAARDLICAQKFNGLTVLPPLLTDEMIAQYTSALLAGTITSGWTFGAGAALQIPFAMQMAYRFNGIGVTQNVLYENQKLIANQFNSAIGKIQDSLSSTASALGKLQDVVNQNAQALNTLVKQLSSNFGAISSVLNDILSRLDPPEAEVQIDRLITGRLQSLQTYVTQQLIRAAEIRASANLAATKMSECVLGQSKRVDFCGKGYHLMSFPQSAPHGVVFLHVTYVPAQEKNFTTAPAICHDGKAHFPREGVFVSNGTHWFVTQRNFYEPQIITTDNTFVSGNCDVVIGIVNNTVYDPLQPELDSFKEELDKYFKNHTSPDVDLGDIPGINASVVNIQKEIDRLNEVAKNLNESLIDLQELGKYEQYIKGGGGSDIIKLLNEQVNKEMQSSNLYMSMSSWCYTHSLDGAGLFLFDHAAEEYEHAKKLIIFLNENNVPVQLTSISAPEHKFEGLTQIFQKAYEHEQHISESINNIVDHAIKSKDHATFNFLQWYVAEQHEEEVLFKDILDKIELIGNENHGLYLADQYVKGIAKSRKS

SEQ ID NO: 4743 - protein, 1379 aa, Artificial Sequence
  SARS-CoV-2/USA/WA-UW261/2020__EPI_ISL_418046 spike protein (1-1211)(K986P_V987P) Ferritin construct
MFVFLVLLPLVSSQCVNLTTRTQLPPAYTNSFTRGVYYPDKVFRSSVLHSTQDLFLPFFSNVTWFHAIHVSGTNGTKRFDNPVLPFNDGVYFASTEKSNIIRGWIFGTTLDSKTQSLLIVNNATNVVIKVCEFQFCNDPFLGVYYHKNNKSWMESEFRVYSSANNCTFEYVSQPFLMDLEGKQGNFKNLREFVFKNIDGYFKIYSKHTPINLVRDLPQGFSALEPLVDLPIGINITRFQTLLALHRSYLTPGDSSSGWTAGAAAYYVGYLQPRTFLLKYNENGTITDAVDCALDPLSETKCTLKSFTVEKGIYQTSNFRVQPTESIVRFPNITNLCPFGEVFNATRFTSVYAWNRKRISNCVADYSVLYNSASFSTFKCYGVSPTKLNDLCFTNVYADSFVIRGDEVRQIAPGQTGKIADYNYKLPDDFTGCVIAWNSNNLDSKVGGNYNYLYRLFRKSNLKPFERDISTEIYQAGSTPCNGVEGFNCYFPLQSYGFQPTNGVGYQPYRVVVLSFELLHAPATVCGPKKSTNLVKNKCVNFNFNGLTGTGVLTESNKKFLPFQQFGRDIADTTDAVRDPQTLEILDITPCSFGGVSVITPGTNTSNQVAVLYQDVNCTEVPVAIHADQLTPTWRVYSTGSNVFQTRAGCLIGAEHVNNSYECDIPIGAGICASYQTQTNSPRRARSVASQSIIAYTMSLGAENSVAYSNNSIAIPTNFTISVTTEILPVSMTKTSVDCTMYICGDSTECSNLLLQYGSFCTQLNRALTGIAVEQDKNTQEVFAQVKQIYKTPPIKDFGGFNFSQILPDPSKPSKRSFIEDLLFNKVTLADAGFIKQYGDCLGDIAARDLICAQKFNGLTVLPPLLTDEMIAQYTSALLAGTITSGWTFGAGAALQIPFAMQMAYRFNGIGVTQNVLYENQKLIANQFNSAIGKIQDSLSSTASALGKLQDVVNQNAQALNTLVKQLSSNFGAISSVLNDILSRLDPPEAEVQIDRLITGRLQSLQTYVTQQLIRAAEIRASANLAATKMSECVLGQSKRVDFCGKGYHLMSFPQSAPHGVVFLHVTYVPAQEKNFTTAPAICHDGKAHFPREGVFVSNGTHWFVTQRNFYEPQIITTDNTFVSGNCDVVIGIVNNTVYDPLQPELDSFKEELDKYFKNHTSPDVDLGDISGINASVVNIQKEIDRLNEVAKNLNESLIDLQELGKYEQYIKGGGGSDIIKLLNEQVNKEMQSSNLYMSMSSWCYTHSLDGAGLFLFDHAAEEYEHAKKLIIFLNENNVPVQLTSISAPEHKFEGLTQIFQKAYEHEQHISESINNIVDHAIKSKDHATFNFLQWYVAEQHEEEVLFKDILDKIELIGNENHGLYLADQYVKGIAKSRKS

SEQ ID NO: 4744 - protein, 1379 aa, Artificial Sequence
  SARS-CoV-2/Portugal/PT0035/2020__EPI_ISL_418020 spike protein (1-1211)(K986P_V987P) Ferritin construct
MFVFLVLLPLVSSQCVNLTTRTQLPPAYTNSFTRGVYYPDKVFRSSVLHSTQDLFLPFFSNVTWFHAIHVSGTNGTKRFDNPVLPFNDGVYFASTEKSNIIRGWIFGTTLDSKTQSLLIVNNATNVVIKVCEFQFCNDPFLGVYYHKNNKSWMESEFRVYSSANNCTFEYVSQPFLMDLEGKQGNFKNLREFVFKNIDGYFKIYSKHTPINLVRDLPQGFSALEPLVDLPIGINITRFQTLLALHRSYLTPGDSSSGWTAGAAAYYVGYLQPRTFLLKYNENGTITDAVDCALDPLSETKCTLKSFTVEKGIYQTSNFRVQPTESIVRFPNITNLCPFGEVFNATRFASVYAWNRKRISNCVADYSVLYNSASFSTFKCYGVSPTKLNDLCFTNVYADSFVIRGDEVRQIAPGQTGKIADYNYKLPDDFTGCVIAWNSNNLDSKVGGNYNYLYRLFRKSNLKPFERDISTEIYQAGSTPCNGVEGFNCYFPLQSYGFQPTNGVGYQPYRVVVLSFELLHAPATVCGPKKSTNLVKNKCVNFNFNGLTGTGVLTESNKKFLPFQQFGRDIADTTDAVRDPQTLEILDITPCSFGGVSVITPGTNTSNQVAVLYQDVNCTEVPVAIHADQLTPTWRVYSTGSNVFQTRAGCLIGAEHVNNSYECDIPIGAGICASYQTQTNSPRRARSVASQSIIAYTMSLGAENSVAYSNNSIAIPTNFTISVTTEILPVSMTKTSVDCTMYICGDSTECSNLLLQYGSFCTQLNRALTGIAVEQDKNTQEVFAQVKQIYKTPPIKDFGGFNFSQILPDPSKPSKRSFIEDLLFNKVTLADAGFIKQYGDCLGDISARDLICAQKFNGLTVLPPLLTDEMIAQYTSALLAGTITSGWTFGAGAALQIPFAMQMAYRFNGIGVTQNVLYENQKLIANQFNSAIGKIQDSLSSTASALGKLQDVVNQNAQALNTLVKQLSSNFGAISSVLNDILSRLDPPEAEVQIDRLITGRLQSLQTYVTQQLIRAAEIRASANLAATKMSECVLGQSKRVDFCGKGYHLMSFPQSAPHGVVFLHVTYVPAQEKNFTTAPAICHDGKAHFPREGVFVSNGTHWFVTQRNFYEPQIITTDNTFVSGNCDVVIGIVNNTVYDPLQPELDSFKEELDKYFKNHTSPDVDLGDISGINASVVNIQKEIDRLNEVAKNLNESLIDLQELGKYEQYIKGGGGSDIIKLLNEQVNKEMQSSNLYMSMSSWCYTHSLDGAGLFLFDHAAEEYEHAKKLIIFLNENNVPVQLTSISAPEHKFEGLTQIFQKAYEHEQHISESINNIVDHAIKSKDHATFNFLQWYVAEQHEEEVLFKDILDKIELIGNENHGLYLADQYVKGIAKSRKS

SEQ ID NO: 4745 - protein, 1379 aa, Artificial Sequence
  SARS-CoV-2/USA/NY-NYUMC7/2020__EPI_ISL_418192 spike protein (1-1211)(K986P_V987P) Ferritin construct
MFVFLVLLPLVSSQCVNLTTRTQLPPAYTNSFTRGVYYPDKVFRSSVLHSTQDLFLPFFSNVTWFHAIHVSGTNGTKRFDNPVLPFNDGVYFASTEKSNIIRGWIFGTTLDSKTQSLLIVNNATNVVIKVCEFQFCNDPFLGVYHHKNNKSWMESEFRVYSSANNCTFEYVSQPFLMDLEGKQGNFKNLREFVFKNIDGYFKIYSKHTPINLVRDLPQGFSALEPLVDLPIGINITRFQTLLALHRSYLTPGDSSSGWTAGAAAYYVGYLQPRTFLLKYNENGTITDAVDCALDPLSETKCTLKSFTVEKGIYQTSNFRVQPTESIVRFPNITNLCPFGEVFNATRFASVYAWNRKRISNCVADYSVLYNSASFSTFKCYGVSPTKLNDLCFTNVYADSFVIRGDEVRQIAPGQTGKIADYNYKLPDDFTGCVIAWNSNNLDSKVGGNYNYLYRLFRKSNLKPFERDISTEIYQAGSTPCNGVEGFNCYFPLQSYGFQPTNGVGYQPYRVVVLSFELLHAPATVCGPKKSTNLVKNKCVNFNFNGLTGTGVLTESNKKFLPFQQFGRDIADTTDAVRDPQTLEILDITPCSFGGVSVITPGTNTSNQVAVLYQGVNCTEVPVAIHADQLTPTWRVYSTGSNVFQTRAGCLIGAEHVNNSYECDIPIGAGICASYQTQTNSPRRARSVASQSIIAYTMSLGAENSVAYSNNSIAIPTNFTISVTTEILPVSMTKTSVDCTMYICGDSTECSNLLLQYGSFCTQLNRALTGIAVEQDKNTQEVFAQVKQIYKTPPIKDFGGFNFSQILPDPSKPSKRSFIEDLLFNKVTLADAGFIKQYGDCLGDIAARDLICAQKFNGLTVLPPLLTDEMIAQYTSALLAGTITSGWTFGAGAALQIPFAMQMAYRFNGIGVTQNVLYENQKLIANQFNSAIGKIQDSLSSTASALGKLQDVVNQNAQALNTLVKQLSSNFGAISSVLNDILSRLDPPEAEVQIDRLITGRLQSLQTYVTQQLIRAAEIRASANLAATKMSECVLGQSKRVDFCGKGYHLMSFPQSAPHGVVFLHVTYVPAQEKNFTTAPAICHDGKAHFPREGVFVSNGTHWFVTQRNFYEPQIITTDNTFVSGNCDVVIGIVNNTVYDPLQPELDSFKEELDKYFKNHTSPDVDLGDISGINASVVNIQKEIDRLNEVAKNLNESLIDLQELGKYEQYIKGGGGSDIIKLLNEQVNKEMQSSNLYMSMSSWCYTHSLDGAGLFLFDHAAEEYEHAKKLIIFLNENNVPVQLTSISAPEHKFEGLTQIFQKAYEHEQHISESINNIVDHAIKSKDHATFNFLQWYVAEQHEEEVLFKDILDKIELIGNENHGLYLADQYVKGIAKSRKS

SEQ ID NO: 4746 - protein, 1379 aa, Artificial Sequence
  SARS-CoV-2/Iceland/189/2020__EPI_ISL_417709 spike protein (1-1211)(K986P_V987P) Ferritin construct
MFVFLVLLPLVSSQCVNLTTRTQLPPAYTNSFTRGVYYPDKVFRSSVLHSTQDLFLPFFSNVTWFHAIHVSGTNGTKRFDNPVLPFNDGVYFASTEKSNIIRGWIFGTTLDSKTQSLLIVNNATNVVIKVCEFQFCNDPFLGVYYHKNNKSWMESEFRVYSSANNCTFEYVSQPFLMDLEGKQGNFKNLREFVFKNIDGYFKIYSKHTPINLVRDLPQGFSALEPLVDLPIGINITRFQTLLALHRSYLTPGDSSSGWTAGAAAYYVGYLQPRTFLLKYNENGTITDAVDCALDPLSETKCTLKSFTVEKGIYQTSNFRVQPTESIVRFPNITNLCPFGEVFNATRFASVYAWNRKRISNCVADYSVLYNSASFSTFKCYGVSPTKLNDLCFTNVYADSFVIRGDEVRQIAPGQTGKIADYNYKLPDDFTGCVIAWNSNNLDSKVGGNYNYLYRLFRKSNLKPFERDISTEIYQAGSTPCNGVEGFNCYFPLQSYGFQPTNGVGYQPYRVVVLSFELLHAPATVCGPKKSTNLVKNKCVNFNFNGLTGTGVLTESNKKFLPFQQFGRDIADTTDAVRDPQTLEILDITPCSFGGVSVITPGTNTSNQVAVLYQGVNCTEVPVAIHADQLTPTWRVYSTGSNVFQTRAGCLIGAEHVNNSYECDIPIGAGICASYQTQTNSPRRARSVASQSIIAYTMSLGAENSVAYSNNSIAIPTNFTISVTTEILPVSMTKTSVDCTMYICGDSTECSNLLLQYGSFCTQLNRALTGIAVEQDKNTQEVFAQVKQIYKTPPIKDFGGFNFSQILPDPSKPSKRSFIEDLLFNKVTLADAGFTKQYGDCLGDIAARDLICAQKFNGLTVLPPLLTDEMIAQYTSALLAGTITSGWTFGAGAALQIPFAMQMAYRFNGIGVTQNVLYENQKLIANQFNSAIGKIQDSLSSTASALGKLQDVVNQNAQALNTLVKQLSSNFGAISSVLNDILSRLDPPEAEVQIDRLITGRLQSLQTYVTQQLIRAAEIRASANLAATKMSECVLGQSKRVDFCGKGYHLMSFPQSAPHGVVFLHVTYVPAQEKNFTTAPAICHDGKAHFPREGVFVSNGTHWFVTQRNFYEPQIITTDNTFVSGNCDVVIGIVNNTVYDPLQPELDSFKEELDKYFKNHTSPDVDLGDISGINASVVNIQKEIDRLNEVAKNLNESLIDLQELGKYEQYIKGGGGSDIIKLLNEQVNKEMQSSNLYMSMSSWCYTHSLDGAGLFLFDHAAEEYEHAKKLIIFLNENNVPVQLTSISAPEHKFEGLTQIFQKAYEHEQHISESINNIVDHAIKSKDHATFNFLQWYVAEQHEEEVLFKDILDKIELIGNENHGLYLADQYVKGIAKSRKS

SEQ ID NO: 4747 - protein, 1379 aa, Artificial Sequence
  SARS-CoV-2/Australia/NSW56/2020__EPI_ISL_417408 spike protein (1-1211)(K986P_V987P) Ferritin construct
MFVFLVLLPLVSSQCVNLTTRTQLPPAYTNSFTRGVYYPDKVFRSSVLHSTQDLFLPFFSNVTWFHAIHVSGTNGTKRFDNPVLPFNDGVYFASTEKSNIIRGWIFGTTLDSKTQSLLIVNNATNVVIKVCEFQFCNDPFLGVYYHKNNKSWMESEFRVYSSANNCTFEYVSQPFLMDLEGKQGNFKNLREFVFKNIDGYFKIYSKHTPINLVRDLPQGFSALEPLVDLPIGINITRFQTLLALHRSYLTPGDSSSGWTAGAAAYYVGYLQPRTFLLKYNENGTITDAVDCALDPLSETKCTLKSFTVEKGIYQTSNFRVQPTESIVRFPNITNLCPFGEVFNATRFASVYAWNRKRISNCVADYSVLYNSASFSTFKCYGVSPTKLNDLCFTNVYADSFVIRGDEVRQIAPGQTGKIADYNYKLPDDFTGCVIAWNSNNLDSKVGGNYNYLYRLFRKSNLKPFERDISTEIYQAGSTPCNGVEGFNCYFPLQSYGFQPTNGVGYQPYRVVVLSFELLHAPATVCGPKKSTNLVKNKCVNFNFNGLTGTGVLTESNKKFLPFQQFGRDIADTTDAVRDPQTLEILDITPCSFGGVSVITPGTNTSNQVAVLYQDVNCTEVPVAIHADQLTPTWRVYSTGSNVFQTRAGCLIGAEHVNNSYECDIPIGAGICASYQTQTNSPRRARSVASQSIIAYTMSLGAENSVAYSNNSIAIPTNFTISVTTEILPVSMTKTSVDCTMYICGDSTECSNLLLQYGSFCTQLNRALTGIAVEQDKNTQEVFAQVKQIYKTPPIKDFGGFNFSQILPDSSKPSKRSFIEDLLFNKVTLADAGFIKQYGDCLGDIAARDLICAQKFNGLTVLPPLLTDEMIAQYTSALLAGTITSGWTFGAGAALQIPFAMQMAYRFNGIGVTQNVLYENQKLIANQFNSAIGKIQDSLSSTASALGKLQDVVNQNAQALNTLVKQLSSNFGAISSVLNDILSRLDPPEAEVQIDRLITGRLQSLQTYVTQQLIRAAEIRASANLAATKMSECVLGQSKRVDFCGKGYHLMSFPQSAPHGVVFLHVTYVPAQEKNFTTAPAICHDGKAHFPREGVFVSNGTHWFVTQRNFYEPQIITTDNTFVSGNCDVVIGIVNNTVYDPLQPELDSFKEELDKYFKNHTSPDVDLGDISGINASVVNIQKEIDRLNEVAKNLNESLIDLQELGKYEQYIKGGGGSDIIKLLNEQVNKEMQSSNLYMSMSSWCYTHSLDGAGLFLFDHAAEEYEHAKKLIIFLNENNVPVQLTSISAPEHKFEGLTQIFQKAYEHEQHISESINNIVDHAIKSKDHATFNFLQWYVAEQHEEEVLFKDILDKIELIGNENHGLYLADQYVKGIAKSRKS

SEQ ID NO: 4748 - protein, 1379 aa, Artificial Sequence
  SARS-CoV-2/Iceland/280/2020__EPI_ISL_417608 spike protein (1-1211)(K986P_V987P) Ferritin construct
MFVFLVLLPLVSSQCVNLTTRTQLPPAYTNSFTRGVYYPDKVFRSSVLHSTQDLFLPFFSNVTWFHAIHVSGTNGTKRFDNPVLPFNDGVYFASTEKSNIIRGWIFGTTLDSKTQSLLIVNNATNVVIKVCEFQFCNDPFLGVYYHKNNKSWMESEFRVYSSANNCTFEYVSQPFLMDLEGKQGNFKNLREFVFKNIDGYFKIYSKHTPINLVRDLPQGFSALEPLVDLPIGINITRFQTLLALHRSYLTPGDSSSGWTAGAAAYYVGYLQPRTFLLKYNENGTITDAVDCALDPLSETKCTLKSFTVEKGIYQTSNFRVQPTESIVRFPNITNLCPFGEVFNATRFASVYAWNRKRISNCVADYSVLYNSASFSTFKCYGVSPTKLNDLCFTNVYADSFVIRGDEVRQIAPGQTGKIADYNYKLPDDFTGCVIAWNSNNLDSKVGGNYNYLYRLFRKSNLKPFERDISTEIYQAGSTPCNGVEGFNCYFPLQSYGFQPTNGVGYQPYRVVVLSFELLHAPATVCGPKKSTNLVKNKCVNFNFNGLTGTGVLTESNKKFLPFQQFGRDIADTTDAVRDPQTLEILDITPCSFGGVSVITPGTNTSNQVAVLYQGVNCTEVPVAIHADQLTPTWRVYSTGSNVFQTRAGCLIGAEHVNNSYECDIPIGAGICASYHTQTNSPRRARSVASQSIIAYTMSLGAENSVAYSNNSIAIPTNFTISVTTEILPVSMTKTSVDCTMYICGDSTECSNLLLQYGSFCTQLNRALTGIAVEQDKNTQEVFAQVKQIYKTPPIKDFGGFNFSQILPDPSKPSKRSFIEDLLFNKVTLADAGFIKQYGDCLGDIAARDLICAQKFNGLTVLPPLLTDEMIAQYTSALLAGTITSGWTFGAGAALQIPFAMQMAYRFNGIGVTQNVLYENQKLIANQFNSAIGKIQDSLSSTASALGKLQDVVNQNAQALNTLVKQLSSNFGAISSVLNDILSRLDPPEAEVQIDRLITGRLQSLQTYVTQQLIRAAEIRASANLAATKMSECVLGQSKRVDFCGKGYHLMSFPQSAPHGVVFLHVTYVPAQEKNFTTAPAICHDGKAHFPREGVFVSNGTHWFVTQRNFYEPQIITTDNTFVSGNCDVVIGIVNNTVYDPLQPELDSFKEELDKYFKNHTSPDVDLGDISGINASVVNIQKEIDRLNEVAKNLNESLIDLQELGKYEQYIKGGGGSDIIKLLNEQVNKEMQSSNLYMSMSSWCYTHSLDGAGLFLFDHAAEEYEHAKKLIIFLNENNVPVQLTSISAPEHKFEGLTQIFQKAYEHEQHISESINNIVDHAIKSKDHATFNFLQWYVAEQHEEEVLFKDILDKIELIGNENHGLYLADQYVKGIAKSRKS

SEQ ID NO: 4749 - protein, 1379 aa, Artificial Sequence; identical to SEQ ID NO: 4704
  SARS-CoV-2/Iceland/247/2020__EPI_ISL_417575 spike protein (1-1211)(K986P_V987P) Ferritin construct

SEQ ID NO: 4750 - protein, 1379 aa, Artificial Sequence
  SARS-CoV-2/Iceland/238/2020__EPI_ISL_417566 spike protein (1-1211)(K986P_V987P) Ferritin construct
MFVFLVLLPLVSSQCVNLTTRTQLPPAYTNSFTRGVYYPDKVFRSSVLHSTQDLFLPFFSNVTWFHAIHVSGTNGTKRFDNPVLPFNDGVYFASTEKSNIIRGWIFGTTLDSKTQSLLIVNNATNVVIKVCEFQFCNDPFLGVYYHKNNKSWMESEFRVYSSANNCTFEYVSQPFLMDLEGKQGNFKNLREFVFKNIDGYFKIYSKHTPINLVRDLPQGFSALEPLVDLPIGINITRFQTLLALHRSYLTPGDSSSGWTAGAAAYYVGYLQPRTFLLKYNENGTITDAVDCALDPLSETKCTLKSFTVEKGIYQTSNFRVQPTESIVRFPNITNLCPFGEVFNATRFASVYAWNRKRISNCVADYSVLYNSASFSTFKCYGVSPTKLNDLCFTNVYADSFVIRGDEVRQIAPGQTGKIADYNYKLPDDFTGCVIAWNSNNLDSKVGGNYNYLYRLFRKSNLKPFERDISTEIYQAGSTPCNGVEGFNCYFPLQSYGFQPTNGVGYQPYRVVVLSFELLHAPATVCGPKKSTNLVKNKCVNFNFNGLTGTGVLTESNKKFLPFQQFGRDIADTTDAVRDPQTLEILDITPCSFGGVSVITPGTNTSNQVAVLYQGVNCTEVPVAIHADQLTPTWRVYSTGSNVFQTRAGCLIGAEHVNNSYECDIPIGAGICASYQTQTNSPRRARSVASQSIIAYTMSLGAENSVAYSNNSIAIPTNFTISVTTEILPVSMTKTSVDCTMYICGDSTECSNLLLQYGSFCTQLNRALTGIAVEQDKNTQEVFAQVKQIYKTPPIKDFGGFNFSQILPDPSKPSKRSFIEDLLFNKVTLADVGFIKQYGDCLGDIAARDLICAQKFNGLTVLPPLLTDEMIAQYTSALLAGTITSGWTFGAGAALQIPFAMQMAYRFNGIGVTQNVLYENQKLIANQFNSAIGKIQDSLSSTASALGKLQDVVNQNAQALNTLVKQLSSNFGAISSVLNDILSRLDPPEAEVQIDRLITGRLQSLQTYVTQQLIRAAEIRASANLAATKMSECVLGQSKRVDFCGKGYHLMSFPQSAPHGVVFLHVTYVPAQEKNFTTAPAICHDGKAHFPREGVFVSNGTHWFVTQRNFYEPQIITTDNTFVSGNCDVVIGIVNNTVYDPLQPELDSFKEELDKYFKNHTSPDVDLGDISGINASVVNIQKEIDRLNEVAKNLNESLIDLQELGKYEQYIKGGGGSDIIKLLNEQVNKEMQSSNLYMSMSSWCYTHSLDGAGLFLFDHAAEEYEHAKKLIIFLNENNVPVQLTSISAPEHKFEGLTQIFQKAYEHEQHISESINNIVDHAIKSKDHATFNFLQWYVAEQHEEEVLFKDILDKIELIGNENHGLYLADQYVKGIAKSRKS

SEQ ID NO: 4751 - protein, 1379 aa, Artificial Sequence
  SARS-CoV-2/Greece/16/2020__EPI_ISL_418265 spike protein (1-1211)(K986P_V987P) Ferritin construct
MFVFLVLLPLVSSQCVNLTTRTQLPPAYTNSFTRGVYYPDKVFRSSVLHSTQDLFLPFFSNVTWFHAIHVSGTNGTKRFDNPVLPFNDGVYFASTEKSNIIRGWIFGTTLDSKTQSLLIVNNATNVVIKVCEFQFCNDPFLGVYYHKNNKSWMESEFRVYSSANNCTFEYVSQPFLMDLEGKQGNFKNLREFVFKNVDGYFKIYSKHTPINLVRDLPQGFSALEPLVDLPIGINITRFQTLLALHRSYLTPGDSSSGWTAGAAAYYVGYLQPRTFLLKYNENGTITDAVDCALDPLSETKCTLKSFTVEKGIYQTSNFRVQPTESIVRFPNITNLCPFGEVFNATRFASVYAWNRKRISNCVADYSVLYNSASFSTFKCYGVSPTKLNDLCFTNVYADSFVIRGDEVRQIAPGQTGKIADYNYKLPDDFTGCVIAWNSNNLDSKVGGNYNYLYRLFRKSNLKPFERDISTEIYQAGSTPCNGVEGFNCYFPLQSYGFQPTNGVGYQPYRVVVLSFELLHAPATVCGPKKSTNLVKNKCVNFNFNGLTGTGVLTESNKKFLPFQQFGRDIADTTDAVRDPQTLEILDITPCSFGGVSVITPGTNTSNQVAVLYQDVNCTEVPVAIHADQLTPTWRVYSTGSNVFQTRAGCLIGAEHVNNSYECDIPIGAGICASYQTQTNSPRRARSVASQSIIAYTMSLGAENSVAYSNNSIAIPTNFTISVTTEILPVSMTKTSVDCTMYICGDSTECSNLLLQYGSFCTQLNRALTGIAVEQDKNTQEVFAQVKQIYKTPPIKDFGGFNFSQILPDPSKPSKRSFIEDLLFNKVTLADAGFIKQYGDCLGDIAARDLICAQKFNGLTVLPPLLTDEMIAQYTSALLAGTITSGWTFGAGAALQIPFAMQMAYRFNGIGVTQNVLYENQKLIANQFNSAIGKIQDSLSSTASALGKLQDVVNQNAQALNTLVKQLSSNFGAISSVLNDILSRLDPPEAEVQIDRLITGRLQSLQTYVTQQLIRAAEIRASANLAATKMSECVLGQSKRVDFCGKGYHLMSFPQSAPHGVVFLHVTYVPAQEKNFTTAPAICHDGKAHFPREGVFVSNGTHWFVTQRNFYEPQIITTDNTFVSGNCDVVIGIVNNTVYDPLQPELDSFKEELDKYFKNHTSPDVDLGDISGINASVVNIQKEIDRLNEVAKNLNESLIDLQELGKYEQYIKGGGGSDIIKLLNEQVNKEMQSSNLYMSMSSWCYTHSLDGAGLFLFDHAAEEYEHAKKLIIFLNENNVPVQLTSISAPEHKFEGLTQIFQKAYEHEQHISESINNIVDHAIKSKDHATFNFLQWYVAEQHEEEVLFKDILDKIELIGNENHGLYLADQYVKGIAKSRKS

SEQ ID NO: 4752 - protein, 1379 aa, Artificial Sequence
  SARS-CoV-2/Iceland/319/2020__EPI_ISL_417648 spike protein (1-1211)(K986P_V987P) Ferritin construct
MFVFLVLLPLVSSQCVNLTTRTQLPPAYTNSFTRGVYYPDKVFRSSVLHSTQDLFLPFFSNVTWFHAIHVSGTNGTKRFDNPVLPFNDGVYFASTEKSNIIRGWIFGTTLDSKTQSLLIVNNATNVVIKVCEFQFCNDPFLGVYYHKNNKSWMESEFRVYSSANNCTFEYVSQPFLIDLEGKQGNFKNLREFVFKNIDGYFKIYSKHTPINLVRDLPQGFSALEPLVDLPIGINITRFQTLLALHRSYLTPGDSSSGWTAGAAAYYVGYLQPRTFLLKYNENGTITDAVDCALDPLSETKCTLKSFTVEKGIYQTSNFRVQPTESIVRFPNITNLCPFGEVFNATRFASVYAWNRKRISNCVADYSVLYNSASFSTFKCYGVSPTKLNDLCFTNVYADSFVIRGDEVRQIAPGQTGKIADYNYKLPDDFTGCVIAWNSNNLDSKVGGNYNYLYRLFRKSNLKPFERDISTEIYQAGSTPCNGVEGFNCYFPLQSYGFQPTNGVGYQPYRVVVLSFELLHAPATVCGPKKSTNLVKNKCVNFNFNGLTGTGVLTESNKKFLPFQQFGRDIADTTDAVRDPQTLEILDITPCSFGGVSVITPGTNTSNQVAVLYQGVNCTEVPVAIHADQLTPTWRVYSTGSNVFQTRAGCLIGAEHVNNSYECDIPIGAGICASYQTQTNSPRRARSVASQSIIAYTMSLGAENSVAYSNNSIAIPTNFTISVTTEILPVSMTKTSVDCTMYICGDSTECSNLLLQYGSFCTQLNRALTGIAVEQDKNTQEVFAQVKQIYKTPPIKDFGGFNFSQILPDPSKPSKRSFIEDLLFNKVTLADAGFIKQYGDCLGDIAARDLICAQKFNGLTVLPPLLTDEMIAQYTSALLAGTITSGWTFGAGAALQIPFAMQMAYRFNGIGVTQNVLYENQKLIANQFNSAIGKIQDSLSSTASALGKLQDVVNQNAQALNTLVKQLSSNFGAISSVLNDILSRLDPPEAEVQIDRLITGRLQSLQTYVTQQLIRAAEIRASANLAATKMSECVLGQSKRVDFCGKGYHLMSFPQSAPHGVVFLHVTYVPAQEKNFTTAPAICHDGKAHFPREGVFVSNGTHWFVTQRNFYEPQIITTDNTFVSGNCDVVIGIVNNTVYDPLQPELDSFKEELDKYFKNHTSPDVDLGDISGINASVVNIQKEIDRLNEVAKNLNESLIDLQELGKYEQYIKGGGGSDIIKLLNEQVNKEMQSSNLYMSMSSWCYTHSLDGAGLFLFDHAAEEYEHAKKLIIFLNENNVPVQLTSISAPEHKFEGLTQIFQKAYEHEQHISESINNIVDHAIKSKDHATFNFLQWYVAEQHEEEVLFKDILDKIELIGNENHGLYLADQYVKGIAKSRKS

SEQ ID NO: 4753 - protein, 1379 aa, Artificial Sequence
  SARS-CoV-2/Congo/94/2020__EPI_ISL_417947 spike protein (1-1211)(K986P_V987P) Ferritin construct
MFVFLVLLPLVSSQCVNLTTRTQLPPAYTNSFTRGVYYPDKVFRSSVLHSTQDLFLPFFSNVTWFHAIHVSGTNGTKRFDNPVLPFNDGVYFASTEKSNIIRGWIFGTTLDSKTQSLLIVNNATNVVIKVCEFQFCNDPFLGVYYHKNNKSWMESEFRVYSSANNCTFEYVSQPFLMDLEGKQGNFKNLREFVFKNIDGYFKIYSKHTPINLVRDLPQGFSALEPLVDLPIGINITRFQTLLALHRSYLTPGDSSSGWTAGAAAYYVGYLQPRTFLLKYNENGTITDAVDCALDPLSETKCTLKSFTVEKGIYQTSNFRVQPTESIVRFPNITNLCPFGEVFNATRFASVYAWNRKRISNCVADYSVLYNSASFSTFKCYGVSPTKLNDLCFTNVYADSFVIRGDEVRQIAPGQTGKIADYNYKLPDDFTGCVIAWNSNNLDSKVGGNYNYLYRLFRKSNLKPFERDISTEIYQAGSTPCNGVEGFNCYFPLQSYGFQPTNGVGYQPYRVVVLSFELLHAPATVCGPKKSTNLVKNKCVNFNFNGLTGTGVLTESNKKFLPFQQFGRDIADTTDAVRDPQTLEILDITPCSFGGVSVITPGTNTSNQVAVLYQGVNCTEVPVAIHADQLTPTWRVYSTGSNVFQTRAGCLIGAEHVNNSYECDIPIGAGICASYQTQTNSPRRARSVASQSIIAYTMSLGAENSVAYSNNSIAIPTNFTISVTTEILPVSMTKTSVDCTMYICGDSTECSNLLLQYGSFCTQLNRALTGIAVEQDKNTQEVFAQVKQIYKTPPIKDFGGFNFSQILPDPSKPSKRSFIEDILFNKVTLADAGFIKQYGDCLGDIAARDLICAQKFNGLTVLPPLLTDEMIAQYTSALLAGTITSGWTFGAGAALQIPFAMQMAYRFNGIGVTQNVLYENQKLIANQFNSAIGKIQDSLSSTASALGKLQDVVNQNAQALNTLVKQLSSNFGAISSVLNDILSRLDPPEAEVQIDRLITGRLQSLQTYVTQQLIRAAEIRASANLAATKMSECVLGQSKRVDFCGKGYHLMSFPQSAPHGVVFLHVTYVPAQEKNFTTAPAICHDGKAHFPREGVFVSNGTHWFVTQRNFYEPQIITTDNTFVSGNCDVVIGIVNNTVYDPLQPELDSFKEELDKYFKNHTSPDVDLGDISGINASVVNIQKEIDRLNEVAKNLNESLIDLQELGKYEQYIKGGGGSDIIKLLNEQVNKEMQSSNLYMSMSSWCYTHSLDGAGLFLFDHAAEEYEHAKKLIIFLNENNVPVQLTSISAPEHKFEGLTQIFQKAYEHEQHISESINNIVDHAIKSKDHATFNFLQWYVAEQHEEEVLFKDILDKIELIGNENHGLYLADQYVKGIAKSRKS

SEQ ID NO: 4754 - protein, 1379 aa, Artificial Sequence
  SARS-CoV-2/Congo/158/2020__EPI_ISL_417950 spike protein (1-1211)(K986P_V987P) Ferritin construct
MFVFLVLLPLVSSQCVNLTTRTQLPPAYTNSFTRGVYYPDKVFRSSVLHSTQDLFLPFFSNVTWFHAIHVSGTNGTKRFDNPVLPFNDGVYFASTEKSNIIRGWIFGTTLDSKTQSLLIVNNATNVVIKVCEFQFCNDPFLGVYYHKNNKSWMESEFRVYSSANNCTFEYVSQPFLMDLEGKQGNFKNLREFVFKNIDGYFKIYSKHTPINLVRDLPQGFSALEPLVDLPIGINITRFQTLLALHRSYLTPGDSSSGWTAGAAAYYVGYLQPRTFLLKYNENGTITDAVDCALDPLSETKCTLKSFTVEKGIYQTSNFRVQPTESIVRFPNITNLCPFGEVFNATRFASVYAWNRKRISNCVADYSVLYNSASFSTFKCYGVSPTKLNDLCFTNVYADSFVIRGDEVRQIAPGQTGKIADYNYKLPDDFTGCVIAWNSNNLDSKVGGNYNYLYRLFRKSNLKPFERDISTEIYQAGSTPCNGVEGFNCYFPLQSYGFQPTNGVGYQPYRVVVLSFELLHAPATVCGPKKSTNLVKNKCVNFNFNGLTGTGVLTESNKKFLPFQQFGRDIADTTDAVRDPQTLEILDITPCSFGGVSVITPGTNTSNQVAVLYQDVNCTEVPVAIHADQLTPTWRVYSTGSNVFQTRAGCLIGAEHVNNSYECDIPIGAGICASYQTQTNSPRRARSVASQSIIAYTMSLGAENSVAYSNNSIAIPTNFTISVTTEILPVSMTKTSVDCTMYICGDSTECSNLLLQYGSFCTQLNRALTGIAVEQDKNTQEVFAQVKQIYKTPPIKDFGGFNFSQILPDPSKPSKRSFIEDLLFNKVTLADAGFIKQYGDCLGDIAARDLICAQKFNGLTVLPPLLTDEMIAQYTSALLAGTITSGWTFGAGAALQIPFAMQMAYRFNGIGVTQNVLYENQKLIANQFNSAIGKIQDSLSSTASALGKLQDVVNQNAQALNTLVKQLSSNFGAISSVLNDILSRLDPPEAEVQIDRLITGRLQSLQTYVTQQLIRAAEIRASANLAATKMSECVLGQSKRVDFCGKGYHLMSFPQSAPHGVVFLHVTYVPAQEKNFTTAPAICHDGKAHFPREGVFVSNGTHWFVTQRNFYEPQIITTDNTFLSGNCDVVIGIVNNTVYDPLQPELDSFKEELDKYFKNHTSPDVDLGDISGINASVVNIQKEIDRLNEVAKNLNESLIDLQELGKYEQYIKGGGGSDIIKLLNEQVNKEMQSSNLYMSMSSWCYTHSLDGAGLFLFDHAAEEYEHAKKLIIFLNENNVPVQLTSISAPEHKFEGLTQIFQKAYEHEQHISESINNIVDHAIKSKDHATFNFLQWYVAEQHEEEVLFKDILDKIELIGNENHGLYLADQYVKGIAKSRKS

SEQ ID NO: 4755 - protein, 1379 aa, Artificial Sequence
  SARS-CoV-2/USA/UT-00034/2020__EPI_ISL_417977 spike protein (1-1211)(K986P_V987P) Ferritin construct
MFVFLVLLPLVSSQCVNLTTRTQLPPAYTNSFTRGVYYPDKVFRSSVLHSTQDLFLPFFSNVTWFHAIHVSGTNGTKRFDNPVLPFNDGVYFASTEKSNIIRGWIFGTTLDSKTQSLLIVNNATNVVIKVCEFQFCNDPFLGVYYYKNNKSWMESEFRVYSSANNCTFEYVSQPFLMDLEGKQGNFKNLREFVFKNIDGYFKIYSKHTPINLVRDLPQGFSALEPLVDLPIGINITRFQTLLALHRSYLTPGDSSSGWTAGAAAYYVGYLQPRTFLLKYNENGTITDAVDCALDPLSETKCTLKSFTVEKGIYQTSNFRVQPTESIVRFPNITNLCPFGEVFNATRFASVYAWNRKRISNCVADYSVLYNSASFSTFKCYGVSPTKLNDLCFTNVYADSFVIRGDEVRQIAPGQTGKIADYNYKLPDDFTGCVIAWNSNNLDSKVGGNYNYLYRLFRKSNLKPFERDISTEIYQAGSTPCNGVEGFNCYFPLQSYGFQPTNGVGYQPYRVVVLSFELLHAPATVCGPKKSTNLVKNKCVNFNFNGLTGTGVLTESNKKFLPFQQFGRDIADTTDAVRDPQTLEILDITPCSFGGVSVITPGTNTSNQVAVLYQGVNCTEVPVAIHADQLTPTWRVYSTGSNVFQTRAGCLIGAEHVNNSYECDIPIGAGICASYQTQTNSPRRARSVASQSIIAYTMSLGAENSVAYSNNSIAIPTNFTISVTTEILPVSMTKTSVDCTMYICGDSTECSNLLLQYGSFCTQLNRALTGIAVEQDKNTQEVFAQVKQIYKTPPIKDFGGFNFSQILPDPSKPSKRSFIEDLLFNKVTLADAGFIKQYGDCLGDIAARDLICAQKFNGLTVLPPLLTDEMIAQYTSALLAGTITSGWTFGAGAALQIPFAMQMAYRFNGIGVTQNVLYENQKLIANQFNSAIGKIQDSLSSTASALGKLQDVVNQNAQALNTLVKQLSSNFGAISSVLNDILSRLDPPEAEVQIDRLITGRLQSLQTYVTQQLIRAAEIRASANLAATKMSECVLGQSKRVDFCGKGYHLMSFPQSAPHGVVFLHVTYVPAQEKNFTTAPAICHDGKAHFPREGVFVSNGTHWFVTQRNFYEPQIITTDNTFVSGNCDVVIGIVNNTVYDPLQPELDSFKEELDKYFKNHTSPDVDLGDISGINASVVNIQKEIDRLNEVAKNLNESLIDLQELGKYEQYIKGGGGSDIIKLLNEQVNKEMQSSNLYMSMSSWCYTHSLDGAGLFLFDHAAEEYEHAKKLIIFLNENNVPVQLTSISAPEHKFEGLTQIFQKAYEHEQHISESINNIVDHAIKSKDHATFNFLQWYVAEQHEEEVLFKDILDKIELIGNENHGLYLADQYVKGIAKSRKS

SEQ ID NO: 4756 - protein, 1379 aa, Artificial Sequence
  SARS-CoV-2/USA/UT-00033/2020__EPI_ISL_417976 spike protein (1-1211)(K986P_V987P) Ferritin construct
MFVFLVLLPLVSSQCVNLTTRTQLPPAYTNSFTRGVYYPDKVFRSSVLHSTQDLFLPFFSNVTWFHAIHVSGTNGTKRFDNPVLPFNDGVYFASTEKSNIIRGWIFGTTLDSKTQSLLIVNNATNVVIKVCEFQFCNDPFLGVYYHKNNKSWMESEFRVYSSANNCTFEYVSQPFLMDLEGKQGNFKNLREFVFKNIDGYFKIYSKHTPINLVRDLPQGFSALEPLVDLPIGINITRFQTLLALHRSYLTPGDSSSGLTAGAAAYYVGYLQPRTFLLKYNENGTITDAVDCALDPLSETKCTLKSFTVEKGIYQTSNFRVQPTESIVRFPNITNLCPFGEVFNATRFASVYAWNRKRISNCVADYSVLYNSASFSTFKCYGVSPTKLNDLCFTNVYADSFVIRGDEVRQIAPGQTGKIADYNYKLPDDFTGCVIAWNSNNLDSKVGGNYNYLYRLFRKSNLKPFERDISTEIYQAGSTPCNGVEGFNCYFPLQSYGFQPTNGVGYQPYRVVVLSFELLHAPATVCGPKKSTNLVKNKCVNFNFNGLTGTGVLTESNKKFLPFQQFGRDIADTTDAVRDPQTLEILDITPCSFGGVSVITPGTNTSNQVAVLYQGVNCTEVPVAIHADQLTPTWRVYSTGSNVFQTRAGCLIGAEHVNNSYECDIPIGAGICASYQTQTNSPRRARSVASQSIIAYTMSLGAENSVAYSNNSIAIPTNFTISVTTEILPVSMTKTSVDCTMYICGDSTECSNLLLQYGSFCTQLNRALTGIAVEQDKNTQEVFAQVKQIYKTPPIKDFGGFNFSQILPDPSKPSKRSFIEDLLFNKVTLADAGFIKQYGDCLGDIAARDLICAQKFNGLTVLPPLLTDEMIAQYTSALLAGTITSGWTFGAGAALQIPFAMQMAYRFNGIGVTQNVLYENQKLIANQFNSAIGKIQDSLSSTASALGKLQDVVNQNAQALNTLVKQLSSNFGAISSVLNDILSRLDPPEAEVQIDRLITGRLQSLQTYVTQQLIRAAEIRASANLAATKMSECVLGQSKRVDFCGKGYHLMSFPQSAPHGVVFLHVTYVPAQEKNFTTAPAICHDGKAHFPREGVFVSNGTHWFVTQRNFYEPQIITTDNTFVSGNCDVVIGIVNNTVYDPLQPELDSFKEELDKYFKNHTSPDVDLGDISGINASVVNIQKEIDRLNEVAKNLNESLIDLQELGKYEQYIKGGGGSDIIKLLNEQVNKEMQSSNLYMSMSSWCYTHSLDGAGLFLFDHAAEEYEHAKKLIIFLNENNVPVQLTSISAPEHKFEGLTQIFQKAYEHEQHISESINNIVDHAIKSKDHATFNFLQWYVAEQHEEEVLFKDILDKIELIGNENHGLYLADQYVKGIAKSRKS

SEQ ID NO: 4757 - protein, 1379 aa, Artificial Sequence
  SARS-CoV-2/USA/WI-13/2020__EPI_ISL_417516 spike protein (1-1211)(K986P_V987P) Ferritin construct
MFVFLVLLPLVSSQCVNLTTRTQLPPAYTNSFTRGVYYPDKVFRSSVLHSTQDLFLPFFSNVTWFHAIHVSGTNGTKRFDNPVLPFNDGVYFASTEKSNIIRGWIFGTTLDSKTQSLLIVNNATNVVIKVCEFQFCNDPFLGVYYHKNNKSWMESEFRVYSSANNCTFEYVSQPFLMDLEGKQGNFKNLREFVFKNIDGYFKIYSKHTPINLVRDLPQGFSALEPLVDLPIGINITRFQTLLALHRSYLTPGDSSSGWTAGAAAYYVGYLQPRTFLLKYNENGTITDAVDCALDPLSETKCTLKSFTVEKGIYQTSNFRVLPTESIVRFPNITNLCPFGEVFNATRFASVYAWNRKRISNCVADYSVLYNSASFSTFKCYGVSPTKLNDLCFTNVYADSFVIRGDEVRQIAPGQTGKIADYNYKLPDDFTGCVIAWNSNNLDSKVGGNYNYLYRLFRKSNLKPFERDISTEIYQAGSTPCNGVEGFNCYFPLQSYGFQPTNGVGYQPYRVVVLSFELLHAPATVCGPKKSTNLVKNKCVNFNFNGLTGTGVLTESNKKFLPFQQFGRDIADTTDAVRDPQTLEILDITPCSFGGVSVITPGTNTSNQVAVLYQGVNCTEVPVAIHADQLTPTWRVYSTGSNVFQTRAGCLIGAEHVNNSYECDIPIGAGICASYQTQTNSPRRARSVASQSIIAYTMSLGAENSVAYSNNSIAIPTNFTISVTTEILPVSMTKTSVDCTMYICGDSTECSNLLLQYGSFCTQLNRALTGIAVEQDKNTQEVFAQVKQIYKTPPIKDFGGFNFSQILPDPSKPSKRSFIEDLLFNKVTLADAGFIKQYGDCLGDIAARDLICAQKFNGLTVLPPLLTDEMIAQYTSALLAGTITSGWTFGAGAALQIPFAMQMAYRFNGIGVTQNVLYENQKLIANQFNSAIGKIQDSLSSTASALGKLQDVVNQNAQALNTLVKQLSSNFGAISSVLNDILSRLDPPEAEVQIDRLITGRLQSLQTYVTQQLIRAAEIRASANLAATKMSECVLGQSKRVDFCGKGYHLMSFPQSAPHGVVFLHVTYVPAQEKNFTTAPAICHDGKAHFPREGVFVSNGTHWFVTQRNFYEPQIITTDNTFVSGNCDVVIGIVNNTVYDPLQPELDSFKEELDKYFKNHTSPDVDLGDISGINASVVNIQKEIDRLNEVAKNLNESLIDLQELGKYEQYIKGGGGSDIIKLLNEQVNKEMQSSNLYMSMSSWCYTHSLDGAGLFLFDHAAEEYEHAKKLIIFLNENNVPVQLTSISAPEHKFEGLTQIFQKAYEHEQHISESINNIVDHAIKSKDHATFNFLQWYVAEQHEEEVLFKDILDKIELIGNENHGLYLADQYVKGIAKSRKS

SEQ ID NO: 4758 - protein, 1378 aa, Artificial Sequence
  SARS-CoV-2/India/1-27/2020__EPI_ISL_413522 spike protein (1-1210)(K985P_V986P) Ferritin construct
MFVFLVLLPLVSSQCVNLTTRTQLPPAYTNSFTRGVYYPDKVFRSSVLHSTQDLFLPFFSNVTWFHAIHVSGTNGTKRFDNPVLPFNDGVYFASTEKSNIIRGWIFGTTLDSKTQSLLIVNNATNVVIKVCEFQFCNDPFLGVYHKNNKSWMESEFRVYSSANNCTFEYVSQPFLMDLEGKQGNFKNLREFVFKNIDGYFKIYSKHTPINLVRDLPQGFSALEPLVDLPIGINITRFQTLLALHRSYLTPGDSSSGWTAGAAAYYVGYLQPRTFLLKYNENGTITDAVDCALDPLSETKCTLKSFTVEKGIYQTSNFRVQPTESIVRFPNITNLCPFGEVFNATRFASVYAWNRKRISNCVADYSVLYNSASFSTFKCYGVSPTKLNDLCFTNVYADSFVIRGDEVIQIAPGQTGKIADYNYKLPDDFTGCVIAWNSNNLDSKVGGNYNYLYRLFRKSNLKPFERDISTEIYQAGSTPCNGVEGFNCYFPLQSYGFQPTNGVGYQPYRVVVLSFELLHAPATVCGPKKSTNLVKNKCVNFNFNGLTGTGVLTESNKKFLPFQQFGRDIADTTDAVRDPQTLEILDITPCSFGGVSVITPGTNTSNQVAVLYQDVNCTEVPVAIHADQLTPTWRVYSTGSNVFQTRAGCLIGAEHVNNSYECDIPIGAGICASYQTQTNSPRRARSVASQSIIAYTMSLGAENSVAYSNNSIAIPTNFTISVTTEILPVSMTKTSVDCTMYICGDSTECSNLLLQYGSFCTQLNRALTGIAVEQDKNTQEVFAQVKQIYKTPPIKDFGGFNFSQILPDPSKPSKRSFIEDLLFNKVTLADAGFIKQYGDCLGDIAARDLICAQKFNGLTVLPPLLTDEMIAQYTSALLAGTITSGWTFGAGAALQIPFAMQMAYRFNGIGVTQNVLYENQKLIANQFNSAIGKIQDSLSSTASALGKLQDVVNQNAQALNTLVKQLSSNFGAISSVLNDILSRLDPPEAEVQIDRLITGRLQSLQTYVTQQLIRAAEIRASANLAATKMSECVLGQSKRVDFCGKGYHLMSFPQSAPHGVVFLHVTYVPAQEKNFTTAPAICHDGKAHFPREGVFVSNGTHWFVTQRNFYEPQIITTDNTFVSGNCDVVIGIVNNTVYDPLQPELDSFKEELDKYFKNHTSPDVDLGDISGINASVVNIQKEIDRLNEVAKNLNESLIDLQELGKYEQYIKGGGGSDIIKLLNEQVNKEMQSSNLYMSMSSWCYTHSLDGAGLFLFDHAAEEYEHAKKLIIFLNENNVPVQLTSISAPEHKFEGLTQIFQKAYEHEQHISESINNIVDHAIKSKDHATFNFLQWYVAEQHEEEVLFKDILDKIELIGNENHGLYLADQYVKGIAKSRKS

SEQ ID NO: 4759 - protein, 1373 aa, Artificial Sequence
  SARS-CoV-2/pangolin/Guangxi/P4L/2017__EPI_ISL_410538 spike protein (1-1205)(K980P_V981P) Ferritin construct
MFVFLFVLPLVSSQCVNLTTRTGIPPGYTNSSTRGVYYPDKVFRSSILHLTQDLFLPFFSNVTWFNTINYQGGFKKFDNPVLPFNDGVYFASTEKSNIIRGWIFGTTLDARTQSLLIVNNATNVVIKVCEFQFCTDPFLGVYYHNNNKTWVENEFRVYSSANNCTFEYISQPFLMDLEGKQGNFKNLREFVFKNVDGYFKIYSKHTPIDLVRDLPRGFAALEPLVDLPIGINITRFQTLLALHRSYLTPGNLESGWTTGAAAYYVGYLQQRTFLLSYNQNGTITDAVDCSLDPLSETKCTLKSLTVEKGIYQTSNFRVQPTISIVRFPNITNLCPFGEVFNASKFASVYAWNRKRISNCVADYSVLYNSTSFSTFKCYGVSPTKLNDLCFTNVYADSFVVKGDEVRQIAPGQTGVIADYNYKLPDDFTGCVIAWNSVKQDALTGGNYGYLYRLFRKSKLKPFERDISTEIYQAGSTPCNGQVGLNCYYPLERYGFHPTTGVNYQPFRVVVLSFELLNGPATVCGPKLSTTLVKDKCVNFNFNGLTGTGVLTTSKKQFLPFQQFGRDISDTTDAVRDPQTLEILDITPCSFGGVSVITPGTNTSNQVAVLYQDVNCTEVPMAIHAEQLTPAWRVYSAGANVFQTRAGCLVGAEHVNNSYECDIPVGAGICASYHSMSSLRSVNQRSIIAYTMSLGAENSVAYSNNSIAIPTNFTISVTTEILPVSMTKTSVDCTMYICGDSIECSNLLLQYGSFCTQLNRALTGIAVEQDKNTQEVFAQVKQIYKTPPIKDFGGFNFSQILPDPSKPSKRSFIEDLLFNKVTLADAGFIKQYGDCLGDIAARDLICAQKFNGLTVLPPLLTDEMIAQYTSALLAGTITSGWTFGAGAALQIPFAMQMAYRFNGIGVTQNVLYENQKLIANQFNSAIGKIQDSLSSTASALGKLQDVVNQNAQALNTLVKQLSSNFGAISSVLNDILSRLDPPEAEVQIDRLITGRLQSLQTYVTQQLIRAAEIRASANLAATKMSECVLGQSKRVDFCGKGYHLMSFPQSAPHGVVFLHVTYVPAQEKNFTTAPAICHEGKAHFPREGVFVSNGTHWFITQRNFYEPQIITTDNTFVSGSCDVVIGIVNNTVYDPLQPELDSFKEELDKYFKNHTSPDVDLGDISGINASVVNIQKEIDRLNEVAKNLNESPIDLQELGKYEQYIKGGGGSDIIKLLNEQVNKEMQSSNLYMSMSSWCYTHSLDGAGLFLFDHAAEEYEHAKKLIIFLNENNVPVQLTSISAPEHKFEGLTQIFQKAYEHEQHISESINNIVDHAIKSKDHATFNFLQWYVAEQHEEEVLFKDILDKIELIGNENHGLYLADQYVKGIAKSRKS

SEQ ID NO: 4760 - protein, 1373 aa, Artificial Sequence
  SARS-CoV-2/pangolin/Guangxi/P5L/2017__EPI_ISL_410540 spike protein (1-1205)(K980P_V981P) Ferritin construct
MFVFLFVLPLVSSQCVNLTTRTGIPPGYTNSSTRGVYYPDKVFRSSILHLTQDLFLPFFSNVTWFNTINYQGGFKKFDNPVLPFNDGVYFASTEKSNIIRGWIFGTTLDARTQSLLIVNNATNVVIKVCEFQFCTDPFLGVYYHNNNKTWVENEFRVYSSANNCTFEYISQPFLMDLEGKQGNFKNLREFVFKNVDGYFKIYSKHTPIDLVRDLPRGFAALEPLVDLPIGINITRFQTLLALHRSYLTPGKLESGWTTGAAAYYVGYLQQRTFLLSYNQNGTITDAVDCSLDPLSETKCTLKSLTVEKGIYQTSNFRVQPTISIVRFPNITNLCPFGEVFNASKFASVYAWNRKRISNCVADYSVLYNSTSFSTFKCYGVSPTKLNDLCFTNVYADSFVVKGDEVRQIAPGQTGVIADYNYKLPDDFTGCVIAWNSVKQDALTGGNYGYLYRLFRKSKLKPFERDISTEIYQAGSTPCNGQVGLNCYYPLERYGFHPTTGVNYQPFRVVVLSFELLNGPATVCGPKLSTTLVKDKCVNFNFNGLTGTGVLTTSKKQFLPFQQFGRDISDTTDAVRDPQTLEILDITPCSFGGVSVITPGTNTSNQVAVLYQDVNCTEVPMAIHAEQLTPAWRVYSAGANVFQTRAGCLVGAEHVNNSYECDIPVGAGICASYHSMSSFRSVNQRSIIAYTMSLGAENSVAYSNNSIAIPTNFTISVTTEILPVSMTKTSVDCTMYICGDSIECSNLLLQYGSFCTQLNRALTGIAVEQDKNTQEVFAQVKQIYKTPPIKDFGGFNFSQILPDPSKPSKRSFIEDLLFNKVTLADAGFIKQYGDCLGDIAARDLICAQKFNGLTVLPPLLTDEMIAQYTSALLAGTITSGWTFGAGAALQIPFAMQMAYRFNGIGVTQNVLYENQKLIANQFNSAIGKIQDSLSSTASALGKLQDVVNQNAQALNTLVKQLSSNFGAISSVLNDILSRLDPPEAEVQIDRLITGRLQSLQTYVTQQLIRAAEIRASANLAATKMSECVLGQSKRVDFCGKGYHLMSFPQSAPHGVVFLHVTYVPAQEKNFTTAPAICHEGKAHFPREGVFVSNGTHWFITQRNFYEPQIITTDNTFVSGSCDVVIGIVNNTVYDPLQPELDSFKEELDKYFKNHTSPDVDLGDISGINASVVNIQKEIDRLNEVAKNLNESLIDLQELGKYEQYIKGGGGSDIIKLLNEQVNKEMQSSNLYMSMSSWCYTHSLDGAGLFLFDHAAEEYEHAKKLIIFLNENNVPVQLTSISAPEHKFEGLTQIFQKAYEHEQHISESINNIVDHAIKSKDHATFNFLQWYVAEQHEEEVLFKDILDKIELIGNENHGLYLADQYVKGIAKSRKS

SEQ ID NO: 4761 - protein, 1373 aa, Artificial Sequence
  SARS-CoV-2/pangolin/Guangxi/P5E/2017__EPI_ISL_410541 spike protein (1-1205)(K980P_V981P) Ferritin construct
MFVFLFVLPLVSSQCVNLTTRTGIPPGYTNSSTRGVYYPDKVFRSSILHLTQDLFLPFFSNVTWFNTITYQGGSKKFDNPVLPFNDGVYFASTEKSNIIRGWIFGTTLDARTQSLLIVNNATNVVIKVCEFQFCTDPFLGVYYHNNNKTWVENEFRVYSSANNCTFEYISQPFLMDLEGKQGNFKNLREFVFKNVDGYFKIYSKHTPIDLVRDLPRGFAALEPLVDLPIGINITRFQTLLALHRSYLTPGKLESGWTTGAAAYYVGYLQQRTFLLSYNQNGTITDAVDCSLDPLSETKCTLKSLTVEKGIYQTSNFRVQPTISIVRFPNITNLCPFGEVFNASKFASVYAWNRKRISNCVADYSVLYNSTSFSTFKCYGVSPTKLNDLCFTNVYADSFVVKGDEVRQIAPGQTGVIADYNYKLPDDFTGCVIAWNSVKQDALTGDNYGYLYRLFRKSKLKPFERDISTEIYQAGSTPCNGQVGLNCYYPLERYGFHPTTGVNYQPFRVVVLSFELLNGPATVCGPKLSTTLVKDKCVNFNFNGLTGTGVLTTSKKQFLPFQQFGRDISDTTDAVRDPQTLEILDITPCSFGGVSVITPGTNTSNQVAVLYQDVNCTEVPMAIHAEQLTPAWRVYSAGANVFQTRAGCLVGAEHVNNSYECDIPVGAGICASYHSMSSFRSVNQRSIIAYTMSLGAENSVAYSNNSIAIPTNFTISVTTEILPVSMTKTSVDCTMYICGDSIECSNLLLQYGSFCTQLNRALTGIAVEQDKNTQEVFAQVKQIYKTPPIKDFGGFNFSQILPDPSKPSKRSFIEDLLFNKVTLADAGFIKQYGDCLGDIAARDLICAQKFNGLTVLPPLLTDEMIAQYTSALLAGTITSGWTFGAGAALQIPFAMQMAYRFNGIGVTQNVLYENQKLIANQFNSAIGKIQDSLSSTASALGKLQDVVNQNAQALNTLVKQLSSNFGAISSVLNDILSRLDPPEAEVQIDRLITGRLQSLQTYVTQQLIRAAEIRASANLAATKMSECVLGQSKRVDFCGKGYHLMSFPQSAPHGVVFLHVTYVPAQEKNFTTAPAICHEGKAHFPREGVFVSNGTHWFITQRNFYEPQIITTDNTFVSGSCDVVIGIVNNTVYDPLQPELDSFKEELDKYFKNHTSPDVDLGDISGINASVVNIQKEIDRLNEVAKNLNESLIDLQELGKYEQYIKGGGGSDIIKLLNEQVNKEMQSSNLYMSMSSWCYTHSLDGAGLFLFDHAAEEYEHAKKLIIFLNENNVPVQLTSISAPEHKFEGLTQIFQKAYEHEQHISESINNIVDHAIKSKDHATFNFLQWYVAEQHEEEVLFKDILDKIELIGNENHGLYLADQYVKGIAKSRKS

SEQ ID NO: 4762 - protein, 1371 aa, Artificial Sequence
  SARS-CoV-2/pangolin/Guangxi/P1E/2017__EPI_ISL_410539 spike protein (1-1203)(K978P_V979P) Ferritin construct
MFVFLFVLPLVSSQCVNLTTRTGIQPGYTNSSTRGVYYPDKVFRSSILHLTQDLFLPFFSNVTWFNTINYQGGFKKFDNPVLPFNDGVYFASTEKSNIIRGWIFGTTLDARTQSLLIVNNATNVVIKVCEFQFCTDPFLGVYYHNNNKTWVENEFRVYSSANNCTFEYISQPFLMDLEGKQGNFKNLREFVFKNVDGYFKIYSKHTPIDLVRDLPRGFAALEPLVDLPIGINITRFQTLLALHRSYLTPGKLESGWTTGAAAYYVGYLQQRTFLLSYNQNGTITDAVDCSLDPLSETKCTLKSLTVEKGIYQTSNFRVQPTISIVRFPNITNLCPFGEVFNASKFASVYAWNRKRISNCVADYSVLYNSTSFSTFKCYGVSPTKLNDLCFTNVYADSFVVKGDEVRQIAPGQTGVIADYNYKLPDDFTGCVIAWNSVKQDALTGGNYLYRLFRKSKLKPFERDISTEIYQAGSTPCNGQVGLNCYYPLERYGFHPTTGVNYQPFRVVVLSFELLNGPATVCGPKLSTTLVKDKCVNFNFNGLTGTGVLTTSKKQFLPFQQFGRDISDTTDAVRDPQTLEILDITPCSFGGVSVITPGTNTSNQVAVLYQDVNCTEVPMAIHAEQLTPAWRVYSAGANVFQTRAGCLVGAEHVNNSYECDIPVGAGICASYHSMSSLRSVNQRSIIAYTMSLGAENSVAYSNNSIAIPTNFTISVTTEILPVSMTKTSVDCTMYICGDSIECSNLLLQYGSFCTQLNRALTGIAVEQDKNTQEVFAQVKQIYKTPPIKDFGGFNFSQILPDPSKPSKRSFIEDLLFNKVTLADAGFIKQYGDCLGDIAARDLICAQKFNGLTVLPPLLTDEMIAQYTSALLAGTITSGWTFGAGAALQIPFAMQMAYRFNGIGVTQNVLYENQKLIANQFNSAIGKIQDSLSSTASALGKLQDVVNQNAQALNTLVKQLSSNFGAISSVLNDILSRLDPPEAEVQIDRLITGRLQSLQTYVTQQLIRAAEIRASANLAATKMSECVLGQSKRVDFCGKGYHLMSFPQSAPHGVVFLHVTYVPAQEKNFTTAPAICHEGKAHFPREGVFVSNGTHWFITQRNFYEPQIITTDNTFVSGSCDVVIGIVNNTVYDPLQPELDSFKEELDKYFKNHTSPDVDLGDISGINASVVNIQKEIDRLNEVAKNLNESLIDLQELGKYEQYIKGGGGSDIIKLLNEQVNKEMQSSNLYMSMSSWCYTHSLDGAGLFLFDHAAEEYEHAKKLIIFLNENNVPVQLTSISAPEHKFEGLTQIFQKAYEHEQHISESINNIVDHAIKSKDHATFNFLQWYVAEQHEEEVLFKDILDKIELIGNENHGLYLADQYVKGIAKSRKS

SEQ ID NO: 4763 - protein, 1379 aa, Artificial Sequence
  SARS-CoV-2/Wuhan/WIV05/2019__EPI_ISL_402128 spike protein (1-1211)(K986P_V987P_T887W_A1020W) Ferritin construct
MFVFLVLLPLVSSQCVNLTTRTQLPPAYTNSFTRGVYYPDKVFRSSVLHSTQDLFLPFFSNVTWFHAIHVSGTNGTKRFDNPVLPFNDGVYFASTEKSNIIRGWIFGTTLDSKTQSLLIVNNATNVVIKVCEFQFCNDPFLGVYYHKNNKSWMESEFRVYSSANNCTFEYVSQPFLMDLEGKQGNFKNLREFVFKNIDGYFKIYSKHTPINLVRDLPQGFSALEPLVDLPIGINITRFQTLLALHRSYLTPGDSSSGWTAGAAAYYVGYLQPRTFLLKYNENGTITDAVDCALDPLSETKCTLKSFTVEKGIYQTSNFRVQPTESIVRFPNITNLCPFGEVFNATRFASVYAWNRKRISNCVADYSVLYNSASFSTFKCYGVSPTKLNDLCFTNVYADSFVIRGDEVRQIAPGQTGKIADYNYKLPDDFTGCVIAWNSNNLDSKVGGNYNYLYRLFRKSNLKPFERDISTEIYQAGSTPCNGVEGFNCYFPLQSYGFQPTNGVGYQPYRVVVLSFELLHAPATVCGPKKSTNLVKNKCVNFNFNGLTGTGVLTESNKKFLPFQQFGRDIADTTDAVRDPQTLEILDITPCSFGGVSVITPGTNTSNQVAVLYQDVNCTEVPVAIHADQLTPTWRVYSTGSNVFQTRAGCLIGAEHVNNSYECDIPIGAGICASYQTQTNSPRRARSVASQSIIAYTMSLGAENSVAYSNNSIAIPTNFTISVTTEILPVSMTKTSVDCTMYICGDSTECSNLLLQYGSFCTQLNRALTGIAVEQDKNTQEVFAQVKQIYKTPPIKDFGGFNFSQILPDPSKPSKRSFIEDLLFNKVTLADAGFIKQYGDCLGDIAARDLICAQKFNGLTVLPPLLTDEMIAQYTSALLAGTITSGWWFGAGAALQIPFAMQMAYRFNGIGVTQNVLYENQKLIANQFNSAIGKIQDSLSSTASALGKLQDVVNQNAQALNTLVKQLSSNFGAISSVLNDILSRLDPPEAEVQIDRLITGRLQSLQTYVTQQLIRAAEIRWSANLAATKMSECVLGQSKRVDFCGKGYHLMSFPQSAPHGVVFLHVTYVPAQEKNFTTAPAICHDGKAHFPREGVFVSNGTHWFVTQRNFYEPQIITTDNTFVSGNCDVVIGIVNNTVYDPLQPELDSFKEELDKYFKNHTSPDVDLGDISGINASVVNIQKEIDRLNEVAKNLNESLIDLQELGKYEQYIKGGGGSDIIKLLNEQVNKEMQSSNLYMSMSSWCYTHSLDGAGLFLFDHAAEEYEHAKKLIIFLNENNVPVQLTSISAPEHKFEGLTQIFQKAYEHEQHISESINNIVDHAIKSKDHATFNFLQWYVAEQHEEEVLFKDILDKIELIGNENHGLYLADQYVKGIAKSRKS

SEQ ID NO: 4764 - protein, 1375 aa, Artificial Sequence
  SARS-CoV-2/bat/Yunnan/RaTG13/2013__EPI_ISL_402131 spike protein (1-1207)(K982P_V983P_T883W_A1016W) Ferritin construct
MFVFLVLLPLVSSQCVNLTTRTQLPPAYTNSSTRGVYYPDKVFRSSVLHLTQDLFLPFFSNVTWFHAIHVSGTNGIKRFDNPVLPFNDGVYFASTEKSNIIRGWIFGTTLDSKTQSLLIVNNATNVVIKVCEFQFCNDPFLGVYYHKNNKSWMESEFRVYSSANNCTFEYVSQPFLMDLEGKQGNFKNLREFVFKNIDGYFKIYSKHTPINLVRDLPPGFSALEPLVDLPIGINITRFQTLLALHRSYLTPGDSSSGWTAGAAAYYVGYLQPRTFLLKYNENGTITDAVDCALDPLSETKCTLKSFTVEKGIYQTSNFRVQPTDSIVRFPNITNLCPFGEVFNATTFASVYAWNRKRISNCVADYSVLYNSTSFSTFKCYGVSPTKLNDLCFTNVYADSFVITGDEVRQIAPGQTGKIADYNYKLPDDFTGCVIAWNSKHIDAKEGGNFNYLYRLFRKANLKPFERDISTEIYQAGSKPCNGQTGLNCYYPLYRYGFYPTDGVGHQPYRVVVLSFELLNAPATVCGPKKSTNLVKNKCVNFNFNGLTGTGVLTESNKKFLPFQQFGRDIADTTDAVRDPQTLEILDITPCSFGGVSVITPGTNASNQVAVLYQDVNCTEVPVAIHADQLTPTWRVYSTGSNVFQTRAGCLIGAEHVNNSYECDIPIGAGICASYQTQTNSRSVASQSIIAYTMSLGAENSVAYSNNSIAIPTNFTISVTTEILPVSMTKTSVDCTMYICGDSTECSNLLLQYGSFCTQLNRALTGIAVEQDKNTQEVFAQVKQIYKTPPIKDFGGFNFSQILPDPSKPSKRSFIEDLLFNKVTLADAGFIKQYGDCLGDIAARDLICAQKFNGLTVLPPLLTDEMIAQYTSALLAGTITSGWWFGAGAALQIPFAMQMAYRFNGIGVTQNVLYENQKLIANQFNSAIGKIQDSLSSTASALGKLQDVVNQNAQALNTLVKQLSSNFGAISSVLNDILSRLDPPEAEVQIDRLITGRLQSLQTYVTQQLIRAAEIRWSANLAATKMSECVLGQSKRVDFCGKGYHLMSFPQSAPHGVVFLHVTYVPAQEKNFTTAPAICHDGKAHFPREGVFVSNGTHWFVTQRNFYEPQIITTDNTFVSGSCDVVIGIVNNTVYDPLQPELDSFKEELDKYFKNHTSPDVDLGDISGINASVVNIQKEIDRLNEVAKNLNESLIDLQELGKYEQYIKGGGGSDIIKLLNEQVNKEMQSSNLYMSMSSWCYTHSLDGAGLFLFDHAAEEYEHAKKLIIFLNENNVPVQLTSISAPEHKFEGLTQIFQKAYEHEQHISESINNIVDHAIKSKDHATFNFLQWYVAEQHEEEVLFKDILDKIELIGNENHGLYLADQYVKGIAKSRKS

SEQ ID NO: 4765 - protein, 1379 aa, Artificial Sequence
  SARS-CoV-2/Wuhan/HBCDC-HB-01/2019__EPI_ISL_402132 spike protein (1-1211)(K986P_V987P_T887W_A1020W) Ferritin construct
MFVFLVLLPLVSSQCVNLTTRTQLPPAYTNSITRGVYYPDKVFRSSVLHSTQDLFLPFFSNVTWFHAIHVSGTNGTKRFDNPVLPFNDGVYFASTEKSNIIRGWIFGTTLDSKTQSLLIVNNATNVVIKVCEFQFCNDPFLGVYYHKNNKSWMESEFRVYSSANNCTFEYVSQPFLMDLEGKQGNFKNLREFVFKNIDGYFKIYSKHTPINLVRDLPQGFSALEPLVDLPIGINITRFQTLLALHRSYLTPGDSSSGWTAGAAAYYVGYLQPRTFLLKYNENGTITDAVDCALDPLSETKCTLKSFTVEKGIYQTSNFRVQPTESIVRFPNITNLCPFGEVFNATRFASVYAWNRKRISNCVADYSVLYNSASFSTFKCYGVSPTKLNDLCFTNVYADSFVIRGDEVRQIAPGQTGKIADYNYKLPDDFTGCVIAWNSNNLDSKVGGNYNYLYRLFRKSNLKPFERDISTEIYQAGSTPCNGVEGFNCYFPLQSYGFQPTNGVGYQPYRVVVLSFELLHAPATVCGPKKSTNLVKNKCVNFNFNGLTGTGVLTESNKKFLPFQQFGRDIADTTDAVRDPQTLEILDITPCSFGGVSVITPGTNTSNQVAVLYQDVNCTEVPVAIHADQLTPTWRVYSTGSNVFQTRAGCLIGAEHVNNSYECDIPIGAGICASYQTQTNSPRRARSVASQSIIAYTMSLGAENSVAYSNNSIAIPTNFTISVTTEILPVSMTKTSVDCTMYICGDSTECSNLLLQYGSFCTQLNRALTGIAVEQDKNTQEVFAQVKQIYKTPPIKDFGGFNFSQILPDPSKPSKRSFIEDLLFNKVTLADAGFIKQYGDCLGDIAARDLICAQKFNGLTVLPPLLTDEMIAQYTSALLAGTITSGWWFGAGAALQIPFAMQMAYRFNGIGVTQNVLYENQKLIANQFNSAIGKIQDSLSSTASALGKLQDVVNQNAQALNTLVKQLSSNFGAISSVLNDILSRLDPPEAEVQIDRLITGRLQSLQTYVTQQLIRAAEIRWSANLAATKMSECVLGQSKRVDFCGKGYHLMSFPQSAPHGVVFLHVTYVPAQEKNFTTAPAICHDGKAHFPREGVFVSNGTHWFVTQRNFYEPQIITTDNTFVSGNCDVVIGIVNNTVYDPLQPELDSFKEELDKYFKNHTSPDVDLGDISGINASVVNIQKEIDRLNEVAKNLNESLIDLQELGKYEQYIKGGGGSDIIKLLNEQVNKEMQSSNLYMSMSSWCYTHSLDGAGLFLFDHAAEEYEHAKKLIIFLNENNVPVQLTSISAPEHKFEGLTQIFQKAYEHEQHISESINNIVDHAIKSKDHATFNFLQWYVAEQHEEEVLFKDILDKIELIGNENHGLYLADQYVKGIAKSRKS

SEQ ID NO: 4766 - protein, 1379 aa, Artificial Sequence
  SARS-CoV-2/Guangdong/20SF028/2020__EPI_ISL_403936 spike protein (1-1211)(K986P_V987P_T887W_A1020W) Ferritin construct
MFVFLVLLPLVSSQCVNLTTRTQLPPAYTNSFTRGVYYPDKVFRSSVLYSTQDLFLPFFSNVTWFHAIHVSGTNGTKRFDNPVLPFNDGVYFASTEKSNIIRGWIFGTTLDSKTQSLLIVNNATNVVIKVCEFQFCNDPFLGVYYHKNNKSWMESEFRVYSSANNCTFEYVSQPFLMDLEGKQGNFKNLREFVFKNIDGYFKIYSKHTPINLVRDLPQGFSALEPLVDLPIGINITRFQTLLALHRSYLTPGDSSSGWTAGAAAYYVGYLQPRTFLLKYNENGTITDAVDCALDPLSETKCTLKSFTVEKGIYQTSNFRVQPTESIVRFPNITNLCPFGEVFNATRFASVYAWNRKRISNCVADYSVLYNSASFSTFKCYGVSPTKLNDLCFTNVYADSFVIRGDEVRQIAPGQTGKIADYNYKLPDDFTGCVIAWNSNNLDSKVGGNYNYLYRLFRKSNLKPFERDISTEIYQAGSTPCNGVEGFNCYFPLQSYGFQPTNGVGYQPYRVVVLSFELLHAPATVCGPKKSTNLVKNKCVNFNFNGLTGTGVLTESNKKFLPFQQFGRDIADTTDAVRDPQTLEILDITPCSFGGVSVITPGTNTSNQVAVLYQDVNCTEVPVAIHADQLTPTWRVYSTGSNVFQTRAGCLIGAEHVNNSYECDIPIGAGICASYQTQTNSPRRARSVASQSIIAYTMSLGAENSVAYSNNSIAIPTNFTISVTTEILPVSMTKTSVDCTMYICGDSTECSNLLLQYGSFCTQLNRALTGIAVEQDKNTQEVFAQVKQIYKTPPIKDFGGFNFSQILPDPSKPSKRSFIEDLLFNKVTLADAGFIKQYGDCLGDIAARDLICAQKFNGLTVLPPLLTDEMIAQYTSALLAGTITSGWWFGAGAALQIPFAMQMAYRFNGIGVTQNVLYENQKLIANQFNSAIGKIQDSLSSTASALGKLQDVVNQNAQALNTLVKQLSSNFGAISSVLNDILSRLDPPEAEVQIDRLITGRLQSLQTYVTQQLIRAAEIRWSANLAATKMSECVLGQSKRVDFCGKGYHLMSFPQSAPHGVVFLHVTYVPAQEKNFTTAPAICHDGKAHFPREGVFVSNGTHWFVTQRNFYEPQIITTDNTFVSGNCDVVIGIVNNTVYDPLQPELDSFKEELDKYFKNHTSPDVDLGDISGINASVVNIQKEIDRLNEVAKNLNESLIDLQELGKYEQYIKGGGGSDIIKLLNEQVNKEMQSSNLYMSMSSWCYTHSLDGAGLFLFDHAAEEYEHAKKLIIFLNENNVPVQLTSISAPEHKFEGLTQIFQKAYEHEQHISESINNIVDHAIKSKDHATFNFLQWYVAEQHEEEVLFKDILDKIELIGNENHGLYLADQYVKGIAKSRKS

SEQ ID NO: 4767 - protein, 1379 aa, Artificial Sequence
  SARS-CoV-2/Shenzhen/SZTH-001/2020__EPI_ISL_406592 spike protein (1-1211)(K986P_V987P_T887W_A1020W) Ferritin construct
MFVFLVLLPLVSSQCVNLTTRTQLPPAYTNSFTRGVYYPDKVFRSSVLHSTQDLFLPFFSNVTWFHAIHVSGTNGTKRFDNPVLPFNDGVYFASTEKSNIIRGWIFGTTLDSKTQSLLIVNNATNVVIKVCEFQFCNDPFLGVYYHKNNKSWMESEFRVYSSANNCTFEYVSQPFLMDLEGKQGNFKNLREFVFKNIDGYFKIYSKHTPINLVRDLPQGFSALEPLVDLPIGINITRFQTLLALHRSYLTPGDSSSGWTAGAAAYYVGYLQPRTFLLKYNENGTITDAVDCALDPLSETKCTLKSFTVEKGIYQTSNFRVQPTESIVRFPNITNLCPFGEVFNATRFASVYAWNRKRISNCVADYSVLYNSASFSTFKCYGVSPTKLNDLCFTNVYADSFVIRGDEVRQIAPGQTGKIADYNYKLPDDFTGCVIAWNSNNLDSKVGGNYNYLYRLFRKSNLKPFERDISTEIYQAGSTPCNGVEGFNCYFPLQSYGFQPTNGVGYQPYRVVVLSFELLHAPATVCGPKKSTNLVKNKCVNFNFNGLTGTGVLTESNKKFLPFQQFGRDIADTTDAVRDPQTLEILDITPCSFGGVSVITPGTNTSNQVAVLYQDVNCTEVPVAIHADQLTPTWRVYSTGSNVFQTRAGCLIGAEHVNNSYECDIPIGAGICASYQTQTNSPRRARSVASQSIIAYTMSLGAENSVAYSNNSIAIPTNFTISVTTEILPVSMTKTSVDCTMYICGDSTECSNLLLQYGSFCTQLNRALTGIAVEQDKNTQEVFAQVKQIYKTPPIKDFGGFNFSQILPDPSKPSKRSFIEDLLFNKVTLADAGFIKQYGDCLGDIAARDLICAQKFNGLTVLPPLLTDEMIAQYTSALLAGTITSGWWFGAGAALQIPFAMQMAYRFNGIGVTQNVLYENQKLIANQFNSAIGKIQDSLSSTASALGKLQDVVNQNAQALNTLVKQLSSNFGAISSVLNDILSRLDPPEAEVQIDRLITGRLQSLQTYVTQQLIRAAEIRWSANLAATKMSECVLGQSKRVDFCGKGYHLMSFPQSAPHGVVFLHVTYVPAQEKNFTTAPAICHDGKAHFPREGVFVSNGTHWFVTQRNFYEPQIITTDNTFVSGNCDVLIGIVNNTVYDPLQPELDSFKEELDKYFKNHTSPDVDLGDISGINASVVNIQKEIDRLNEVAKNLNESLIDLQELGKYEQYIKGGGGSDIIKLLNEQVNKEMQSSNLYMSMSSWCYTHSLDGAGLFLFDHAAEEYEHAKKLIIFLNENNVPVQLTSISAPEHKFEGLTQIFQKAYEHEQHISESINNIVDHAIKSKDHATFNFLQWYVAEQHEEEVLFKDILDKIELIGNENHGLYLADQYVKGIAKSRKS

SEQ ID NO: 4768 - protein, 1379 aa, Artificial Sequence
  SARS-CoV-2/Shenzhen/SZTH-004/2020__EPI_ISL_406595 spike protein (1-1211)(K986P_V987P_T887W_A1020W) Ferritin construct
MFVFLVLLPLVSSQCVNLTTRTQLPPAYTNSFTRGVYYPDKVFRSSVLHSTQDLFLPFFSNVTWFHAIHVSGTNGTKRFDNPVLPFNDGVYFASTEKSNIIRGWIFGTTLDSKTQSLLIVNNATNVVIKVCEFQFCNDPFLGVYYHKNNKSWMESEFRVYSSANNCTFEYVSQPFLMDLEGKQGNFKNLREFVFKNIDGYFKIYSKHTPINLVRDLPQGFSALEPLVDLPIGINITRFQTLLALHRSYLTPGDSSSGWTAGAAAYYVGYLQPRTFLLKYNENGTITDAVDCALDPLSETKCTLKSFTVEKGIYQTSNFRVQPTESIVRFPNITNLCPFGEVFNATRFASVYAWDRKRISNCVAYYSVLYNSASFSTFKCYGVSPTKLNDLCFTNVYADSFVIRGDEVRQIAPGQTGKIADYNYKLPDDFTGCVIAWNSNNLDSKVGGNYNYLYRLFRKSNLKPFERDISTEIYQAGSTPCNGVEGFNCYFPLQSYGFQPTNGVGYQPYRVVVLSFELLHAPATVCGPKKSTNLVKNKCVNFNFNGLTGTGVLTESNKKFLPFQQFGRDIADTTDAVRDPQTLEILDITPCSFGGVSVITPGTNTSNQVAVLYQDVNCTEVPVAIHADQLTPTWRVYSTGSNVFQTRAGCLIGAEHVNNSYECDIPIGAGICASYQTQTNSPRRARSVASQSIIAYTMSLGAENSVAYSNNSIAIPTNFTISVTTEILPVSMTKTSVDCTMYICGDSTECSNLLLQYGSFCTQLNRALTGIAVEQDKNTQEVFAQVKQIYKTPPIKDFGGFNFSQILPDPSKPSKRSFIEDLLFNKVTLADAGFIKQYGDCLGDIAARDLICAQKFNGLTVLPPLLTDEMIAQYTSALLAGTITSGWWFGAGAALQIPFAMQMAYRFNGIGVTQNVLYENQKLIANQFNSAIGKIQDSLSSTASALGKLQDVVNQNAQALNTLVKQLSSNFGAISSVLNDILSRLDPPEAEVQIDRLITGRLQSLQTYVTQQLIRAAEIRWSANLAATKMSECVLGQSKRVDFCGKGYHLMSFPQSAPHGVVFLHVTYVPAQEKNFTTAPAICHDGKAHFPREGVFVSNGTHWFVTQRNFYEPQIITTDNTFVSGNCDVVIGIVNNTVYDPLQPELDSFKEELDKYFKNHTSPDVDLGDISGINASVVNIQKEIDRLNEVAKNLNESLIDLQELGKYEQYIKGGGGSDIIKLLNEQVNKEMQSSNLYMSMSSWCYTHSLDGAGLFLFDHAAEEYEHAKKLIIFLNENNVPVQLTSISAPEHKFEGLTQIFQKAYEHEQHISESINNIVDHAIKSKDHATFNFLQWYVAEQHEEEVLFKDILDKIELIGNENHGLYLADQYVKGIAKSRKS

SEQ ID NO: 4769 - protein, 1379 aa, Artificial Sequence
  SARS-CoV-2/France/IDF0372/2020__EPI_ISL_406596 spike protein (1-1211)(K986P_V987P_T887W_A1020W) Ferritin construct
MFVFLVLLPLVSSQCVNLTTRTQLPPAYTNSFTRGVYYPDKVFRSSVLHSTQDLFLPFFSNVTWFHAIHVSGTNGTKRFDNPVLPFNDGVYFASTEKSNIIRGWIFGTTLDSKTQSLLIVNNATNVVIKVCEFQFCNDPFLGVYYHKNNKSWMESEFRVYSSANNCTFEYVSQPFLMDLEGKQGNFKNLREFVFKNIDGYFKIYSKHTPINLVRDLPQGFSALEPLVDLPIGINITRFQTLLALHRSYLTPGDSSSGWTAGAAAYYVGYLQPRTFLLKYNENGTITDAVDCALDPLSETKCTLKSFTVEKGIYQTSNFRVQPTESIVRFPNITNLCPFGEVFNATRFASVYAWNRKRISNCVADYSFLYNSASFSTFKCYGVSPTKLNDLCFTNVYADSFVIRGDEVRQIAPGQTGKIADYNYKLPDDFTGCVIAWNSNNLDSKVGGNYNYLYRLFRKSNLKPFERDISTEIYQAGSTPCNGVEGFNCYFPLQSYGFQPTNGVGYQPYRVVVLSFELLHAPATVCGPKKSTNLVKNKCVNFNFNGLTGTGVLTESNKKFLPFQQFGRDIADTTDAVRDPQTLEILDITPCSFGGVSVITPGTNTSNQVAVLYQDVNCTEVPVAIHADQLTPTWRVYSTGSNVFQTRAGCLIGAEHVNNSYECDIPIGAGICASYQTQTNSPRRARSVASQSIIAYTMSLGAENSVAYSNNSIAIPTNFTISVTTEILPVSMTKTSVDCTMYICGDSTECSNLLLQYGSFCTQLNRALTGIAVEQDKNTQEVFAQVKQIYKTPPIKDFGGFNFSQILPDPSKPSKRSFIEDLLFNKVTLADAGFIKQYGDCLGDIAARDLICAQKFNGLTVLPPLLTDEMIAQYTSALLAGTITSGWWFGAGAALQIPFAMQMAYRFNGIGVTQNVLYENQKLIANQFNSAIGKIQDSLSSTASALGKLQDVVNQNAQALNTLVKQLSSNFGAISSVLNDILSRLDPPEAEVQIDRLITGRLQSLQTYVTQQLIRAAEIRWSANLAATKMSECVLGQSKRVDFCGKGYHLMSFPQSAPHGVVFLHVTYVPAQEKNFTTAPAICHDGKAHFPREGVFVSNGTHWFVTQRNFYEPQIITTDNTFVSGNCDVVIGIVNNTVYDPLQPELDSFKEELDKYFKNHTSPDVDLGDISGINASVVNIQKEIDRLNEVAKNLNESLIDLQELGKYEQYIKGGGGSDIIKLLNEQVNKEMQSSNLYMSMSSWCYTHSLDGAGLFLFDHAAEEYEHAKKLIIFLNENNVPVQLTSISAPEHKFEGLTQIFQKAYEHEQHISESINNIVDHAIKSKDHATFNFLQWYVAEQHEEEVLFKDILDKIELIGNENHGLYLADQYVKGIAKSRKS

SEQ ID NO: 4770 - protein, 1379 aa, Artificial Sequence
  SARS-CoV-2/Australia/VIC01/2020__EPI_ISL_406844 spike protein (1-1211)(K986P_V987P_T887W_A1020W) Ferritin construct
MFVFLVLLPLVSSQCVNLTTRTQLPPAYTNSFTRGVYYPDKVFRSSVLHSTQDLFLPFFSNVTWFHAIHVSGTNGTKRFDNPVLPFNDGVYFASTEKSNIIRGWIFGTTLDSKTQSLLIVNNATNVVIKVCEFQFCNDPFLGVYYHKNNKSWMESEFRVYSSANNCTFEYVSQPFLMDLEGKQGNFKNLREFVFKNIDGYFKIYSKHTPINLVRDLPQGFSALEPLVDLPIGINITRFQTLLALHRRYLTPGDSSSGWTAGAAAYYVGYLQPRTFLLKYNENGTITDAVDCALDPLSETKCTLKSFTVEKGIYQTSNFRVQPTESIVRFPNITNLCPFGEVFNATRFASVYAWNRKRISNCVADYSVLYNSASFSTFKCYGVSPTKLNDLCFTNVYADSFVIRGDEVRQIAPGQTGKIADYNYKLPDDFTGCVIAWNSNNLDSKVGGNYNYLYRLFRKSNLKPFERDISTEIYQAGSTPCNGVEGFNCYFPLQSYGFQPTNGVGYQPYRVVVLSFELLHAPATVCGPKKSTNLVKNKCVNFNFNGLTGTGVLTESNKKFLPFQQFGRDIADTTDAVRDPQTLEILDITPCSFGGVSVITPGTNTSNQVAVLYQDVNCTEVPVAIHADQLTPTWRVYSTGSNVFQTRAGCLIGAEHVNNSYECDIPIGAGICASYQTQTNSPRRARSVASQSIIAYTMSLGAENSVAYSNNSIAIPTNFTISVTTEILPVSMTKTSVDCTMYICGDSTECSNLLLQYGSFCTQLNRALTGIAVEQDKNTQEVFAQVKQIYKTPPIKDFGGFNFSQILPDPSKPSKRSFIEDLLFNKVTLADAGFIKQYGDCLGDIAARDLICAQKFNGLTVLPPLLTDEMIAQYTSALLAGTITSGWWFGAGAALQIPFAMQMAYRFNGIGVTQNVLYENQKLIANQFNSAIGKIQDSLSSTASALGKLQDVVNQNAQALNTLVKQLSSNFGAISSVLNDILSRLDPPEAEVQIDRLITGRLQSLQTYVTQQLIRAAEIRWSANLAATKMSECVLGQSKRVDFCGKGYHLMSFPQSAPHGVVFLHVTYVPAQEKNFTTAPAICHDGKAHFPREGVFVSNGTHWFVTQRNFYEPQIITTDNTFVSGNCDVVIGIVNNTVYDPLQPELDSFKEELDKYFKNHTSPDVDLGDISGINASVVNIQKEIDRLNEVAKNLNESLIDLQELGKYEQYIKGGGGSDIIKLLNEQVNKEMQSSNLYMSMSSWCYTHSLDGAGLFLFDHAAEEYEHAKKLIIFLNENNVPVQLTSISAPEHKFEGLTQIFQKAYEHEQHISESINNIVDHAIKSKDHATFNFLQWYVAEQHEEEVLFKDILDKIELIGNENHGLYLADQYVKGIAKSRKS

SEQ ID NO: 4771 - protein, 1379 aa, Artificial Sequence
  SARS-CoV-2/Germany/BavPat1/2020__EPI_ISL_406862 spike protein (1-1211)(K986P_V987P_T887W_A1020W) Ferritin construct
MFVFLVLLPLVSSQCVNLTTRTQLPPAYTNSFTRGVYYPDKVFRSSVLHSTQDLFLPFFSNVTWFHAIHVSGTNGTKRFDNPVLPFNDGVYFASTEKSNIIRGWIFGTTLDSKTQSLLIVNNATNVVIKVCEFQFCNDPFLGVYYHKNNKSWMESEFRVYSSANNCTFEYVSQPFLMDLEGKQGNFKNLREFVFKNIDGYFKIYSKHTPINLVRDLPQGFSALEPLVDLPIGINITRFQTLLALHRSYLTPGDSSSGWTAGAAAYYVGYLQPRTFLLKYNENGTITDAVDCALDPLSETKCTLKSFTVEKGIYQTSNFRVQPTESIVRFPNITNLCPFGEVFNATRFASVYAWNRKRISNCVADYSVLYNSASFSTFKCYGVSPTKLNDLCFTNVYADSFVIRGDEVRQIAPGQTGKIADYNYKLPDDFTGCVIAWNSNNLDSKVGGNYNYLYRLFRKSNLKPFERDISTEIYQAGSTPCNGVEGFNCYFPLQSYGFQPTNGVGYQPYRVVVLSFELLHAPATVCGPKKSTNLVKNKCVNFNFNGLTGTGVLTESNKKFLPFQQFGRDIADTTDAVRDPQTLEILDITPCSFGGVSVITPGTNTSNQVAVLYQGVNCTEVPVAIHADQLTPTWRVYSTGSNVFQTRAGCLIGAEHVNNSYECDIPIGAGICASYQTQTNSPRRARSVASQSIIAYTMSLGAENSVAYSNNSIAIPTNFTISVTTEILPVSMTKTSVDCTMYICGDSTECSNLLLQYGSFCTQLNRALTGIAVEQDKNTQEVFAQVKQIYKTPPIKDFGGFNFSQILPDPSKPSKRSFIEDLLFNKVTLADAGFIKQYGDCLGDIAARDLICAQKFNGLTVLPPLLTDEMIAQYTSALLAGTITSGWWFGAGAALQIPFAMQMAYRFNGIGVTQNVLYENQKLIANQFNSAIGKIQDSLSSTASALGKLQDVVNQNAQALNTLVKQLSSNFGAISSVLNDILSRLDPPEAEVQIDRLITGRLQSLQTYVTQQLIRAAEIRWSANLAATKMSECVLGQSKRVDFCGKGYHLMSFPQSAPHGVVFLHVTYVPAQEKNFTTAPAICHDGKAHFPREGVFVSNGTHWFVTQRNFYEPQIITTDNTFVSGNCDVVIGIVNNTVYDPLQPELDSFKEELDKYFKNHTSPDVDLGDISGINASVVNIQKEIDRLNEVAKNLNESLIDLQELGKYEQYIKGGGGSDIIKLLNEQVNKEMQSSNLYMSMSSWCYTHSLDGAGLFLFDHAAEEYEHAKKLIIFLNENNVPVQLTSISAPEHKFEGLTQIFQKAYEHEQHISESINNIVDHAIKSKDHATFNFLQWYVAEQHEEEVLFKDILDKIELIGNENHGLYLADQYVKGIAKSRKS

SEQ ID NO: 4772 - protein, 1379 aa, Artificial Sequence
  SARS-CoV-2/Wuhan/HBCDC-HB-02/2020__EPI_ISL_412978 spike protein (1-1211)(K986P_V987P_T887W_A1020W) Ferritin construct
MFVFLVLLPLVSSQCVNLTTRTQLPPAYTNSFTRGVYYPDKVFRSSVLHSTQDLFLPFFSNVTWFHAIHVSGTNGTKRFDNPVLPFNDGVYFASTEKSNIIRGWIFGTTLDSKTQSLLIVNNATNVVIKVCEFQFCNDPFLGVYYHKNNKSWMESEFRVYSSANNCTFEYVSQPFLMDLEGKQGNFKNLREFVFKNIDGYFKIYSKHTPINLVRDLPQGFSALEPLVDLPIGINITRFQTLLALHRSYLTPGDSSSGWTAGAAAYYVGYLQPRTFLLKYNENGTITDAVDCALDPLSETKCTLKSFTVEKGIYQTSNFRVQPTESIVRFPNITNLCPFGEVFNATRFASVYAWNRKRISNCVADYSVLYNSASFSTFKCYGVSPTKLNDLCFTNVYADSFVIRGDEVRQIAPGQTGKIADYNYKLPDDFTGCVIAWNSNNLDSKVGGNYNYLYRLFRKSNLKPFERDISTEIYQAGSTPCNGVEGFNCYFPLQSYGFQPTNGVGYQPYRVVVLSFELLHAPATVCGPKKSTNLVKNKCVNFNFNGLTGTGVLTESNKKFLPFQQFGRDIADTTDAVRDPQTLEILDITPCSFGGVSVITPGTNTSNQVAVLYQDVNCTEVPVAIHADQLTPTWRVYSTGSNVFQTRAGCLIGAEHVNNSYECDIPIGAGICASYQTQTNSPRRARSVASQSIIAYTMSLGAENSVAYSNNSIAIPTNFTISVTTEILPVSMTKTSVDCTMYICGDSTECSNFLLQYGSFCTQLNRALTGIAVEQDKNTQEVFAQVKQIYKTPPIKDFGGFNFSQILPDPSKPSKRSFIEDLLFNKVTLADAGFIKQYGDCLGDIAARDLICAQKFNGLTVLPPLLTDEMIAQYTSALLAGTITSGWWFGAGAALQIPFAMQMAYRFNGIGVTQNVLYENQKLIANQFNSAIGKIQDSLSSTASALGKLQDVVNQNAQALNTLVKQLSSNFGAISSVLNDILSRLDPPEAEVQIDRLITGRLQSLQTYVTQQLIRAAEIRWSANLAATKMSECVLGQSKRVDFCGKGYHLMSFPQSAPHGVVFLHVTYVPAQEKNFTTAPAICHDGKAHFPREGVFVSNGTHWFVTQRNFYEPQIITTDNTFVSGNCDVVIGIVNNTVYDPLQPELDSFKEELDKYFKNHTSPDVDLGDISGINASVVNIQKEIDRLNEVAKNLNESLIDLQELGKYEQYIKGGGGSDIIKLLNEQVNKEMQSSNLYMSMSSWCYTHSLDGAGLFLFDHAAEEYEHAKKLIIFLNENNVPVQLTSISAPEHKFEGLTQIFQKAYEHEQHISESINNIVDHAIKSKDHATFNFLQWYVAEQHEEEVLFKDILDKIELIGNENHGLYLADQYVKGIAKSRKS

SEQ ID NO: 4773 - protein, 1379 aa, Artificial Sequence
  SARS-CoV-2/Australia/QLD02/2020__EPI_ISL_407896 spike protein (1-1211)(K986P_V987P_T887W_A1020W) Ferritin construct
MFVFLVLLPLVSSQCVNLTTRTQLPPAYTNSFTRGVYYPDKVFRSSVLHSTQDLFLPFFSNVTWFHAIHVSGTNGTKRFDNPVLPFNDGVYFASTEKSNIIRGWIFGTTLDSKTQSLLIVNNATNVVIKVCEFQFCNDPFLGVYYHKNNKSWMESEFRVYSSANNCTFEYVSQPFLMDLEGKQGNFKNLREFVFKNIDGYFKIYSKHTPINLVRDLPQGFSALEPLVDLPIGINITRFQTLLALHRSYLTPGDSSSGWTAGAAAYYVGYLQPRTFLLKYNENGTITDAVDCALDPLSETKCTLKSFTVEKGIYQTSNFRVQPTESIVRFPNITNLCPFGEVFNATRFASVYAWNRKRISNCVADYSVLYNSASFSTFKCYGVSPTKLNDLCFTNVYADSFVIRGDEVRQIAPGQTGKIADYNYKLPDDFTGCVIAWNSNNLDSKVGGNYNYLYRLFRKSNLKPFERDISTEIYQAGSTPCNGVEGFNCYFPLQSYGFQPTNGVGYQPYRVVVLSFELLHAPATVCGPKKSTNLVKNKCVNFNFNGLTGTGVLTESNKKFLPFQQFGRDIADTTDAVRDPQTLEILDITPCSFGGVSVITPGTNTSNQVAVLYQDVNCTEVPVAIHADQLTPTWRVYSTGSNVFQTRAGCLIGAEHVNNSYECDIPIGAGICASYQTQTNSPRRARSVASQSIIAYTMSLGAENSVAYSNNSIAIPTNFTISVTTEILPVSMTKTSVDCTMYICGDSTECSNLLLQYGSFCTQLNRALTGIAVEQDKNTQEVFAQVKQIYKTPPIKDFGGFNFSQILPDPSKPSKRSFIEDLLFNKVTLADAGFIKQYGDCLGDIAARDLICAQKFNGLTVLPPLLTDEMIAQYTSALLAGTITSGWWFGAGAALQIPFAMQMAYRFNGIGVTQNVLYENQKLIANQFNSAIGKIQDSLSSTASALGKLQDVVNQNAQALNTLVKQLSSNFGAISSVLNDILSRLDPPEAEVQIDRLITGRLQSLQTYVTQQLIRAAEIRWSANLAATKMSECVLGQSKRVDFCGKGYHLMSFPQSAPHGVVFLHVTYVPAQEKNFTTAPAICHDGKAHFPREGVFVSNGTHWFVTQRNFYEPQIITTDNTFVSGNCDVVIGIVNNTVYDPLQLELDSFKEELDKYFKNHTSPDVDLGDISGINASVVNIQKEIDRLNEVAKNLNESLIDLQELGKYEQYIKGGGGSDIIKLLNEQVNKEMQSSNLYMSMSSWCYTHSLDGAGLFLFDHAAEEYEHAKKLIIFLNENNVPVQLTSISAPEHKFEGLTQIFQKAYEHEQHISESINNIVDHAIKSKDHATFNFLQWYVAEQHEEEVLFKDILDKIELIGNENHGLYLADQYVKGIAKSRKS

SEQ ID NO: 4774 - protein, 1379 aa, Artificial Sequence
  SARS-CoV-2/India/1-31/2020__EPI_ISL_413523 spike protein (1-1211)(K986P_V987P_T887W_A1020W) Ferritin construct
MFVFLVLLPLVSSQCVNLTTRTQLPPAYTNSFTRGVYYPDKVFRSSVLHSTQDLFLPFFSNVTWFHAIHVSGTNGTKRFDNPVLPFNDGVYFASTEKSNIIRGWIFGTTLDSKTQSLLIVNNATNVVIKVCEFQFCNDPFLGVYYHKNNKSWMESEFRVYSSANNCTFEYVSQPFLMDLEGKQGNFKNLREFVFKNIDGYFKIYSKHTPINLVRDLPQGFSALEPLVDLPIGINITRFQTLLALHRSYLTPGDSSSGWTAGAAAYYVGYLQPRTFLLKYNENGTITDAVDCALDPLSETKCTLKSFTVEKGIYQTSNFRVQPTESIVRFPNITNLCPFGEVFNATRFASVYAWNRKRISNCVADYSVLYNSASFSTFKCYGVSPTKLNDLCFTNVYADSFVIRGDEVRQIAPGQTGKIADYNYKLPDDFTGCVIAWNSNNLDSKVGGNYNYLYRLFRKSNLKPFERDISTEIYQAGSTPCNGVEGFNCYFPLQSYGFQPTNGVGYQPYRVVVLSFELLHAPATVCGPKKSTNLVKNKCVNFNFNGLTGTGVLTESNKKFLPFQQFGRDIADTTDAVRDPQTLEILDITPCSFGGVSVITPGTNTSNQVAVLYQDVNCTEVPVAIHADQLTPTWRVYSTGSNVFQTRAGCLIGAEHVNNSYECDIPIGAGICASYQTQTNSPRRARSVASQSIIAYTMSLGAENSVAYSNNSIAIPTNFTISVTTEILPVSMTKTSVDCTMYICGDSTECSNLLLQYGSFCTQLNRALTGIAVEQDKNTQEVFAQVKQIYKTPPIKDFGGFNFSQILPDPSKPSKRSFIEDLLFNKVTLADAGFIKQYGDCLGDIAARDLICAQKFNGLTVLPPLLTDEMIAQYTSALLAGTITSGWWFGAGAALQIPFAMQMAYRFNGIGVTQNVLYENQKLIANQFNSVIGKIQDSLSSTASALGKLQDVVNQNAQALNTLVKQLSSNFGAISSVLNDILSRLDPPEAEVQIDRLITGRLQSLQTYVTQQLIRAAEIRWSANLAATKMSECVLGQSKRVDFCGKGYHLMSFPQSAPHGVVFLHVTYVPAQEKNFTTAPAICHDGKAHFPREGVFVSNGTHWFVTQRNFYEPQIITTDNTFVSGNCDVVIGIVNNTVYDPLQPELDSFKEELDKYFKNHTSPDVDLGDISGINASVVNIQKEIDRLNEVAKNLNESLIDLQELGKYEQYIKGGGGSDIIKLLNEQVNKEMQSSNLYMSMSSWCYTHSLDGAGLFLFDHAAEEYEHAKKLIIFLNENNVPVQLTSISAPEHKFEGLTQIFQKAYEHEQHISESINNIVDHAIKSKDHATFNFLQWYVAEQHEEEVLFKDILDKIELIGNENHGLYLADQYVKGIAKSRKS

SEQ ID NO: 4775 - protein, 1379 aa, Artificial Sequence
  SARS-CoV-2/Guangdong/GD2020087-P0008/2020__EPI_ISL_413863 spike protein (1-1211)(K986P_V987P_T887W_A1020W) Ferritin construct
MFVFLVLLPLVSSQCVNLTTRTQLPPAYTNSFTRGVYYPDKVFRSSVLHSTQDLFLPFFSNVTWFHAIHVSGTNGTKRFDNPVLPFNDGVYFASTEKSNIIRGWIFGTTLDSKTQSLLIVNNATNVVIKVCEFQFCNDPFLGVYYHKNNKSWMESEFRVYSSANNCTFEYVSQPFLMDLEGKQGNFKNLREFVFKNIDGYFKIYSKHTPINLVRDLPQGFSALEPLVDLPIGINITRFQTLLALHRSYLTPGDSSSGWTAGAAAYYVGYLQPRTFLLKYNENGTITDAVDCALDPLSETKCTLKSFTVEKGIYQTSNFRVQPTESIVRFPNITNLCPFGEVFNATRFASVYAWNRKRISNCVADYSVLYNSASFSTFKCYGVSPTKLNDLCFTNVYADSFVIRGDEVREIAPGQTGKIADYNYKLPDDFTGCVIAWNSNNLDSKVGGNYNYLYRLFRKSNLKPFERDISTEIYQAGSTPCNGVEGFNCYFPLQSYGFQPTNGVGYQPYRVVVLSFELLHAPATVCGPKKSTNLVKNKCVNFNFNGLTGTGVLTESNKKFLPFQQFGRDIADTTDAVRDPQTLEILDITPCSFGGVSVITPGTNTSNQVAVLYQDVNCTEVPVAIHADQLTPTWRVYSTGSNVFQTRAGCLIGAEHVNNSYECDIPIGAGICASYQTQTNSPRRARSVASQSIIAYTMSLGAENSVAYSNNSIAIPTNFTISVTTEILPVSMTKTSVDCTMYICGDSTECSNLLLQYGSFCTQLNRALTGIAVEQDKNTQEVFAQVKQIYKTPPIKDFGGFNFSQILPDPSKPSKRSFIEDLLFNKVTLADAGFIKQYGDCLGDIAARDLICAQKFNGLTVLPPLLTDEMIAQYTSALLAGTITSGWWFGAGAALQIPFAMQMAYRFNGIGVTQNVLYENQKLIANQFNSAIGKIQDSLSSTASALGKLQDVVNQNAQALNTLVKQLSSNFGAISSVLNDILSRLDPPEAEVQIDRLITGRLQSLQTYVTQQLIRAAEIRWSANLAATKMSECVLGQSKRVDFCGKGYHLMSFPQSAPHGVVFLHVTYVPAQEKNFTTAPAICHDGKAHFPREGVFVSNGTHWFVTQRNFYEPQIITTDNTFVSGNCDVVIGIVNNTVYDPLQPELDSFKEELDKYFKNHTSPDVDLGDISGINASVVNIQKEIDRLNEVAKNLNESLIDLQELGKYEQYIKGGGGSDIIKLLNEQVNKEMQSSNLYMSMSSWCYTHSLDGAGLFLFDHAAEEYEHAKKLIIFLNENNVPVQLTSISAPEHKFEGLTQIFQKAYEHEQHISESINNIVDHAIKSKDHATFNFLQWYVAEQHEEEVLFKDILDKIELIGNENHGLYLADQYVKGIAKSRKS

SEQ ID NO: 4776 - protein, 1379 aa, Artificial Sequence
  SARS-CoV-2/Sweden/01/2020__EPI_ISL_411951 spike protein (1-1211)(K986P_V987P_T887W_A1020W) Ferritin construct
MFVFLVLLPLVSSQCVNLTTRTQLPPAYTNSFTRGVYYPDKVFRSSVLHSTQDLFLPFFSNVTWFHAIHVSGTNGTKRFDNPVLPFNDGVYFASTEKSNIIRGWIFGTTLDSKTQSLLIVNNATNVVIKVCEFQFCNDPFLGVYYHKNNKSWMESEFRVYSSANNCTFEYVSQPFLMDLEGKQGNFKNLREFVFKNIDGYFKIYSKHTPINLVRDLPQGFSALEPLVDLPIGINITRFQTLLALHRSYLTPGDSSSGWTAGAAAYYVGYLQPRTFLLKYNENGTITDAVDCALDPLSETKCTLKSFTVEKGIYQTSNFRVQPTESIVRFPNITNLCPFGEVFNATRFASVYAWNRKRISNCVADYSVLYNSASFSTFKCYGVSPTKLNDLCFTNVYADSFVIRGDEVRQIAPGQTGKIADYNYKLPDDFTGCVIAWNSNNLDSKVGGNYNYLYRLFRKSNLKPFERDISTEIYQAGSTPCNGVEGFNCYFPLQSYGFQPTNGVGYQPYRVVVLSFELLHAPATVCGPKKSTNLVKNKCVNFNFNGLTGTGVLTESNKKFLPFQQFGRDIADTTDAVRDPQTLEILDITPCSFGGVSVITPGTNTSNQVAVLYQDVNCTEVPVAIHADQLTPTWRVYSTGSNVFQTRAGCLIGAEHVNNSYECDIPIGAGICASYQTQTNSPRRARSVASQSIIAYTMSLGAENSVAYSNNSIAIPTNFTISVTTEILPVSMTKTSVDCTMYICGDSTECSNLLLQYGSFCTQLNRALTGIAVEQDKNTQEVFAQVKQIYKTPPIKDCGGFNFSQILPDPSKPSKRSFIEDLLFNKVTLADAGFIKQYGDCLGDIAARDLICAQKFNGLTVLPPLLTDEMIAQYTSALLAGTITSGWWFGAGAALQIPFAMQMAYRFNGIGVTQNVLYENQKLIANQFNSAIGKIQDSLSSTASALGKLQDVVNQNAQALNTLVKQLSSNFGAISSVLNDILSRLDPPEAEVQIDRLITGRLQSLQTYVTQQLIRAAEIRWSANLAATKMSECVLGQSKRVDFCGKGYHLMSFPQSAPHGVVFLHVTYVPAQEKNFTTAPAICHDGKAHFPREGVFVSNGTHWFVTQRNFYEPQIITTDNTFVSGNCDVVIGIVNNTVYDPLQPELDSFKEELDKYFKNHTSPDVDLGDISGINASVVNIQKEIDRLNEVAKNLNESLIDLQELGKYEQYIKGGGGSDIIKLLNEQVNKEMQSSNLYMSMSSWCYTHSLDGAGLFLFDHAAEEYEHAKKLIIFLNENNVPVQLTSISAPEHKFEGLTQIFQKAYEHEQHISESINNIVDHAIKSKDHATFNFLQWYVAEQHEEEVLFKDILDKIELIGNENHGLYLADQYVKGIAKSRKS

SEQ ID NO: 4777 - protein, 1379 aa, Artificial Sequence
  SARS-CoV-2/Tianmen/HBCDC-HB-07/2020__EPI_ISL_412983 spike protein (1-1211)(K986P_V987P_T887W_A1020W) Ferritin construct
MFVFLVLLPLVSSQCVNLTTRTQLPPAYTNSFTRGVYYPDKVFRSSVLHSTQDLFLPFFSNVTWFHAIHVSGTNGTKRFDNPVLPFNDGVYFASTEKSNIIRGWIFGTTLDSKTQSLLIVNNATNVVIKVCEFQFCNDPFLGVYYHKNNKSWMESEFRVYSSANNCTFEYVSQPFLMDLEGKQGNFKNLREFVFKNIDGYFKIYSKHTPINLVRDLPQGFSALEPLVDLPIGINITRFQTLLALHRSYLTPGDSSSGWTAGAAAYYVGYLQPRTFLLKYNENGTITDAVDCALDPLSETKCTLKSFTVEKGIYQTSNFRVQPTESIVRFPNITNLCPFGEVFNATRFASVYAWNRKRISNCVADYSVLYNSASFSTFKCYGVSPTKLNDLCFTNVYADSFVIRGDEVRQIAPGQTGKIADYNYKLPDDFTGCVIAWNSNNLDSKVGGNYNYLYRLFRKSNLKPFERDISTEIYQAGSTPCNGVEGFNCYFPLQSYGFQPTNGVGYQPYRVVVLSFELLHAPATVCGPKKSTNLVKNKCVNFNFNGLTGTGVLTESNKKFLPFQQFGRDIADTTDAVRDPQTLEILDITPCSFGGVSVITPGTNTSNQVAVLYQDLNCTEVPVAIHADQLTPTWRVYSTGSNVFQTRAGCLIGAEHVNNSYECDIPIGAGICASYQTQTNSPRRARSVASQSIIAYTMSLGAENSVAYSNNSIAIPTNFTISVTTEILPVSMTKTSVDCTMYICGDSTECSNLLLQYGSFCTQLNRALTGIAVEQDKNTQEVFAQVKQIYKTPPIKDFGGFNFSQILPDPSKPSKRSFIEDLLFNKVTLADAGFIKQYGDCLGDIAARDLICAQKFNGLTVLPPLLTDEMIAQYTSALLAGTITSGWWFGAGAALQIPFAMQMAYRFNGIGVTQNVLYENQKLIANQFNSAIGKIQDSLSSTASALGKLQDVVNQNAQALNTLVKQLSSNFGAISSVLNDILSRLDPPEAEVQIDRLITGRLQSLQTYVTQQLIRAAEIRWSANLAATKMSECVLGQSKRVDFCGKGYHLMSFPQSAPHGVVFLHVTYVPAQEKNFTTAPAICHDGKAHFPREGVFVSNGTHWFVTQRNFYEPQIITTDNTFVSGNCDVVIGIVNNTVYDPLQPELDSFKEELDKYFKNHTSPDVDLGDISGINASVVNIQKEIDRLNEVAKNLNESLIDLQELGKYEQYIKGGGGSDIIKLLNEQVNKEMQSSNLYMSMSSWCYTHSLDGAGLFLFDHAAEEYEHAKKLIIFLNENNVPVQLTSISAPEHKFEGLTQIFQKAYEHEQHISESINNIVDHAIKSKDHATFNFLQWYVAEQHEEEVLFKDILDKIELIGNENHGLYLADQYVKGIAKSRKS

SEQ ID NO: 4778 - protein, 1379 aa, Artificial Sequence
  SARS-CoV-2/Hong Kong/case42_VM20002493/2020__EPI_ISL_414527 spike protein (1-1211)(K986P_V987P_T887W_A1020W) Ferritin construct
MFVFLVLLPLVSSQCVNLTTRTQLPPAYTNSFTRGVYYPDKVFRSSVLHSTQDLFLPFFSNVTWFHAIHVSGTNGTKRFDNPVLPFNDGVYFASTEKSNIIRGWIFGTTLDSKTQSLLIVNNATNVVIKVCEFQFCNDPFLGVYYHKNNKSWMESEFRVYSSANNCTFEYVSQPFLMDLEGKQGNFKNLREFVFKNIDGYFKIYSKHTPINLVRDLPQGFSALEPLVDLPIGINITRFQTLLALHRSYLTPGDSSSGWTAGAAAYYVGYLQPRTFLLKYNENGTITDAVDCALDPLSETKCTLKSFTVEKGIYQTSNFRVQPTESIVRFPNITNLCPFGEVFNATRFASVYAWNRKRISNCVADYSVLYNSASFSTFKCYGVSPTKLNDLCFTNVYADSFVIRGDEVRQIAPGQTGKIADYNYKLPDDFTGCVIAWNSNNLDSKVGGNYNYLYRLFRKSNLKPFERDISTEIYQAGSTPCNGVEGFNCYFPLQSYGFQPTNGVGYQPYRVVVLSFELLHAPATVCGPKKSTNLVKNKCVNFNFNGLTGTGVLTESNKKFLPFQQFGRDIADTTDAVRDPQTLEILDITPCSFGGVSVITPGTNTSNQVAVLYQDVNCTEVPVAIHADQLTPTWRVYSTGSNVFQTRAGCLIGAEHVNNSYECDIPIGAGICASYQTQTNSPRRARSVASQSIIAYTMSLGAENSVAYSNNSIAIPTNFAISVTTEILPVSMTKTSVDCTMYICGDSTECSNLLLQYGSFCTQLNRALTGIAVEQDKNTQEVFAQVKQIYKTPPIKDFGGFNFSQILPDPSKPSKRSFIEDLLFNKVTLADAGFIKQYGDCLGDIAARDLICAQKFNGLTVLPPLLTDEMIAQYTSALLAGTITSGWWFGAGAALQIPFAMQMAYRFNGIGVTQNVLYENQKLIANQFNSAIGKIQDSLSSTASALGKLQDVVNQNAQALNTLVKQLSSNFGAISSVLNDILSRLDPPEAEVQIDRLITGRLQSLQTYVTQQLIRAAEIRWSANLAATKMSECVLGQSKRVDFCGKGYHLMSFPQSAPHGVVFLHVTYVPAQEKNFTTAPAICHDGKAHFPREGVFVSNGTHWFVTQRNFYEPQIITTDNTFVSGNCDVVIGIVNNTVYDPLQPELDSFKEELDKYFKNHTSPDVDLGDISGINASVVNIQKEIDRLNEVAKNLNESLIDLQELGKYEQYIKGGGGSDIIKLLNEQVNKEMQSSNLYMSMSSWCYTHSLDGAGLFLFDHAAEEYEHAKKLIIFLNENNVPVQLTSISAPEHKFEGLTQIFQKAYEHEQHISESINNIVDHAIKSKDHATFNFLQWYVAEQHEEEVLFKDILDKIELIGNENHGLYLADQYVKGIAKSRKS

SEQ ID NO: 4779 - protein, 1379 aa, Artificial Sequence
  SARS-CoV-2/USA/CruiseA-23/2020__EPI_ISL_414482 spike protein (1-1211)(K986P_V987P_T887W_A1020W) Ferritin construct
MFVFLVLLPLVSSQCVNLTTRTQLPPAYTNSFTRGVYYPDKVFRSSVLHSTQDLFLPFFSNVTWFHAIHVSGTNGTKRFDNPVLPFNDGVYFASTEKSNIIRGWIFGTTLDSKTQSLLIVNNATNVVIKVCEFQFCNDPFLGVYYHKNNKSWMESEFRVYSSANNCTFEYVSQPFLMDLEVKQGNFKNLREFVFKNIDGYFKIYSKHTPINLVRDLPQGFSALEPLVDLPIGINITRFQTLLALHRSYLTPGDSSSGWTAGAAAYYVGYLQPRTFLLKYNENGTITDAVDCALDPLSETKCTLKSFTVEKGIYQTSNFRVQPTESIVRFPNITNLCPFGEVFNATRFASVYAWNRKRISNCVADYSVLYNSASFSTFKCYGVSPTKLNDLCFTNVYADSFVIRGDEVRQIAPGQTGKIADYNYKLPDDFTGCVIAWNSNNLDSKVGGNYNYLYRLFRKSNLKPFERDISTEIYQAGSTPCNGVEGFNCYFPLQSYGFQPTNGVGYQPYRVVVLSFELLHAPATVCGPKKSTNLVKNKCVNFNFNGLTGTGVLTESNKKFLPFQQFGRDIADTTDAVRDPQTLEILDITPCSFGGVSVITPGTNTSNQVAVLYQDVNCTEVPVAIHADQLTPTWRVYSTGSNVFQTRAGCLIGAEHVNNSYECDIPIGAGICASYQTQTNSPRRARSVASQSIIAYTMSLGAENSVAYSNNSIAIPTNFTISVTTEILPVSMTKTSVDCTMYICGDSTECSNLLLQYGSFCTQLNRALTGIAVEQDKNTQEVFAQVKQIYKTPPIKDFGGFNFSQILPDPSKPSKRSFIEDLLFNKVTLADAGFIKQYGDCLGDIAARDLICAQKFNGLTVLPPLLTDEMIAQYTSALLAGTITSGWWFGAGAALQIPFAMQMAYRFNGIGVTQNVLYENQKLIANQFNSAIGKIQDSLSSTASALGKLQDVVNQNAQALNTLVKQLSSNFGAISSVLNDILSRLDPPEAEVQIDRLITGRLQSLQTYVTQQLIRAAEIRWSANLAATKMSECVLGQSKRVDFCGKGYHLMSFPQSAPHGVVFLHVTYVPAQEKNFTTAPAICHDGKAHFPREGVFVSNGTHWFVTQRNFYEPQIITTDNTFVSGNCDVVIGIVNNTVYDPLQPELDSFKEELDKYFKNHTSPDVDLGDISGINASVVNIQKEIDRLNEVAKNLNESLIDLQELGKYEQYIKGGGGSDIIKLLNEQVNKEMQSSNLYMSMSSWCYTHSLDGAGLFLFDHAAEEYEHAKKLIIFLNENNVPVQLTSISAPEHKFEGLTQIFQKAYEHEQHISESINNIVDHAIKSKDHATFNFLQWYVAEQHEEEVLFKDILDKIELIGNENHGLYLADQYVKGIAKSRKS

SEQ ID NO: 4780 - protein, 1379 aa, Artificial Sequence
  SARS-CoV-2/Hong Kong/case85_VM20002868/2020__EPI_ISL_414519 spike protein (1-1211)(K986P_V987P_T887W_A1020W) Ferritin construct
MFVFLVLVPLVSSQCVNLTTRTQLPPAYTNSFTRGVYYPDKVFRSSVLHSTQDLFLPFFSNVTWFHAIHVSGTNGTKRFDNPVLPFNDGVYFASTEKSNIIRGWIFGTTLDSKTQSLLIVNNATNVVIKVCEFQFCNDPFLGVYYHKNNKSWMESEFRVYSSANNCTFEYVSQPFLMDLEGKQGNFKNLREFVFKNIDGYFKIYSKHTPINLVRDLPQGFSALEPLVDLPIGINITRFQTLLALHRSYLTPGDSSSGWTAGAAAYYVGYLQPRTFLLKYNENGTITDAVDCALDPLSETKCTLKSFTVEKGIYQTSNFRVQPTESIVRFPNITNLCPFGEVFNATRFASVYAWNRKRISNCVADYSVLYNSASFSTFKCYGVSPTKLNDLCFTNVYADSFVIRGDEVRQIAPGQTGKIADYNYKLPDDFTGCVIAWNSNNLDSKVGGNYNYLYRLFRKSNLKPFERDISTEIYQAGSTPCNGVEGFNCYFPLQSYGFQPTNGVGYQPYRVVVLSFELLHAPATVCGPKKSTNLVKNKCVNFNFNGLTGTGVLTESNKKFLPFQQFGRDIADTTDAVRDPQTLEILDITPCSFGGVSVITPGTNTSNQVAVLYQDVNCTEVPVAIHADQLTPTWRVYSTGSNVFQTRAGCLIGAEHVNNSYECDIPIGAGICASYQTQTNSPRRARSVASQSIIAYTMSLGAENSVAYSNNSIAIPTNFTISVTTEILPVSMTKTSVDCTMYICGDSTECSNLLLQYGSFCTQLNRALTGIAVEQDKNTQEVFAQVKQIYKTPPIKDFGGFNFSQILPDPSKPSKRSFIEDLLFNKVTLADAGFIKQYGDCLGDIAARDLICAQKFNGLTVLPPLLTDEMIAQYTSALLAGTITSGWWFGAGAALQIPFAMQMAYRFNGIGVTQNVLYENQKLIANQFNSAIGKIQDSLSSTASALGKLQDVVNQNAQALNTLVKQLSSNFGAISSVLNDILSRLDPPEAEVQIDRLITGRLQSLQTYVTQQLIRAAEIRWSANLAATKMSECVLGQSKRVDFCGKGYHLMSFPQSAPHGVVFLHVTYVPAQEKNFTTAPAICHDGKAHFPREGVFVSNGTHWFVTQRNFYEPQIITTDNTFVSGNCDVVIGIVNNTVYDPLQPELDSFKEELDKYFKNHTSPDVDLGDISGINASVVNIQKEIDRLNEVAKNLNESLIDLQELGKYEQYIKGGGGSDIIKLLNEQVNKEMQSSNLYMSMSSWCYTHSLDGAGLFLFDHAAEEYEHAKKLIIFLNENNVPVQLTSISAPEHKFEGLTQIFQKAYEHEQHISESINNIVDHAIKSKDHATFNFLQWYVAEQHEEEVLFKDILDKIELIGNENHGLYLADQYVKGIAKSRKS

SEQ ID NO: 4781 - protein, 1379 aa, Artificial Sequence; identical to SEQ ID NO: 4771
  SARS-CoV-2/England/200990660/2020__EPI_ISL_414523 spike protein (1-1211)(K986P_V987P_T887W_A1020W) Ferritin construct

SEQ ID NO: 4782 - protein, 1379 aa, Artificial Sequence
  SARS-CoV-2/Australia/NSW09/2020__EPI_ISL_413595 spike protein (1-1211)(K986P_V987P_T887W_A1020W) Ferritin construct
MFVFLVLLPLVSSQCVNLTTRTQLPPAYTNSFTRGVYYPDKVFRSSVLHSTQDLFLPFFSNVTWFHAIHVSGTNGTKRFDNPVLPFNDGVYFASTEKSNIIRGWIFGTTLDSKTQSLLIVNNATNVVIKVCEFQFCNDPFLGVYYHKNNKSWMESEFRVYSSANNCTFEYVSQPFLMDLEGKQGNFKNLREFVFKNIDGYFKIYSKHTPINLVRDLPQGFSALEPLVDLPIGINITRFQTLLALHRSYLTPGDSSSGWTAGAAAYYVGYLQPRTFLLKYNENGTITDAVDCALDPLSETKCTLKSFTVEKGIYQTSNFRVQPTESIVRFPNITNLCPFGEVFNATRFASVYAWNRKRISNCVADYSVLYNSASFSTFKCYGVSPTKLNDLCFTNVYADSFVIRGDEVRQIAPGQTGKIADYNYKLPDDFTGCVIAWNSNNLDSKVGGNYNYLYRLFRKSNLKPFERDISTEIYQAGSTPCNGVEGFNCYFPLQSYGFQPTNGVGYQPYRVVVLSFELLHAPATVCGPKKSTNLVKNKCVNFNFNGLTGTGVLTESNKKFLPFQQFGRDIADTTDAVRDPQTLEILDITPCSFGGVSVITPGTNTSNQVAVLYQDVNCTEVPVAIHADQLTPTWRVYSTGSNVFQTRAGCLIGAEHVNNSYECDIPIGAGICASYQTQTNSPRRARSVASQSIIAYTMSLGAENSVAYSNNSIAIPTNFTISVTTEILPVSMTKTSVDCTMYICGDSTECSNLLLQYGSFCTQLNRALTGIAVEQDKNTQEVFAQVKQIYKTPPIKDFGGFNFSQILPDPSKPSKRSFIEDLLFNKVTLADAGFIKQYGDCLGDIAARDLICAQKFNGLTVLPPLLTDEMIAQYTSALLAGTITSGWWFGAGAALQIPFAMQMAYRFNGIGVTQNVLYENQKLIANQFNSAIGKIQDSLSFTASALGKLQDVVNQNAQALNTLVKQLSSNFGAISSVLNDILSRLDPPEAEVQIDRLITGRLQSLQTYVTQQLIRAAEIRWSANLAATKMSECVLGQSKRVDFCGKGYHLMSFPQSAPHGVVFLHVTYVPAQEKNFTTAPAICHDGKAHFPREGVFVSNGTHWFVTQRNFYEPQIITTDNTFVSGNCDVVIGIVNNTVYDPLQPELDSFKEELDKYFKNHTSPDVDLGDISGINASVVNIQKEIDRLNEVAKNLNESLIDLQELGKYEQYIKGGGGSDIIKLLNEQVNKEMQSSNLYMSMSSWCYTHSLDGAGLFLFDHAAEEYEHAKKLIIFLNENNVPVQLTSISAPEHKFEGLTQIFQKAYEHEQHISESINNIVDHAIKSKDHATFNFLQWYVAEQHEEEVLFKDILDKIELIGNENHGLYLADQYVKGIAKSRKS

SEQ ID NO: 4783 - protein, 1379 aa, Artificial Sequence; identical to SEQ ID NO: 4763
  SARS-CoV-2/Australia/NSW10/2020__EPI_ISL_413596 spike protein (1-1211)(K986P_V987P_T887W_A1020W) Ferritin construct

SEQ ID NO: 4784 - protein, 1379 aa, Artificial Sequence
  SARS-CoV-2/Switzerland/1000477797/2020__EPI_ISL_413023 spike protein (1-1211)(K986P_V987P_T887W_A1020W) Ferritin construct
MFVFLVLLPLVSSQCVNLTTRTQLPPAYTNSFTRGVYYPDKVFRSSVLHSTQDLFLPFFSNVTWFHAIHVSGTNGTKRFDNPVLPFNDGVYFASTEKSNIIRGWIFGTTLDSKTQSLLIVNNATNVVIKVCEFQFCNDPFLGVYYHKNNKSWMESEFRVYSSANNCTFEYVSQPFLMDLEGKQGNFKNLREFVFKNIDGYFNIYSKHTPINLVRDLPQGFSALEPLVDLPIGINITRFQTLLALHRSYLTPGDSSSGWTAGAAAYYVGYLQPRTFLLKYNENGTITDAVDCALDPLSETKCTLKSFTVEKGIYQTSNFRVQPTESIVRFPNITNLCPFGEVFNATRFASVYAWNRKRISNCVADYSVLYNSASFSTFKCYGVSPTKLNDLCFTNVYADSFVIRGDEVRQIAPGQTGKIADYNYKLPDDFTGCVIAWNSNNLDSKVGGNYNYLYRLFRKSNLKPFERDISTEIYQAGSTPCNGVEGFNCYFPLQSYGFQPTNGVGYQPYRVVVLSFELLHAPATVCGPKKSTNLVKNKCVNFNFNGLTGTGVLTESNKKFLPFQQFGRDIADTTDAVRDPQTLEILDITPCSFGGVSVITPGTNTSNQVAVLYQGVNCTEVPVAIHADQLTPTWRVYSTGSNVFQTRAGCLIGAEHVNNSYECDIPIGAGICASYQTQTNSPRRARSVASQSIIAYTMSLGAENSVAYSNNSIAIPTNFTISVTTEILPVSMTKTSVDCTMYICGDSTECSNLLLQYGSFCTQLNRALTGIAVEQDKNTQEVFAQVKQIYKTPPIKDFGGFNFSQILPDPSKPSKRSFIEDLLFNKVTLADAGFIKQYGDCLGDIAARDLICAQKFNGLTVLPPLLTDEMIAQYTSALLAGTITSGWWFGAGAALQIPFAMQMAYRFNGIGVTQNVLYENQKLIANQFNSAIGKIQDSLSSTASALGKLQDVVNQNAQALNTLVKQLSSNFGAISSVLNDILSRLDPPEAEVQIDRLITGRLQSLQTYVTQQLIRAAEIRWSANLAATKMSECVLGQSKRVDFCGKGYHLMSFPQSAPHGVVFLHVTYVPAQEKNFTTAPAICHDGKAHFPREGVFVSNGTHWFVTQRNFYEPQIITTDNTFVSGNCDVVIGIVNNTVYDPLQPELDSFKEELDKYFKNHTSPDVDLGDISGINASVVNIQKEIDRLNEVAKNLNESLIDLQELGKYEQYIKGGGGSDIIKLLNEQVNKEMQSSNLYMSMSSWCYTHSLDGAGLFLFDHAAEEYEHAKKLIIFLNENNVPVQLTSISAPEHKFEGLTQIFQKAYEHEQHISESINNIVDHAIKSKDHATFNFLQWYVAEQHEEEVLFKDILDKIELIGNENHGLYLADQYVKGIAKSRKS

SEQ ID NO: 4785 - protein, 1379 aa, Artificial Sequence
  SARS-CoV-2/Belgium/BA-02291/2020__EPI_ISL_415159 spike protein (1-1211)(K986P_V987P_T887W_A1020W) Ferritin construct
MFVFLVLLPLVSSQCVNLTTRTQLPPAYTNSFTRGVYYPDKVFRSSVLHSTQDLFLPFFSNVTWFHAIHVSGTNGTKRFDNPVLPFNDGVYFASTEKSNIIRGWIFGTTLDSKTQSLLIVNNATNVVIKVCEFQFCNDPFLGVYYHKNNKSWMESEFRVYSSANNCTFEYVSQPFLMDLEGKQGNFKNLREFVFKNIDGYFKIYSKHTPINLVRDLPQGFSALEPLVDLPIGINITRFQTLLALHRSYLTPGDSSSGWTAGAAAYYVGYLQPRTFLLKYNENGTITDAVDCALDPLSETKCTLKSFTVEKGIYQTSNFRVQPTESIVRFPNITNLCPFGEVFNATRFASVYAWNRKRISNCVADYSVLYNSASFSTFKCYGVSPTKLNDLCFTNVYADSFVIRGDEVRQIAPGQTGKIADYNYKLPDDFTGCVIAWNSNNLDSKVGGNYNYLYRLFRRSNLKPFERDISTEIYQAGSTPCNGVEGFNCYFPLQSYGFQPTNGVGYQPYRVVVLSFELLPAPATVCGPKKSTNLVKNKCVNFNFNGLTGTGVLTESNKKFLPFQQFGRDIADTTDAVRDPQTLEILDITPCSFGGVSVITPGTNTSNQVAVLYQGVNCTEVPVAIHADQLTPTWRVYSTGSNVFQTRAGCLIGAEHVNNSYECDIPIGAGICASYQTQTNSPRRARSVASQSIIAYTMSLGAENSVAYSNNSIAIPTNFTISVTTEILPVSMTKTSVDCTMYICGDSTECSNLLLQYGSFCTQLNRALTGIAVEQDKNTQEVFAQVKQIYKTPPIKDFGGFNFSQILPDPSKPSKRSFIEDLLFNKVTLADAGFIKQYGDCLGDIAARDLICAQKFNGLTVLPPLLTDEMIAQYTSALLAGTITSGWWFGAGAALQIPFAMQMAYRFNGIGVTQNVLYENQKLIANQFNSAIGKIQDSLSSAAPALGKLQDVVNQNAQALNTLVKQLSSNFGAISSVLNDILSRLDPPEAEVQIDRLITGRLQSLQTYVTQQLIRAAEIRWSANLAATKMSECVLGQSKRVDFCGKGYHLMSFPQSAPHGVVFLHVTYVPAQEKNFTTAPAICHDGKAHFPREGVFVSNGTHWFVTQRNFYEPQIITTDNTFVSGNCDVVIGIVNNTVYDPLQPELDSFKEELDKYFKNHTSPDVDLGDISGINASVVNIQKEIDRLNEVAKNLNESLIDLQELGKYEQYIKGGGGSDIIKLLNEQVNKEMQSSNLYMSMSSWCYTHSLDGAGLFLFDHAAEEYEHAKKLIIFLNENNVPVQLTSISAPEHKFEGLTQIFQKAYEHEQHISESINNIVDHAIKSKDHATFNFLQWYVAEQHEEEVLFKDILDKIELIGNENHGLYLADQYVKGIAKSRKS

SEQ ID NO: 4786 - protein, 1379 aa, Artificial Sequence
  SARS-CoV-2/USA/WA8-UW5/2020__EPI_ISL_413486 spike protein (1-1211)(K986P_V987P_T887W_A1020W) Ferritin construct
MFVFLVLLPLVSSQCVNLTTRTQLPPAYTNSFTRGVYYPDKVFRSSVLHSTQDLFLPFFSNVTWFHAIHVSGTNGTKRFDNPVLPFNDGVYFASTEKSNIIRGWIFGTTLDSKTQSLLIVNNATNVVIKVCEFQFCNDPFLGVYYHKNNKSWMESEFRVYSSANNCTFEYVSQPFLMDLEGKQGNFKNLREFVFKNIDGYFKIYSKHTPINLVRDLPQGFSALEPLVDLPIGINITRFQTLLALHRSYLTPGDSSSGWTAGAAAYYVGYLQPRTFLLKYNENGTITDAVDCALDPLSETKCTLKSFTVEKGIYQTSNFRVQPTESIVRFPNITNLCPFGEVFNATRFASVYAWNRKRISNCVADYSVLYNSASFSTFKCYGVSPTKLNDLCFTNVYADSFVIRGDEVRQIAPGQTGKIADYNYKLPDDFTGCVIAWNSNNLDSKVGGNYNYLYRLFRKSNLKPFERDISTEIYQAGSTPCNGVEGFNCYFPLQSYGFQPTNGVGYQPYRVVVLSFELLHAPATVCGPKKSTNLVKNKCVNFNFNGLTGTGVLTESNKKFLPFQQFGRDIADTTDAVRDPQTLEILDITPCSFGGVSVITPGTNTSNQVAVLYQDVNCTEVPVAIHADQLTPTWRVYSTGSNVFQTRAGCLIGAEYVNNSYECDIPIGAGICASYQTQTNSPRRARSVASQSIIAYTMSLGAENSVAYSNNSIAIPTNFTISVTTEILPVSMTKTSVDCTMYICGDSTECSNLLLQYGSFCTQLNRALTGIAVEQDKNTQEVFAQVKQIYKTPPIKDFGGFNFSQILPDPSKPSKRSFIEDLLFNKVTLADAGFIKQYGDCLGDIAARDLICAQKFNGLTVLPPLLTDEMIAQYTSALLAGTITSGWWFGAGAALQIPFAMQMAYRFNGIGVTQNVLYENQKLIANQFNSAIGKIQDSLSSTASALGKLQDVVNQNAQALNTLVKQLSSNFGAISSVLNDILSRLDPPEAEVQIDRLITGRLQSLQTYVTQQLIRAAEIRWSANLAATKMSECVLGQSKRVDFCGKGYHLMSFPQSAPHGVVFLHVTYVPAQEKNFTTAPAICHDGKAHFPREGVFVSNGTHWFVTQRNFYEPQIITTDNTFVSGNCDVVIGIVNNTVYDPLQPELDSFKEELDKYFKNHTSPDVDLGDISGINASVVNIQKEIDRLNEVAKNLNESLIDLQELGKYEQYIKGGGGSDIIKLLNEQVNKEMQSSNLYMSMSSWCYTHSLDGAGLFLFDHAAEEYEHAKKLIIFLNENNVPVQLTSISAPEHKFEGLTQIFQKAYEHEQHISESINNIVDHAIKSKDHATFNFLQWYVAEQHEEEVLFKDILDKIELIGNENHGLYLADQYVKGIAKSRKS

SEQ ID NO: 4787 - protein, 1379 aa, Artificial Sequence
  SARS-CoV-2/England/20102000506/2020__EPI_ISL_415147 spike protein (1-1211)(K986P_V987P_T887W_A1020W) Ferritin construct
MFVFLVLLPLVSSQCVNLTTRTQLPPAYTNSFTRGVYYPDKVFRSSVLHSTQDLFLPFFSNVTWFHAIHVSGTNGTKRFDNPVLPFNDGVYFASTEKSNIIRGWIFGTTLDSKTQSLLIVNNATNVVIKVCEFQFCNDPFLGVYYHKNNKSWMESEFRVYSSANNCTFEYVSQPFLMDLEGKQGNFKNLREFVFKNIDGYFKIYSKHTPINLVRDLPQGFSALEPLVDLPIGINITRFQTLLALHRSYLTPGDSSSGWTAGAAAYYVGYLQPRTFLLKYNENGTITDAVDCALDPLSETKCTLKSFTVEKGIYQTSNFRVQPTESIVRFPNITNLCPFGEVFNATRFASVYAWNRKRISNCVADYSVLYNSASFSTFKCYGVSPTKLNDLCFTNVYADSFVIRGDEVRQIAPGQTGKIADYNYKLPDDFTGCVIAWNSNNLDSKVGGNYNYLYRLFRKSNLKPFERDISTEIYQAGSTPCNGVEGFNCYFPLQSYGFQPTNGVGYQPYRVVVLSFELLHAPATVCGPKKSTNLVKNKCVNFNFNGLTGTGVLTESNKKFLPFQQFGRDIADTTDAVRDPQTLEILDITPCSFGGVSVITPGTNTSNQVAVLYQGVNCTEVPVAIHADQLTPTWRVYSTGSNVFQTRAGCLIGAEHVNNSYECDIPIGAGICASYQTQTNSPRRARSVASQSIIAYTMSLGAENSVAYSNNSIAIPTNFTISVTTEILPVSMTKTSVDCTMYICGDSTECSNLLLQYGSFCTQLNRALTGIAVEQDKNTQEVFAQVKQIYKTPPIKDFGGFNFSQILPDPSKPSKRSFIEDLLFNKVTLADAGFIKQYGYCLGDIAARDLICAQKFNGLTVLPPLLTDEMIAQYTSALLAGTITSGWWFGAGAALQIPFAMQMAYRFNGIGVTQNVLYENQKLIANQFNSAIGKIQDSLSSTASALGKLQDVVNQNAQALNTLVKQLSSNFGAISSVLNDILSRLDPPEAEVQIDRLITGRLQSLQTYVTQQLIRAAEIRWSANLAATKMSECVLGQSKRVDFCGKGYHLMSFPQSAPHGVVFLHVTYVPAQEKNFTTAPAICHDGKAHFPREGVFVSNGTHWFVTQRNFYEPQIITTDNTFVSGNCDVVIGIVNNTVYDPLQPELDSFKEELDKYFKNHTSPDVDLGDISGINASVVNIQKEIDRLNEVAKNLNESLIDLQELGKYEQYIKGGGGSDIIKLLNEQVNKEMQSSNLYMSMSSWCYTHSLDGAGLFLFDHAAEEYEHAKKLIIFLNENNVPVQLTSISAPEHKFEGLTQIFQKAYEHEQHISESINNIVDHAIKSKDHATFNFLQWYVAEQHEEEVLFKDILDKIELIGNENHGLYLADQYVKGIAKSRKS

SEQ ID NO: 4788 - protein, 1379 aa, Artificial Sequence
  SARS-CoV-2/Belgium/VAG-03013/2020__EPI_ISL_415155 spike protein (1-1211)(K986P_V987P_T887W_A1020W) Ferritin construct
MFVFLVLLPLVSSQCVNLTTRTQLPPAYTNSFTRGVYYPDKVFRSSVLHSTQDLFLPFFSNVTWFHAIHVSGTNGTKRFDNPVLPFNDGVYFASTEKSNIIRGWIFGTTLDSKTQSLLIVNNATNVVIKVCEFQFCNDPFLGVYYHKNNKSWMESEFRVYSSANNCTFEYVSQPFLMDLEGKQGNFKNLREFVFKNIDGYFKIYSKHTPINLVRDLPQGFSALEPLVDLPIGINITRFQTLLALHRSYLTPGDSSSGWTAGAAAYYVGYLQPRTFLLKYNENGTITDAVDCALDPLSETKCTLKSFTVEKGIYQTSNFRVQPTESIVRFPNITNLCPFGEVFNATRFASVYAWNRKRISNCVADYSVLYNSASFSTFKCYGVSPTKLNDLCFTNVYADSFVIRGDEVRQIAPGQTGKIADYNYKLPDDFTGCVIAWNSNNLDSKVGGNYNYLYRLFRKSNLKPFERDISTEIYQAGSTPCNGVEGFNCYFPLQSYGFQPTNGVGYQPYRVVVLSFELLHAPATVCGPKKSTNLVKNKCVNFNFNGLTGTGVLTESNKKFLPFQQFGRDIADTTDAVRDPQTLEILDITPCSFGGVSVITPGTNTSNQVAVLYQGVNCTEVPVAIHADQLTPTWRVYSTGSNVFQTRAGCLIGAEHVNNSYECDIPIGAGICASYQTQTNSPRRARSVASQSIIAYTMSLGAENSVAYSNNSIAIPTNFTISVTTEILPVSMTKTSVDCTMYICGDSTECSNLLLQYGSFCTQLNRALTGIAVEQDKNTQEVFAQVKQIYKTPPIKDFGGFNFSQILPDPSKPSKRSFIEDLLFNKVTLADAGFIKQYGDCLGDIAARDLICAQKFNGLTVLPPLLTDEMIAQYTSALLAGTITSGWWFGAGAALQIPFAMQMAYRFNGIGVTQNVLYENQKLIANQFNSAIGKIQDSLSSTATALGKLQDVVNQNAQALNTLVKQLSSNFGAISSVLNDILSRLDPPEAEVQIDRLITGRLQSLQTYVTQQLIRAAEIRWSANLAATKMSECVLGQSKRVDFCGKGYHLMSFPQSAPHGVVFLHVTYVPAQEKNFTTAPAICHDGKAHFPREGVFVSNGTHWFVTQRNFYEPQIITTDNTFVSGNCDVVIGIVNNTVYDPLQPELDSFKEELDKYFKNHTSPDVDLGDISGINASVVNIQKEIDRLNEVAKNLNESLIDLQELGKYEQYIKGGGGSDIIKLLNEQVNKEMQSSNLYMSMSSWCYTHSLDGAGLFLFDHAAEEYEHAKKLIIFLNENNVPVQLTSISAPEHKFEGLTQIFQKAYEHEQHISESINNIVDHAIKSKDHATFNFLQWYVAEQHEEEVLFKDILDKIELIGNENHGLYLADQYVKGIAKSRKS

SEQ ID NO: 4789 - protein, 1379 aa, Artificial Sequence
  SARS-CoV-2/Belgium/BC-03016/2020__EPI_ISL_415157 spike protein (1-1211)(K986P_V987P_T887W_A1020W) Ferritin construct
MFVFLVLLPLVSSQCVNLTTRTQLPPAYTNSFTRGVYYPDKVFRSSVLHSTQDLFLPFFSNVTWFHAIHVSGTNGTKRFDNPVLPFNDGVYFASTEKSNIIRGWIFGTTLDSKTQSLLIVNNATNVVIKVCEFQFCNDPFLGVYYHKNNKSWMESEFRVYSSANNCTFEYVSQPFLMDLEGKQGNFKNLREFVFKNIDGYFKIYSKHTPINLVRDLPQGFSALEPLVDLPIGINITRFQTLLALHRSYLTPGDSSSGWTAGAAAYYVGYLQPRTFLLKYNENGTITDAVDCALDPLSETKCTLKSFTVEKGIYQTSNFRVQPTESIVRFPNITNLCPFGEVFNATRFASVYAWNRKRISNCVADYSVLYNSASFSTFKCYGVSPTKLNDLCFTNVYADSFVIRGDEVRQIAPGQTGKIADYNYKLPDDFTGCVIAWNSNNLDSKVGGNYNYLYRLFRKSNLKPFERDISTEIYQAGSTPCNGVEGFNCYFPLQSYGFQPTNGVGYQPYRVVVLSFELLHAPATVCGPKKSTNLVKNKCVNFNFNGLTGTGVLTESNKKFLPFQQFGRDIADTTDAVRDPQTLEILDITPCSFGGVSVITPGTNTSNQVAVLYQGVNCTEVPVAIHADQLTPTWRVYSTGSNVFQTRAGCLIGAEHVNNSYECDIPIGAGICASYQTQTNSPRRARSVASQSIIAYTMSLGAENSVAYSNNSIAIPTNFTISVTTEILPVSMTKTSVDCTMYICGDSTECSNLLLQYGSFCTQLNRALTGIAVEQDKNTQEVFAQVKQIYKTPPIKDFGGFNFSQILPDPSKPSKRSFIEDLLFNKVTLADAGFIKQYGDCLGDIAARDLICAQKFNGLTVLPPLLTDEMIAQYTSALLAGTITSGWWFGAGAALQIPFAMQMAYRFNGIGVTQNVLYENQKLIANQFNSAIGKIQDSLSSTAPALGKLQDVVNQNAQALNTLVKQLSSNFGAISSVLNDILSRLDPPEAEVQIDRLITGRLQSLQTYVTQQLIRAAEIRWSANLAATKMSECVLGQSKRVDFCGKGYHLMSFPQSAPHGVVFLHVTYVPAQEKNFTTAPAICHDGKAHFPREGVFVSNGTHWFVTQRNFYEPQIITTDNTFVSGNCDVVIGIVNNTVYDPLQPELDSFKEELDKYFKNHTSPDVDLGDISGINASVVNIQKEIDRLNEVAKNLNESLIDLQELGKYEQYIKGGGGSDIIKLLNEQVNKEMQSSNLYMSMSSWCYTHSLDGAGLFLFDHAAEEYEHAKKLIIFLNENNVPVQLTSISAPEHKFEGLTQIFQKAYEHEQHISESINNIVDHAIKSKDHATFNFLQWYVAEQHEEEVLFKDILDKIELIGNENHGLYLADQYVKGIAKSRKS

SEQ ID NO: 4790 - protein, 1379 aa, Artificial Sequence
  SARS-CoV-2/Germany/BavPat3/2020__EPI_ISL_414521 spike protein (1-1211)(K986P_V987P_T887W_A1020W) Ferritin construct
MFVFLVLLPLVSSQCVNLTTRTQLPPAYTNSFTRGVYYPDKVFRSSVLHSTQDLFLPFFSNVTWFHAIHVSGTNGTKRFDNPVLPFNDGVYFASTEKSNIIRGWIFGTTLDSKTQSLLIVNNATNVVIKVCEFQFCNDPFLGVYYHKNNKSWMESEFRVYSSANNCTFEYVSQPFLMDLEGKQGNFKNLREFVFKNIDGYFKIYSKHTPINLVRDLPQGFSALEPLVDLPIGINITRFQTLLALHRSYLTPGDSSSGWTAGAAAYYVGYLQPRTFLLKYNENGTITDAVDCALDPLSETKCTLKSFTVEKGIYQTSNFRVQPTESIVRFPNITNLCPFGEVFNATRFASVYAWNRKRISNCVADYSVLYNSASFSTFKCYGVSPTKLNDLCFTNVYADSFVIRGDEVRQIAPGQTGKIADYNYKLPDDFTGCVIAWNSNNLDSKVGGNYNYLYRLFRKSNLKPFERDISTEIYQAGSTPCNGVEGFNCYFPLQSYGFQPTNGVGYQPYRVVVLSFELLHAPATVCGPKKSTNLVKNKCVNFNFNGLTGTGVLTESNKKFLPFQQFGRDIADTTDAVRDPQTLEILDITPCSFGGVSVITPGTNTSNQVAVLYQDVNCTEVPVAIHADQLTPTWRVYSTGSNVFQTRAGCLIGAEHVNNSYECDIPIGAGICASYQTQTNSPRRARSVASQSIIAYTMSLGAENSVAYSNNSIAIPTNFTISVTTEILPVSMTKTSVDCTMYICGDSTECSNLLLQYGSFCTQLNRALTGIAVEQDKNTQQVFAQVKQIYKTPPIKDFGGFNFSQILPDPSKPSKRSFIEDLLFNKVTLADAGFIKQYGDCLGDIAARDLICAQKFNGLTVLPPLLTDEMIAQYTSALLAGTITSGWWFGAGAALQIPFAMQMAYRFNGIGVTQNVLYENQKLIANQFNSAIGKIQDSLSSTASALGKLQDVVNQNAQALNTLVKQLSSNFGAISSVLNDILSRLDPPEAEVQIDRLITGRLQSLQTYVTQQLIRAAEIRWSANLAATKMSECVLGQSKRVDFCGKGYHLMSFPQSAPHGVVFLHVTYVPAQEKNFTTAPAICHDGKAHFPREGVFVSNGTHWFVTQRNFYEPQIITTDNTFVSGNCDVVIGIVNNTVYDPLQPELDSFKEELDKYFKNHTSPDVDLGDISGINASVVNIQKEIDRLNEVAKNLNESLIDLQELGKYEQYIKGGGGSDIIKLLNEQVNKEMQSSNLYMSMSSWCYTHSLDGAGLFLFDHAAEEYEHAKKLIIFLNENNVPVQLTSISAPEHKFEGLTQIFQKAYEHEQHISESINNIVDHAIKSKDHATFNFLQWYVAEQHEEEVLFKDILDKIELIGNENHGLYLADQYVKGIAKSRKS

SEQ ID NO: 4791 - protein, 1379 aa, Artificial Sequence
  SARS-CoV-2/France/HF1805/2020__EPI_ISL_414628 spike protein (1-1211)(K986P_V987P_T887W_A1020W) Ferritin construct
MFVFLVLLPLVSSQCVNLTTRTQLPPAYTNSFTRGVYYPDKVFRSSVLHSTQDLFLPFFSNVTWFHAIHVSGTNGTKRFDNPVLPFNDGVYFASTEKSNIIRGWIFGTTLDSKTQSLLIVNNATNVVIKVCEFQFCNDPFLGVYYHKNNKSWMESEFRVYSSANNCTFEYVSQPFLMDLEGKQGNFKNLREFVFKNIDGYFKIYSKHTPINLVRDLPQGFSALEPLVDLPIGINITRFQTLLALHRSYLTPGDSSSGWTAGAAAYYVGYLQPRTFLLKYNENGTITDAVDCALDPLSETKCTLKSFTVEKGIYQTSNFRVQPTESIVRFPNITNLCPFGEVFNATRFASVYAWNRKRISNCVADYSVLYNSASFSTFKCYGVSPTKLNDLCFTNVYADSFVIRGDEVRQIAPGQTGKIADYNYKLPDDFTGCVIAWNSNNLDSKVGGNYNYLYRLFRKSNLKPFERDISTEIYQAGSTPCNGVEGFNCYFPLQSYGFQPTNGVGYQPYRVVVLSFELLHAPATVCGPKKSTNLVKNKCVNFNFNGLTGTGVLTESNKKFLPFQQFGRDIADTTDAVRDPQTLEILDITPCSFGGVSVITPGTNTSNQVAVLYQGVNCTEVPVAIHADQLTPTWRVYSTGSNVFQTRAGCLIGAEHVNNSYECDIPIGAGICASYQTQTNSPRRARSVASQSIIAYTMSLGAENSVAYSNNSIAIPTNFTISVTTEILPVSMTKTSVDCTMYICGDSTECSNLLLQYGSFCTQLNRALTGIAVEQDKNTQEVFAQVKQIYKTPPIKDFGGFNFSQILPDPSKPSKRSFIEDLLFNKVTLADAGFIKQYGDCLGDIAARDLICAQKFNGLTVLPPLLTDEMIAQYTSALLAGTITSGWWFGAGAALQIPFAMQMAYRFNGIGVTQNVLYENQKLIANQFNSAIGKIQDSLSSTASALGKLQDVVNQNAQALNTLVKQLSSNFGAISSVLNDILSRLDPPEAEVQIDRLITGRLQSLQTYVTQQLIRAAEIRWSANLAATKMSECVLGQSKRVDFCGKGYHLMSFPQSAPHGVVFLHVTYVPAQEKNFTTAPAICHDGKAHFPREGVFVSNGTHWFVTQRNFYEPQIITTDNTFVSGNCDVVIGVVNNTVYDPLQPELDSFKEELDKYFKNHTSPDVDLGDISGINASVVNIQKEIDRLNEVAKNLNESLIDLQELGKYEQYIKGGGGSDIIKLLNEQVNKEMQSSNLYMSMSSWCYTHSLDGAGLFLFDHAAEEYEHAKKLIIFLNENNVPVQLTSISAPEHKFEGLTQIFQKAYEHEQHISESINNIVDHAIKSKDHATFNFLQWYVAEQHEEEVLFKDILDKIELIGNENHGLYLADQYVKGIAKSRKS

SEQ ID NO: 4792 - protein, 1379 aa, Artificial Sequence
  SARS-CoV-2/Netherlands/ZuidHolland_9/2020__EPI_ISL_414445 spike protein (1-1211)(K986P_V987P_T887W_A1020W) Ferritin construct
MFVFLVLLPLVSSQCVNLTTRTQLPPAYTNSFTRGVYYPDKVFRSSVLHSTQDLFLPFFSNVTWFHAIHVSGTNGTKRFDNPVLPFNDGVYFASTEKSNIIRGWIFGTTLDSKTQSLLIVNNATNVVIKVCEFQFCNDPFLGVYYHKNNKSWMESEFRVYSSANNCTFEYVSQPFLMDLEGKQGNFKNLREFVFKNIDGYFKIYSKHTPINLVRDLPQGFSALEPLVDLPIGINITRFQTLLALHRSYLTPGDSSSGWTAGAAAYYVGYLQPRTFLLKYNENGTITDAVDCALDPLSETKCTLKSFTVEKGIYQTSNFRVQPTESIVRFPNITNLCPFGEVFNATRFASVYAWNRKRISNCVADYSVLYNSASFSTFKCYGVSPTKLNDLCFTNVYADSFVIRGDEVRQIAPGQTGKIADYNYKLPDDFTGCVIAWNSNNLDSKVGGNYNYLYRLFRKSNLKPFERDISTEIYQAGSTPCNGVEGFNCYFPLQSYGFQPTNGVGYQPYRVVVLSFELLHAPATVCGPKKSTNLVKNKCVNFNFNGLTGTGVLTESNKKFLPFQQFGRDIADTTDAVRDPQTLEILDITPCSFGGVSVITPGTNTSNQVAVLYQGVNCTEVPVAIHADQLTPTWRVYSTGSNVFQTRAGCLIGAEHVNNSYECDIPIGAGICASYQTQTNSPRRARSVASQSIIAYTMSLGAENSVAYSNNSIAIPTNFTISVTTEILPVSMTKTSVDCTMYICGDSTECSNLLLQYGSFCTQLNRALTGIAVEQDKNTQEVFAQVKQIYKTPPIKDFGGFNFSQILPDPSKPSKRSFIEDLLFNKVTLADAGFIKQYGDCLGDIAARDLICVQKFNGLTVLPPLLTDEMIAQYTSALLAGTITSGWWFGAGAALQIPFAMQMAYRFNGIGVTQNVLYENQKLIANQFNSAIGKIQDSLSSTASALGKLQDVVNQNAQALNTLVKQLSSNFGAISSVLNDILSRLDPPEAEVQIDRLITGRLQSLQTYVTQQLIRAAEIRWSANLAATKMSECVLGQSKRVDFCGKGYHLMSFPQSAPHGVVFLHVTYVPAQEKNFTTAPAICHDGKAHFPREGVFVSNGTHWFVTQRNFYEPQIITTDNTFVSGNCDVVIGIVNNTVYDPLQPELDSFKEELDKYFKNHTSPDVDLGDISGINASVVNIQKEIDRLNEVAKNLNESLIDLQELGKYEQYIKGGGGSDIIKLLNEQVNKEMQSSNLYMSMSSWCYTHSLDGAGLFLFDHAAEEYEHAKKLIIFLNENNVPVQLTSISAPEHKFEGLTQIFQKAYEHEQHISESINNIVDHAIKSKDHATFNFLQWYVAEQHEEEVLFKDILDKIELIGNENHGLYLADQYVKGIAKSRKS

SEQ ID NO: 4793 - protein, 1379 aa, Artificial Sequence
  SARS-CoV-2/Finland/FIN03032020A/2020__EPI_ISL_413602 spike protein (1-1211)(K986P_V987P_T887W_A1020W) Ferritin construct
MFVFLVLLPLVSSQCVNLTTRTQLPPAYTNSFTRGVYYPDKVFRSSVLHSTQDLFLPFFSNVTWFHAIHVSGTNGTKRFDNPVLPFNDGVYFASTEKSNIIRGWIFGTTLDSKTQSLLIVNNATNVVIKVCEFQFCNDPFLGVYYHKNNKSWMESEFRVYSSANNCTFEYVSQPFLMDLEGKQGNFKNLREFVFKNIDGYFKIYSKHTPINLVRDLPQGFSALEPLVDLPIGINITRFQTLLALHRSYLTPGDSSSGWTAGAAAYYVGYLQPRTFLLKYNENGTITDAVDCALDPLSETKCTLKSFTVEKGIYQTSNFRVQPTESIVRFPNITNLCPFGEVFNATRFASVYAWNRKRISNCVADYSVLYNSASFSTFKCYGVSPTKLNDLCFTNVYADSFVIRGDEVRQIAPGQTGKIADYNYKLPDDFTGCVISWNSNNLDSKVGGNYNYLYRLFRKSNLKPFERDISTEIYQAGSTPCNGVEGFNCYFPLQSYGFQPTNGVGYQPYRVVVLSFELLHAPATVCGPKKSTNLVKNKCVNFNFNGLTGTGVLTESNKKFLPFQQFGRDIADTTDAVRDPQTLEILDITPCSFGGVSVITPGTNTSNQVAVLYQGVNCTEVPVAIHADQLTPTWRVYSTGSNVFQTRAGCLIGAEHVNNSYECDIPIGAGICASYQTQTNSPRRARSVASQSIIAYTMSLGAENSVAYSNNSIAIPTNFTISVTTEILPVSMTKTSVDCTMYICGDSTECSNLLLQYGSFCTQLNRALTGIAVEQDKNTQEVFAQVKQIYKTPPIKDFGGFNFSQILPDPSKPSKRSFIEDLLFNKVTLADAGFIKQYGDCLGDIAARDLICAQKFNGLTVLPPLLTDEMIAQYTSALLAGTITSGWWFGAGAALQIPFAMQMAYRFNGIGVTQNVLYENQKLIANQFNSAIGKIQDSLSSTASALGKLQDVVNQNAQALNTLVKQLSSNFGAISSVLNDILSRLDPPEAEVQIDRLITGRLQSLQTYVTQQLIRAAEIRWSANLAATKMSECVLGQSKRVDFCGKGYHLMSFPQSAPHGVVFLHVTYVPAQEKNFTTAPAICHDGKAHFPREGVFVSNGTHWFVTQRNFYEPQIITTDNTFVSGNCDVVIGIVNNTVYDPLQPELDSFKEELDKYFKNHTSPDVDLGDISGINASVVNIQKEIDRLNEVAKNLNESLIDLQELGKYEQYIKGGGGSDIIKLLNEQVNKEMQSSNLYMSMSSWCYTHSLDGAGLFLFDHAAEEYEHAKKLIIFLNENNVPVQLTSISAPEHKFEGLTQIFQKAYEHEQHISESINNIVDHAIKSKDHATFNFLQWYVAEQHEEEVLFKDILDKIELIGNENHGLYLADQYVKGIAKSRKS

SEQ ID NO: 4794 - protein, 1379 aa, Artificial Sequence
  SARS-CoV-2/France/GE1977/2020__EPI_ISL_414632 spike protein (1-1211)(K986P_V987P_T887W_A1020W) Ferritin construct
MFVFLVLLPLVSSQCVNLTTRTQLPPAYTNSFTRGVYYPDKVFRSSVLHSTQDLFLPFFSNVTWFHAIHVSGTNGTKRFDNPVLPFNDGVYFASTEKSNIIRGWIFGTTLDSKTQSLLIVNNATNVVIKVCEFQFCNDPFLGVYYHKNNKSWMESEFRVYSSANNCTFEYVSQPFLMDLEGKQGNFKNLREFVFKNIDGYFKIYSKHTPINLVRDLPQGFSALEPLVDLPIGINITRFQTLLALHRSYLTPGDSSSGWTAGAAAYYVGYLQPRTFLLKYNENGTITDAVDCALDPLSETKCTLKSFTVEKGIYQTSNFRVQPTESIVRFPNITNLCPFGEVFNATRFASVYAWNRKRISNCVADYSVLYNSASFSTFKCYGVSPTKLNDLCFTNVYADSFVIRGDEVRQIAPGQTGKIADYNYKLPDDFTGCVIAWNSNNLDSKVGGNYNYLYRLFRKSNLKPFERDISTEIYQAGSTPCNGVEGFNCYFPLQSYGFQPTNGVGYQPYRVVVLSFELLHAPATVCGPKKSTNLVKNKCVNFNFNGLTGTGVLTESNKKFLPFQQFGRDIADTTDAVRDPQTLEILDITPCSFGGVSVITPGTNTSNQVAVLYQGVNCTEVPVAIHADQLTPTWRVYSTGSNVFQTRAGCLIGAEHVNNSYECDIPIGAGICASYQTQTNSPRRARSVASQSIIAYTMSLGAENSVAYSNNSIAIPTNFTISVTTEILPVSMTKTSVDCTMYICGDSTECSNLLLQYGSFCTQLNRALTGIAVEQDKNTQEVFAQVKQIYKTPPIKDFGGFNFSQILPDPSKPSKRSFIEDLLFNKVTLADAGFIKQYGDCLGDIAARDLICAQKFNGLTVLPPLLTDEMIAQYTSALLAGTITSGWWFGAGAALQIPFAMQMAYRFNGIGVTQNVLYENQKLIANQFNSAIGKIQDSLFSTASALGKLQDVVNQNAQALNTLVKQLSSNFGAISSVLNDILSRLDPPEAEVQIDRLITGRLQSLQTYVTQQLIRAAEIRWSANLAATKMSECVLGQSKRVDFCGKGYHLMSFPQSAPHGVVFLHVTYVPAQEKNFTTAPAICHDGKAHFPREGVFVSNGTHWFVTQRNFYEPQIITTDNTFVSGNCDVVIGIVNNTVYDPLQPELDSFKEELDKYFKNHTSPDVDLGDISGINASVVNIQKEIDRLNEVAKNLNESLIDLQELGKYEQYIKGGGGSDIIKLLNEQVNKEMQSSNLYMSMSSWCYTHSLDGAGLFLFDHAAEEYEHAKKLIIFLNENNVPVQLTSISAPEHKFEGLTQIFQKAYEHEQHISESINNIVDHAIKSKDHATFNFLQWYVAEQHEEEVLFKDILDKIELIGNENHGLYLADQYVKGIAKSRKS

SEQ ID NO: 4795 - protein, 1379 aa, Artificial Sequence
  SARS-CoV-2/Finland/FIN-313/2020__EPI_ISL_414641 spike protein (1-1211)(K986P_V987P_T887W_A1020W) Ferritin construct
MFVFLVLLPLVSSQCVNLTTRTQLPPAYTNSFTRGVYYPDKVFRSSVLHSTQDLFLPFFSNVTWFHAIHVSGTNGTKRFDNPVLPFNDGVYFASTEKSNIIRGWIFGTTLDSKTQSLLIVNNATNVVIKVCEFQFCNDPFLGVYYHKNNKSWMESEFRVYSSANNCTFEYVSQPFLMDLEGKQGNFKNLREFVFKNIDGYFKIYSKHTPINLVRDLPQGFSALEPLVDLPIGINITRFKTLLALHRSYLTPGDSSSGWTAGAAAYYVGYLQPRTFLLKYNENGTITDAVDCALDPLSETKCTLKSFTVEKGIYQTSNFRVQPTESIVRFPNITNLCPFGEVFNATRFASVYAWNRKRISNCVADYSVLYNSASFSTFKCYGVSPTKLNDLCFTNVYADSFVIRGDEVRQIAPGQTGKIADYNYKLPDDFTGCVIAWNSNNLDSKVGGNYNYLYRLFRKSNLKPFERDISTEIYQAGSTPCNGVEGFNCYFPLQSYGFQPTNGVGYQPYRVVVLSFELLHAPATVCGPKKSTNLVKNKCVNFNFNGLTGTGVLTESNKKFLPFQQFGRDIADTTDAVRDPQTLEILDITPCSFGGVSVITPGTNTSNQVAVLYQGVNCTEVPVAIHADQLTPTWRVYSTGSNVFQTRAGCLIGAEHVNNSYECDIPIGAGICASYQTQTNSPRRARSVASQSIIAYTMSLGAENSVAYSNNSIAIPTNFTISVTTEILPVSMTKTSVDCTMYICGDSTECSNLLLQYGSFCTQLNRALTGIAVEQDKNTQEVFAQVKQIYKTPPIKDFGGFNFSQILPDPSKPSKRSFIEDLLFNKVTLADAGFIKQYGDCLGDIAARDLICAQKFNGLTVLPPLLTDEMIAQYTSALLAGTITSGWWFGAGAALQIPFAMQMAYRFNGIGVTQNVLYENQKLIANQFNSAIGKIQDSLSSTASALGKLQDVVNQNAQALNTLVKQLSSNFGAISSVLNDILSRLDPPEAEVQIDRLITGRLQSLQTYVTQQLIRAAEIRWSANLAATKMSECVLGQSKRVDFCGKGYHLMSFPQSAPHGVVFLHVTYVPAQEKNFTTAPAICHDGKAHFPREGVFVSNGTHWFVTQRNFYEPQIITTDNTFVSGNCDVVIGIVNNTVYDPLQPELDSFKEELDKYFKNHTSPDVDLGDISGINASVVNIQKEIDRLNEVAKNLNESLIDLQELGKYEQYIKGGGGSDIIKLLNEQVNKEMQSSNLYMSMSSWCYTHSLDGAGLFLFDHAAEEYEHAKKLIIFLNENNVPVQLTSISAPEHKFEGLTQIFQKAYEHEQHISESINNIVDHAIKSKDHATFNFLQWYVAEQHEEEVLFKDILDKIELIGNENHGLYLADQYVKGIAKSRKS

SEQ ID NO: 4796 - protein, 1379 aa, Artificial Sequence
  SARS-CoV-2/Netherlands/ZuidHolland_2/2020__EPI_ISL_414556 spike protein (1-1211)(K986P_V987P_T887W_A1020W) Ferritin construct
MFVFLVLLPLVSSQCVNLTTRTQLPPAYTNSFTRGVYYPDKVFRSSVLHSTQDLFLPFFSNVTWFHAIHVSGTNGTKRFDNPVLPFNDGVYFASTEKSNIIRGWIFGTTLDSKTQSLLIVNNATNVVIKVCEFQFCNDPFLGVYYHKNNKSWMESEFRVYSSANNCTFEYVSQPFLMDLEGKQGNFKNLREFVFKNIDGYFKIYSKHTPINLVRDLPQGFSALEPLVDLPIGINITRFQTLLALHRSYLTPGDSSSGWTAGAAAYYVGYLQPRTFLLKYNENGTITDAVDCALDPLSETKCTLKSFTVEKGIYQTSNFRVQPTESIVRFPNITNLCPFGEVFNATRFASVYAWNRKRISNCVADYSVLYNSASFSTFKCYGVSPTKLNDLCFTNVYADSFVIRGDEVRQIAPGQTGKIADYNYKLPDDFTGCVIAWNSNNLDSKVGGNYNYLYRLFRKSNLKPFERDISTEIYQAGSTPCNGVEGFNCYFPLQSYGFQPTNGVGYQPYRVVVLSFELLHAPATVCGPKKSTNLVKNKCVNFNFNGLTGTGVLTESNKKFLPFQQFGRDIADTTDAVRDPQTLEILDITPCSFGGVSVITPGTNTSNQVAVLYQGVNCTEVPVAIHADQLTPTWRVYSTGSNVFQTRAGCLIGAEHVNNSYECDIPIGAGICASYQTQTNSPRRARSVASQSIIAYTMSLGAENSVAYSNNSIAIPTNFTISVTTEILPVSMTKTSVDCTMYICGDSTECSNLLLQYGSFCTQLNRALTGIALEQDKNTQEVFAQVKQIYKTPPIKDFGGFNFSQILPDPSKPSKRSFIEDLLFNKVTLADAGFIKQYGDCLGDIAARDLICAQKFNGLTVLPPLLTDEMIAQYTSALLAGTITSGWWFGAGAALQIPFAMQMAYRFNGIGVTQNVLYENQKLIANQFNSAIGKIQDSLSSTASALGKLQDVVNQNAQALNTLVKQLSSNFGAISSVLNDILSRLDPPEAEVQIDRLITGRLQSLQTYVTQQLIRAAEIRWSANLAATKMSECVLGQSKRVDFCGKGYHLMSFPQSAPHGVVFLHVTYVPAQEKNFTTAPAICHDGKAHFPREGVFVSNGTHWFVTQRNFYEPQIITTDNTFVSGNCDVVIGIVNNTVYDPLQPELDSFKEELDKYFKNHTSPDVDLGDISGINASVVNIQKEIDRLNEVAKNLNESLIDLQELGKYEQYIKGGGGSDIIKLLNEQVNKEMQSSNLYMSMSSWCYTHSLDGAGLFLFDHAAEEYEHAKKLIIFLNENNVPVQLTSISAPEHKFEGLTQIFQKAYEHEQHISESINNIVDHAIKSKDHATFNFLQWYVAEQHEEEVLFKDILDKIELIGNENHGLYLADQYVKGIAKSRKS

SEQ ID NO: 4797 - protein, 1379 aa, Artificial Sequence
  SARS-CoV-2/USA/WA-UW31/2020__EPI_ISL_414618 spike protein (1-1211)(K986P_V987P_T887W_A1020W) Ferritin construct
MFVFLVLLPLVSSQCVNLTTRTQLPPAYTNSFTRGVYYPDKVFRSSVLHSTQDLFLPFFSNVTWFHAIHVSGTNGTKRFDNPVLPFNDGVYFASTEKSNIIRGWIFGTTLDSKTQSLLIVNNATNVVIKVCEFQFCNDPFLGVYYHKNNKSWMESEFRVYSSANNCTFEYVSQPFLMDLEGKQGNFKNLREFVFKNIDGYFKIYSKHTPINLVRDLPQGFSALEPLVDLPIGINITRFQTLLALHRSYLTPGDSSSGWTAGAAAYYVGYLQPRTFLLKYNENGTITDAVDCALDPLSETKCTLKSFTVEKGIYQTSNFRVQPTESIVRFPNITNLCPFGEVFNATRFASVYAWNRKRISNCVADYSVLYNSASFSTFKCYGVSPTKLNDLCFTNVYADSFVIRGDEVRQIAPGQTGKIADYNYKLPDDFTGCVIAWNSNNLDSKVGGNYNYLYRLFRKSNLKPFERDISTEIYQAGSTPCNGAEGFNCYFPLQSYGFQPTNGVGYQPYRVVVLSFELLHAPATVCGPKKSTNLVKNKCVNFNFNGLTGTGVLTESNKKFLPFQQFGRDIADTTDAVRDPQTLEILDITPCSFGGVSVITPGTNTSNQVAVLYQDVNCTEVPVAIHADQLTPTWRVYSTGSNVFQTRAGCLIGAEHVNNSYECDIPIGAGICASYQTQTNSPRRARSVASQSIIAYTMSLGAENSVAYSNNSIAIPTNFTISVTTEILPVSMTKTSVDCTMYICGDSTECSNLLLQYGSFCTQLNRALTGIAVEQDKNTQEVFAQVKQIYKTPPIKDFGGFNFSQILPDPSKPSKRSFIEDLLFNKVTLADAGFIKQYGDCLGDIAARDLICAQKFNGLTVLPPLLTDEMIAQYTSALLAGTITSGWWFGAGAALQIPFAMQMAYRFNGIGVTQNVLYENQKLIANQFNSAIGKIQDSLSSTASALGKLQDVVNQNAQALNTLVKQLSSNFGAISSVLNDILSRLDPPEAEVQIDRLITGRLQSLQTYVTQQLIRAAEIRWSANLAATKMSECVLGQSKRVDFCGKGYHLMSFPQSAPHGVVFLHVTYVPAQEKNFTTAPAICHDGKAHFPREGVFVSNGTHWFVTQRNFYEPQIITTDNTFVSGNCDVVIGIVNNTVYDPLQPELDSFKEELDKYFKNHTSPDVDLGDISGINASVVNIQKEIDRLNEVAKNLNESLIDLQELGKYEQYIKGGGGSDIIKLLNEQVNKEMQSSNLYMSMSSWCYTHSLDGAGLFLFDHAAEEYEHAKKLIIFLNENNVPVQLTSISAPEHKFEGLTQIFQKAYEHEQHISESINNIVDHAIKSKDHATFNFLQWYVAEQHEEEVLFKDILDKIELIGNENHGLYLADQYVKGIAKSRKS

SEQ ID NO: 4798 - protein, 1379 aa, Artificial Sequence
  SARS-CoV-2/South Korea/SNU01/2020__EPI_ISL_411929 spike protein (1-1211)(K986P_V987P_T887W_A1020W) Ferritin construct
MFVFLVLLPLVSSQCVNLTTRTQLPPAYTNSFTRGVYYPDKVFRSSVLHSTQDLFLPFFSNVTWFHAIHVSGTNGTKRFDNPVLPFNDGVYFASTEKSNIIRGWIFGTTLDSKTQSLLIVNNATNVVIKVCEFQFCNDPFLGVYYHKNNKSWMESEFRVYSSANNCTFEYVSQPFLMDLEGKQGNFKNLREFVFKNIDGYFKIYSKHTPINLVRDLPQGFWALEPLVDLPIGINITRFQTLLALHRSYLTPGDSSSGWTAGAAAYYVGYLQPRTFLLKYNENGTITDAVDCALDPLSETKCTLKSFTVEKGIYQTSNFRVQPTESIVRFPNITNLCPFGEVFNATRFASVYAWNRKRISNCVADYSVLYNSASFSTFKCYGVSPTKLNDLCFTNVYADSFVIRGDEVRQIAPGQTGKIADYNYKLPDDFTGCVIAWNSNNLDSKVGGNYNYLYRLFRKSNLKPFERDISTEIYQAGSTPCNGVEGFNCYFPLQSYGFQPTNGVGYQPYRVVVLSFELLHAPATVCGPKKSTNLVKNKCVNFNFNGLTGTGVLTESNKKFLPFQQFGRDIADTTDAVRDPQTLEILDITPCSFGGVSVITPGTNTSNQVAVLYQDVNCTEVPVAIHADQLTPTWRVYSTGSNVFQTRAGCLIGAEHVNNSYECDIPIGAGICASYQTQTNSPRRARSVASQSIIAYTMSLGAENSVAYSNNSIAIPTNFTISVTTEILPVSMTKTSVDCTMYICGDSTECSNLLLQYGSFCTQLNRALTGIAVEQDKNTQEVFAQVKQIYKTPPIKDFGGFNFSQILPDPSKPSKRSFIEDLLFNKVTLADAGFIKQYGDCLGDIAARDLICAQKFNGLTVLPPLLTDEMIAQYTSALLAGTITSGWWFGAGAALQIPFAMQMAYRFNGIGVTQNVLYENQKLIANQFNSAIGKIQDSLSSTASALGKLQDVVNQNAQALNTLVKQLSSNFGAISSVLNDILSRLDPPEAEVQIDRLITGRLQSLQTYVTQQLIRAAEIRWSANLAATKMSECVLGQSKRVDFCGKGYHLMSFPQSAPHGVVFLHVTYVPAQEKNFTTAPAICHDGKAHFPREGVFVSNGTHWFVTQRNFYEPQIITTDNTFVSGNCDVVIGIVNNTVYDPLQPELDSFKEELDKYFKNHTSPDVDLGDISGINASVVNIQKEIDRLNEVAKNLNESLIDLQELGKYEQYIKGGGGSDIIKLLNEQVNKEMQSSNLYMSMSSWCYTHSLDGAGLFLFDHAAEEYEHAKKLIIFLNENNVPVQLTSISAPEHKFEGLTQIFQKAYEHEQHISESINNIVDHAIKSKDHATFNFLQWYVAEQHEEEVLFKDILDKIELIGNENHGLYLADQYVKGIAKSRKS

SEQ ID NO: 4799 - protein, 1379 aa, Artificial Sequence
  SARS-CoV-2/China/WF0004/2020__EPI_ISL_413694 spike protein (1-1211)(K986P_V987P_T887W_A1020W) Ferritin construct
MFVFLVLLPLVSSQCVNLTTRTQLPPAYTNSFTRGVYYPDKVFRSSVLHSTQDLFLPFFSNVTWFHAIHVSGTNGTKRFDNPVLPFNDGVYFASTEKSNIIRGWIFGTTLDSKTQSLLIVNNATNVVIKVCEFQFCNDPFLGVYYHKNNKSWTESEFRVYSSANNCTFEYVSQPFLMDLEGKQGNFKNLREFVFKNIDGYFKIYSKHTPINLVRDLPQGFSALEPLVDLPIGINITRFQTLLALHRSYLTPGDSSSGWTAGAAAYYVGYLQPRTFLLKYNENGTITDAVDCALDPLSETKCTLKSFTVEKGIYQTSNFRVQPTESIVRFPNITNLCPFGEVFNATRFASVYAWNRKRISNCVADYSVLYNSASFSTFKCYGVSPTKLNDLCFTNVYADSFVIRGDEVRQIAPGQTGKIADYNYKLPDDFTGCVIAWNSNNLDSKVGGNYNYLYRLFRKSNLKPFERDISTEIYQAGSTPCNGVEGFNCYFPLQSYGFQPTNGVGYQPYRVVVLSFELLHAPATVCGPKKSTNLVKNKCVNFNFNGLTGTGVLTESNKKFLPFQQFGRDIADTTDAVRDPQTLEILDITPCSFGGVSVITPGTNTSNQVAVLYQDVNCTEVPVAIHADQLTPTWRVYSTGSNVFQTRAGCLIGAEHVNNSYECDIPIGAGICASYQTQTNSPRRARSVASQSIIAYTMSLGAENSVAYSNNSIAIPTNFTISVTTEILPVSMTKTSVDCTMYICGDSTECSNLLLQYGSFCTQLNRALTGIAVEQDKNTQEVFAQVKQIYKTPPIKDFGGFNFSQILPDPSKPSKRSFIEDLLFNKVTLADAGFIKQYGDCLGDIAARDLICAQKFNGLTVLPPLLTDEMIAQYTSALLAGTITSGWWFGAGAALQIPFAMQMAYRFNGIGVTQNVLYENQKLIANQFNSAIGKIQDSLSSTASALGKLQDVVNQNAQALNTLVKQLSSNFGAISSVLNDILSRLDPPEAEVQIDRLITGRLQSLQTYVTQQLIRAAEIRWSANLAATKMSECVLGQSKRFDFCGKGYHLMSFPQSAPHGVVFLHVTYVPAQEKNFTTAPAICHDGKAHFPREGVFVSNGTHWFVTQRNFYEPQIITTDNTFVSGNCDVVIGIVNNTVYDPLQPELDSFKEELDKYFKNHTSPDVDLGDISGINASVVNIQKEIDRLNEVAKNLNESLIDLQELGKYEQYIKGGGGSDIIKLLNEQVNKEMQSSNLYMSMSSWCYTHSLDGAGLFLFDHAAEEYEHAKKLIIFLNENNVPVQLTSISAPEHKFEGLTQIFQKAYEHEQHISESINNIVDHAIKSKDHATFNFLQWYVAEQHEEEVLFKDILDKIELIGNENHGLYLADQYVKGIAKSRKS

SEQ ID NO: 4800 - protein, 1379 aa, Artificial Sequence
  SARS-CoV-2/China/WF0028/2020__EPI_ISL_413791 spike protein (1-1211)(K986P_V987P_T887W_A1020W) Ferritin construct
MFVFLVLLPLVSSQCVNLTTRTQLPPAYTNSFTRGVYYPDKVFRSSVLHSTQDLFLPFFSNVTWFHAIHVSGTNGTKRFDNPVLPFNDGVYFASTEKSNIIRGWIFGTTLDSKTQSLLIVNNATNVVIKVCEFQFCNDPFLGVYYHKNNKSWMESEFRVYSSANNCTFEYVSQPFLMDLEGKQGNFKNLREFVFKNIDGYFKIYSKHTPINLVRDLPQGFSALEPLVDLPIGINITRFQTLLALHRSYLTPGDSSSGWTAGAAAYYVGYLQPRTFLLKYNENGTITDAVDCALDPLSETKCTLKSFTVEKGIYQTSNFRVQPTESIVRFPNITNLCPFGEVFNATRFASVYAWNRKRISNCVADYSVLYNSASFSTFKCYGVSPTKLNDLCFTNVYADSFVIRGDEVRQIAPGQTGKIADYNYKLPDDFTGCVIAWNSNNLDSKVGGNYNYLYRLFRKSNLKPFERDISTEIYQAGSTPCNGVEGFNCYFPLQSYGFQPTNGVGYQPYRVVVLSFELLHAPATVCGPKKSTNLVKNKCVNFNFNGLTGTGVLTESNKKFLPFQQFGRDIADTTDAVRDPQTLEILDITPCSFGGVSVITPGTNTSNQVAVLYQDVNCTEVPVAIHADQLTPTWRVYSTGSNVFQTRAGCLIGAEHVNNSYECDIPIGAGICASYQTQTNSPRRARSVASQSIIAYTMSLGAENSVAYSNNSIAIPTNFTISVTTEILPVSMTKTSVDCTMYICGDSTECSNLLLQYGSFCTQLNRALTGIAVEQDKNTQEVFAQVKQIYKTPPIKDFGGFNFSQILPDPSKPSKRSFIEDLLFNKVTLADAGFIKQYGDCLGDIAARDLICAQKFNGLTVLPPLLTDEMIAQYTSALLAGTITSGWWFGAGAALQIPFAMQMAYRFNGIGVTQNVLYENQKLIANQFNSAIGKIQDSLSSTASALGKLQDVVNQNAQALNTLVKQLSSNFGAISSVLNDILSRLDPPEAEVQIDRLITGRLQSLQTYVTQQLIRAAEIRWSANLAATKMSECVLGQSKRVDFCGKGYHLMSFPQSAPHGVVFLHVTYVPAQEKNFTTAPAICHDGKAHFPREGVFVSNGTHWFVTQRNFYEPQIITTDNTFVSGNCDVVIGIVNNTVYDPLQPELESFKEELDKYFKNHTSPDVDLGDISGINASVVNIQKEIDRLNEVAKNLNESLIDLQELGKYEQYIKGGGGSDIIKLLNEQVNKEMQSSNLYMSMSSWCYTHSLDGAGLFLFDHAAEEYEHAKKLIIFLNENNVPVQLTSISAPEHKFEGLTQIFQKAYEHEQHISESINNIVDHAIKSKDHATFNFLQWYVAEQHEEEVLFKDILDKIELIGNENHGLYLADQYVKGIAKSRKS

SEQ ID NO: 4801 - protein, 1379 aa, Artificial Sequence
  SARS-CoV-2/2019-nCoV/USA-CruiseA-18/2020__MT159716.1 spike protein (1-1211)(K986P_V987P_T887W_A1020W) Ferritin construct
MFVFLVLLPLVSSQCVNLTTRTQLPPAYTNSFTRGVYYPDKVFRSSVLHSTQDLFLPFFSNVTWFHAIHVSGTNGTKRFDNPVLPFNDGVYFASTEKSNIIRGWIFGTTLDSKTQSLLIVNNATNVVIKVCEFQFCNDPFLGVYYHKNNKSWMESELRVYSSANNCTFEYVSQPFLMDLEGKQGNFKNLREFVFKNIDGYFKIYSKHTPINLVRDLPQGFSALEPLVDLPIGINITRFQTLLALHRSYLTPGDSSSGWTAGAAAYYVGYLQPRTFLLKYNENGTITDAVDCALDPLSETKCTLKSFTVEKGIYQTSNFRVQPTESIVRFPNITNLCPFGEVFNATRFASVYAWNRKRISNCVADYSVLYNSASFSTFKCYGVSPTKLNDLCFTNVYADSFVIRGDEVRQIAPGQTGKIADYNYKLPDDFTGCVIAWNSNNLDSKVGGNYNYLYRLFRKSNLKPFERDISTEIYQAGSTPCNGVEGFNCYFPLQSYGFQPTNGVGYQPYRVVVLSFELLHAPATVCGPKKSTNLVKNKCVNFNFNGLTGTGVLTESNKKFLPFQQFGRDIADTTDAVRDPQTLEILDITPCSFGGVSVITPGTNTSNQVAVLYQDVNCTEVPVAIHADQLTPTWRVYSTGSNVFQTRAGCLIGAEHVNNSYECDIPIGAGICASYQTQTNSPRRARSVASQSIIAYTMSLGAENSVAYSNNSIAIPTNFTISVTTEILPVSMTKTSVDCTMYICGDSTECSNLLLQYGSFCTQLNRALTGIAVEQDKNTQEVFAQVKQIYKTPPIKDFGGFNFSQILPDPSKPSKRSFIEDLLFNKVTLADAGFIKQYGDCLGDIAARDLICAQKFNGLTVLPPLLTDEMIAQYTSALLAGTITSGWWFGAGAALQIPFAMQMAYRFNGIGVTQNVLYENQKLIANQFNSAIGKIQDSLSSTASALGKLQDVVNQNAQALNTLVKQLSSNFGAISSVLNDILSRLDPPEAEVQIDRLITGRLQSLQTYVTQQLIRAAEIRWSANLAATKMSECVLGQSKRVDFCGKGYHLMSFPQSAPHGVVFLHVTYVPAQEKNFTTAPAICHDGKAHFPREGVFVSNGTHWFVTQRNFYEPQIITTDNTFVSGNCDVVIGIVNNTVYDPLQPELDSFKEELDKYFKNHTSPDVDLGDISGINASVVNIQKEIDRLNEVAKNLNESLIDLQELGKYEQYIKGGGGSDIIKLLNEQVNKEMQSSNLYMSMSSWCYTHSLDGAGLFLFDHAAEEYEHAKKLIIFLNENNVPVQLTSISAPEHKFEGLTQIFQKAYEHEQHISESINNIVDHAIKSKDHATFNFLQWYVAEQHEEEVLFKDILDKIELIGNENHGLYLADQYVKGIAKSRKS

SEQ ID NO: 4802 - protein, 1379 aa, Artificial Sequence
  SARS-CoV-2/SARS-CoV-2/Yunnan-01/human/2020/CHN__MT049951.1 spike protein (1-1211)(K986P_V987P_T887W_A1020W) Ferritin construct
MFVFLVLLPLVSSQCVNLTTRTQLPPANTNSFTRGVYYPDKVFRSSVLHSTQDLFLPFFSNVTWFHAIHVSGTNGTKRFDNPVLPFNDGVYFASTEKSNIIRGWIFGTTLDSKTQSLLIVNNATNVVIKVCEFQFCNDPFLGVYYHKNNKSWMESEFRVYSSANNCTFEYVSQPFLMDLEGKQGNFKNLREFVFKNIDGYFKIYSKHTPINLVRDLPQGFSALEPLVDLPIGINITRFQTLLALHRSYLTPGDSSSGWTAGAAAYYVGYLQPRTFLLKYNENGTITDAVDCALDPLSETKCTLKSFTVEKGIYQTSNFRVQPTESIVRFPNITNLCPFGEVFNATRFASVYAWNRKRISNCVADYSVLYNSASFSTFKCYGVSPTKLNDLCFTNVYADSFVIRGDEVRQIAPGQTGKIADYNYKLPDDFTGCVIAWNSNNLDSKVGGNYNYLYRLFRKSNLKPFERDISTEIYQAGSTPCNGVEGFNCYFPLQSYGFQPTNGVGYQPYRVVVLSFELLHAPATVCGPKKSTNLVKNKCVNFNFNGLTGTGVLTESNKKFLPFQQFGRDIADTTDAVRDPQTLEILDITPCSFGGVSVITPGTNTSNQVAVLYQDVNCTEVPVAIHADQLTPTWRVYSTGSNVFQTRAGCLIGAEHVNNSYECDIPIGAGICASYQTQTNSPRRARSVASQSIIAYTMSLGAENSVAYSNNSIAIPTNFTISVTTEILPVSMTKTSVDCTMYICGDSTECSNLLLQYGSFCTQLNRALTGIAVEQDKNTQEVFAQVKQIYKTPPIKDFGGFNFSQILPDPSKPSKRSFIEDLLFNKVTLADAGFIKQYGDCLGDIAARDLICAQKFNGLTVLPPLLTDEMIAQYTSALLAGTITSGWWFGAGAALQIPFAMQMAYRFNGIGVTQNVLYENQKLIANQFNSAIGKIQDSLSSTASALGKLQDVVNQNAQALNTLVKQLSSNFGAISSVLNDILSRLDPPEAEVQIDRLITGRLQSLQTYVTQQLIRAAEIRWSANLAATKMSECVLGQSKRVDFCGKGYHLMSFPQSAPHGVVFLHVTYVPAQEKNFTTAPAICHDGKAHFPREGVFVSNGTHWFVTQRNFYEPQIITTDNTFVSGNCDVVIGIVNNTVYDPLQPELDSFKEELDKYFKNHTSPDVDLGDISGINASVVNIQKEIDRLNEVAKNLNESLIDLQELGKYEQYIKGGGGSDIIKLLNEQVNKEMQSSNLYMSMSSWCYTHSLDGAGLFLFDHAAEEYEHAKKLIIFLNENNVPVQLTSISAPEHKFEGLTQIFQKAYEHEQHISESINNIVDHAIKSKDHATFNFLQWYVAEQHEEEVLFKDILDKIELIGNENHGLYLADQYVKGIAKSRKS

SEQ ID NO: 4803 - protein, 1379 aa, Artificial Sequence
  SARS-CoV-2/USA/WA-UW292/2020__EPI_ISL_418077 spike protein (1-1211)(K986P_V987P_T887W_A1020W) Ferritin construct
MFVFLVLLPLVSSQCVNLTTRTQLPPAYTNSFTRGVYYPDKVFRSSVLHSTQDLFLPFFSNVTWFHAIHVSGTNGTKRFDNPVLPFNDGVYFASTEKSNIIRGWIFGTTLDSKTQSLLIVNNATNVVIKVCEFQFCNDPFLGVYYHKNNKSWMESEFRVYSSANNCTFEYVSQPFLMDLEGKQGNFKNLREFVFKNIDGYFKIYSKHTPINLVRDLPQGFSALEPLVDLPIGINITRFQTLLALHRSYLTPGDSSSGWTAGAAAYYVGYLQPRTFLLKYNENGTITDAVDCALDPLSETKCTLKSFTVEKGIYQTSNFRVQPTESIVRFPNITNLCPFGEVFNATRFASVYAWNRKRISNCVADYSVLYNSASFSTFKCYGVSPTKLNDLCFTNVYADSFVIRGDEVRQIAPGQTGKIADYNYKLPDDFTGCVIAWNSNNLDSKVGGNYNYLYRLFRKSNLKPFERDISTEIYQASSTPCNGVEGFNCYFPLQSYGFQPTNGVGYQPYRVVVLSFELLHAPATVCGPKKSTNLVKNKCVNFNFNGLTGTGVLTESNKKFLPFQQFGRDIADTTDAVRDPQTLEILDITPCSFGGVSVITPGTNTSNQVAVLYQDVNCTEVPVAIHADQLTPTWRVYSTGSNVFQTRAGCLIGAEHVNNSYECDIPIGAGICASYQTQTNSPRRARSVASQSIIAYTMSLGAENSVAYSNNSIAIPTNFTISVTTEILPVSMTKTSVDCTMYICGDSTECSNLLLQYGSFCTQLNRALTGIAVEQDKNTQEVFAQVKQIYKTPPIKDFGGFNFSQILPDPSKPSKRSFIEDLLFNKVTLADAGFIKQYGDCLGDIAARDLICAQKFNGLTVLPPLLTDEMIAQYTSALLAGTITSGWWFGAGAALQIPFAMQMAYRFNGIGVTQNVLYENQKLIANQFNSAIGKIQDSLSSTASALGKLQDVVNQNAQALNTLVKQLSSNFGAISSVLNDILSRLDPPEAEVQIDRLITGRLQSLQTYVTQQLIRAAEIRWSANLAATKMSECVLGQSKRVDFCGKGYHLMSFPQSAPHGVVFLHVTYVPAQEKNFTTAPAICHDGKAHFPREGVFVSNGTHWFVTQRNFYEPQIITTDNTFVSGNCDVVIGIVNNTVYDPLQPELDSFKEELDKYFKNHTSPDVDLGDISGINASVVNIQKEIDRLNEVAKNLNESLIDLQELGKYEQYIKGGGGSDIIKLLNEQVNKEMQSSNLYMSMSSWCYTHSLDGAGLFLFDHAAEEYEHAKKLIIFLNENNVPVQLTSISAPEHKFEGLTQIFQKAYEHEQHISESINNIVDHAIKSKDHATFNFLQWYVAEQHEEEVLFKDILDKIELIGNENHGLYLADQYVKGIAKSRKS

SEQ ID NO: 4804 - protein, 1379 aa, Artificial Sequence
  SARS-CoV-2/Iceland/192/2020__EPI_ISL_417819 spike protein (1-1211)(K986P_V987P_T887W_A1020W) Ferritin construct
MFVFFVLLPLVSSQCVNLTTRTQLPPAYTNSFTRGVYYPDKVFRSSVLHSTQDLFLPFFSNVTWFHAIHVSGTNGTKRFDNPVLPFNDGVYFASTEKSNIIRGWIFGTTLDSKTQSLLIVNNATNVVIKVCEFQFCNDPFLGVYYHKNNKSWMESEFRVYSSANNCTFEYVSQPFLMDLEGKQGNFKNLREFVFKNIDGYFKIYSKHTPINLVRDLPQGFSALEPLVDLPIGINITRFQTLLALHRSYLTPGDSSSGWTAGAAAYYVGYLQPRTFLLKYNENGTITDAVDCALDPLSETKCTLKSFTVEKGIYQTSNFRVQPTESIVRFPNITNLCPFGEVFNATRFASVYAWNRKRISNCVADYSVLYNSASFSTFKCYGVSPTKLNDLCFTNVYADSFVIRGDEVRQIAPGQTGKIADYNYKLPDDFTGCVIAWNSNNLDSKVGGNYNYLYRLFRKSNLKPFERDISTEIYQAGSTPCNGVEGFNCYFPLQSYGFQPTNGVGYQPYRVVVLSFELLHAPATVCGPKKSTNLVKNKCVNFNFNGLTGTGVLTESNKKFLPFQQFGRDIADTTDAVRDPQTLEILDITPCSFGGVSVITPGTNTSNQVAVLYQGVNCTEVPVAIHADQLTPTWRVYSTGSNVFQTRAGCLIGAEHVNNSYECDIPIGAGICASYQTQTNSPRRARSVASQSIIAYTMSLGAENSVAYSNNSIAIPTNFTISVTTEILPVSMTKTSVDCTMYICGDSTECSNLLLQYGSFCTQLNRALTGIAVEQDKNTQEVFAQVKQIYKTPPIKDFGGFNFSQILPDPSKPSKRSFIEDLLFNKVTLADAGFIKQYGDCLGDIAARDLICAQKFNGLTVLPPLLTDEMIAQYTSALLAGTITSGWWFGAGAALQIPFAMQMAYRFNGIGVTQNVLYENQKLIANQFNSAIGKIQDSLSSTASALGKLQDVVNQNAQALNTLVKQLSSNFGAISSVLNDILSRLDPPEAEVQIDRLITGRLQSLQTYVTQQLIRAAEIRWSANLAATKMSECVLGQSKRVDFCGKGYHLMSFPQSAPHGVVFLHVTYVPAQEKNFTTAPAICHDGKAHFPREGVFVSNGTHWFVTQRNFYEPQIITTDNTFVSGNCDVVIGIVNNTVYDPLQPELDSFKEELDKYFKNHTSPDVDLGDISGINASVVNIQKEIDRLNEVAKNLNESLIDLQELGKYEQYIKGGGGSDIIKLLNEQVNKEMQSSNLYMSMSSWCYTHSLDGAGLFLFDHAAEEYEHAKKLIIFLNENNVPVQLTSISAPEHKFEGLTQIFQKAYEHEQHISESINNIVDHAIKSKDHATFNFLQWYVAEQHEEEVLFKDILDKIELIGNENHGLYLADQYVKGIAKSRKS

SEQ ID NO: 4805 - protein, 1379 aa, Artificial Sequence
  SARS-CoV-2/Belgium/ULG-6939/2020__EPI_ISL_417020 spike protein (1-1211)(K986P_V987P_T887W_A1020W) Ferritin construct
MFVFLVLLPLVSSQCVNLTTRTQLPPAYTNSFTRGVYYPDKVFRSSVLHSTQDLFLPFFSNVTWFHAIHVSGTNGTKRFDNPVLPFNDGVYFASTEKSNIIRGWIFGTTLDSKTQSLLIVNNATNVVIKVCEFQFCNDPFLGVYYHKNNKSWMESEFRVYSSANNCTFEYVSQPFLMDLEGKQGNFKNLREFVFKNIDGYFKIYSKHTPINLVRDLPQGFSALEPLVDLPIGINITRFQTLLALHRSYLTPGDSSSGWTAGAAAYYVGYLQPRTFLLKYNENGTITDAVDCALDPLSETKCTLKSFTVEKGIYQTSNFRVQPTESIVRFPNITNLCPFGEVFNATRFASVYAWNRKRISNCVADYSVLYNSASFSTFKCYGVSPTKLNDLCFTNVYADSFVIRGDEVRQIAPGQTGKIADYNYKLPDDFTGCVIAWNSNNLDSKVGGNYNYLYRLFRKSNLKPFERDISTEIYQAGSTPCNGVEGFNCYFPLQSYGFQPTNGVGYQPYRVVVLSFELLHAPATVCGPKKSTNLVKNKCVNFNFNGLTGTGVLTESNKKFLPFQQFGRDIADTTDAVRDPQTLEILDITPCSFGGVSVITPGTNTSNQVAVLYQGVNCTEVPVAIHADQLTPTWRVYSTGSNVFQTRAGCLIGAEHVNNSYECDIPIGAGICASYQTQTNSPRRARSVASQSIIAYTMSLGAENSVVYSNNSIAIPTNFTISVTTEILPVSMTKTSVDCTMYICGDSTECSNLLLQYGSFCTQLNRALTGIAVEQDKNTQEVFAQVKQIYKTPPIKDFGGFNFSQILPDPSKPSKRSFIEDLLFNKVTLADAGFIKQYGDCLGDIAARDLICAQKFNGLTVLPPLLTDEMIAQYTSALLAGTITSGWWFGAGAALQIPFAMQMAYRFNGIGVTQNVLYENQKLIANQFNSAIGKIQDSLSSTASALGKLQDVVNQNAQALNTLVKQLSSNFGAISSVLNDILSRLDPPEAEVQIDRLITGRLQSLQTYVTQQLIRAAEIRWSANLAATKMSECVLGQSKRVDFCGKGYHLMSFPQSAPHGVVFLHVTYVPAQEKNFTTAPAICHDGKAHFPREGVFVSNGTHWFVTQRNFYEPQIITTDNTFVSGNCDVVIGIVNNTVYDPLQPELDSFKEELDKYFKNHTSPDVDLGDISGINASVVNIQKEIDRLNEVAKNLNESLIDLQELGKYEQYIKGGGGSDIIKLLNEQVNKEMQSSNLYMSMSSWCYTHSLDGAGLFLFDHAAEEYEHAKKLIIFLNENNVPVQLTSISAPEHKFEGLTQIFQKAYEHEQHISESINNIVDHAIKSKDHATFNFLQWYVAEQHEEEVLFKDILDKIELIGNENHGLYLADQYVKGIAKSRKS

SEQ ID NO: 4806 - protein, 1379 aa, Artificial Sequence
  SARS-CoV-2/France/HF2496/2020__EPI_ISL_418231 spike protein (1-1211)(K986P_V987P_T887W_A1020W) Ferritin construct
MFVFLVLLPLVSSQCVNLTTRTQLPPAYTNSFTRGVYYPDKVFRSSVLHSTQDLFLPFFSNVTWFHAIHVSGTNGTKRFDNPVLPFNDGVYFASTEKSNIIRGWIFGTTLDSKTQSLLIVNNATNVVIKVCEFQFCNDPFLGVYYHKNNKSWMESEFRVYSSANNCTFEYVSQPFLMDLEGKQGNFKNLREFVFKNIDGYFKIYSKHTPINLVRDLPQGFSALEPLVDLPIGINITRFQTLLALHRSYLTPGDSSSGWTAGAAAYYVGYLQPRTFLLKYNENGTITDAVDCALDPLSETKCTLKSFTVEKGIYQTSNFRVQPTESIVRFPNITNLCPFGEVFNATRFASVYAWNRKRISNCVADYSVLYNSASFSTFKCYGVSPTKLNDLCFTNVYADSFVIRGDEVRQIAPGQTGKIADYNYKLPDDFTGCVIAWNSNNLDSKVGGNYNYLYRLFRKSNLKPFERDISTEIYQAGSTPCNGVEGFNCYFPLQSYGFQPTNGVGYQPYRVVVLSFELLHAPATVCGPKKSTNLVKNKCVNFNFNGLTGTGVLTESNKKFLPFQQFGRDIADTTDAVRDPQTLEILDITPCSFGGVSVITPGTNTSNQVAVLYQGVNCTEVPVAIHADQLTPTWRVYSTGSNVFQTRAGCLIGAEHVNNSYECDIPIGAGICASYQTQTNSPRRARSVASQSIIAYTMSLGAENSVAYSNNSIAIPTNFTISVTTEILPVSMTKTSVDCTMYICGDSTECSNLLLQYGSFCTQLNRALTGIAVEQDKNTQEVFAQVKQIYKTPPIKDFGGFNFSQILPDPSKPSKRSFIEDLLFNKVTLADAGFIKQYGDCLGDIVARDLICAQKFNGLTVLPPLLTDEMIAQYTSALLAGTITSGWWFGAGAALQIPFAMQMAYRFNGIGVTQNVLYENQKLIANQFNSAIGKIQDSLSSTASALGKLQDVVNQNAQALNTLVKQLSSNFGAISSVLNDILSRLDPPEAEVQIDRLITGRLQSLQTYVTQQLIRAAEIRWSANLAATKMSECVLGQSKRVDFCGKGYHLMSFPQSAPHGVVFLHVTYVPAQEKNFTTAPAICHDGKAHFPREGVFVSNGTHWFVTQRNFYEPQIITTDNTFVSGNCDVVIGIVNNTVYDPLQPELDSFKEELDKYFKNHTSPDVDLGDISGINASVVNIQKEIDRLNEVAKNLNESLIDLQELGKYEQYIKGGGGSDIIKLLNEQVNKEMQSSNLYMSMSSWCYTHSLDGAGLFLFDHAAEEYEHAKKLIIFLNENNVPVQLTSISAPEHKFEGLTQIFQKAYEHEQHISESINNIVDHAIKSKDHATFNFLQWYVAEQHEEEVLFKDILDKIELIGNENHGLYLADQYVKGIAKSRKS

SEQ ID NO: 4807 - protein, 1379 aa, Artificial Sequence
  SARS-CoV-2/USA/WA-UW291/2020__EPI_ISL_418076 spike protein (1-1211)(K986P_V987P_T887W_A1020W) Ferritin construct
MFVFLVLLPLVSSQCVNLTTRTQLPPAYTNSFTRGVYYPDKVFRSSVLHSTQDLFLPFFSNVTWFHAIHVSGTNGTKRFDNPVLPFNDGVYFASTEKSNIIRGWIFGTTLDSKTQSLLIVNNATNVVIKVCEFQFCNDPFLGVYYHKNNKSWMESEFRVYSSANNCTFEYVSQPFLMDLEGKQGNFKNLREFVFKNIDGYFKIYSKHTPINLVRDLPQGFSALEPLVDLPIGINITRFQTLLALHRSYLTPGDSSSGWTAGAAAYYVGYLQPRTFLLKYNENGTITDAVDCALDPLSETKCTLKSFTVEKGIYQTSNFRVQPTESIVRFPNITNLCPFGEVFNATRFASVYAWNRKRISNCVADYSVLYNSASFSTFKCYGVSPTKLNDLCFTNVYADSFVIRGDEVRQIAPGQTGKIADYNYKLPDDFTGCVIAWNSNNLDSKVGGNYNYLYRLFRKSNLKPFERDISTEIYQAGSTPCNGVEGFNCYFPLQSYGFQPTNGVGYQPYRVVVLSFELLHAPATVCGPKKSTNLVKNKCVNFNFNGLTGTGVLTESNKKFLPFQQFGRDIADTTDAVRDPQTLEILDITPCSFGGVSVITPGTNTSNQVAVLYQGVNCTEVPVAIHADQLTPTWRVYSTGSNVFQTRAGCLIGAEHVNNSYECDIPIGAGICASYQTQTNSPRRARSVASQSIIAYTMSLGAENSVAYSNNSIAIPTNFTISVTTEILPVSMTKTSVDCTMYICGDSTECSNLLLQYGSFCTQLNRALTGIAVEQDKNTQEVFAQVKQIYKTPPIKDFGGFNFSQILPDPSKPSKRSFIEDLLFNKVTLADAGFIKQYGDCLGDIAARDLICAQKFNGLTVLPPLLTDEMIAQYTSALLAGTITSGWWFGAGAALQIPFAMQMAYRFNGIGVTQNVLYENQKLIANQFNSAIGKIQYSLSSTASALGKLQDVVNQNAQALNTLVKQLSSNFGAISSVLNDILSRLDPPEAEVQIDRLITGRLQSLQTYVTQQLIRAAEIRWSANLAATKMSECVLGQSKRVDFCGKGYHLMSFPQSAPHGVVFLHVTYVPAQEKNFTTAPAICHDGKAHFPREGVFVSNGTHWFVTQRNFYEPQIITTDNTFVSGNCDVVIGIVNNTVYDPLQPELDSFKEELDKYFKNHTSPDVDLGDISGINASVVNIQKEIDRLNEVAKNLNESLIDLQELGKYEQYIKGGGGSDIIKLLNEQVNKEMQSSNLYMSMSSWCYTHSLDGAGLFLFDHAAEEYEHAKKLIIFLNENNVPVQLTSISAPEHKFEGLTQIFQKAYEHEQHISESINNIVDHAIKSKDHATFNFLQWYVAEQHEEEVLFKDILDKIELIGNENHGLYLADQYVKGIAKSRKS

SEQ ID NO: 4808 - protein, 1379 aa, Artificial Sequence; identical to SEQ ID NO: 4771
  SARS-CoV-2/Portugal/PT0034/2020__EPI_ISL_418019 spike protein (1-1211)(K986P_V987P_T887W_A1020W) Ferritin construct

SEQ ID NO: 4809 - protein, 1379 aa, Artificial Sequence
  SARS-CoV-2/Iceland/202/2020__EPI_ISL_417750 spike protein (1-1211)(K986P_V987P_T887W_A1020W) Ferritin construct
MFVFLVLLPLVSSQCVNLTTRTQLPPAYTNSFTRGVYYPDKVFRSSVLHSTQDLFLPFFSNVTWFHAIHVSGTNGTKRFDNPVLPFNDGVYFASTEKSNIIRGWIFGTTLDSKTQSLLIVNNATNVVIKVCEFQFCNDPFLGVYYHKNNKSWMESEFRVYSSANNCTFEYVSQPFLMDLEGKQGNFKNLREFVFKNIDGYFKIYSKHTPINLVRDLPQGFSALEPLVDLPIGINITRFQTLLALHRSYLTPGDSSSGWTAGAAAYYVGYLQPRTFLLKYNENGTITDAVDCALDPLSETKCTLKSFTVEKGIYQTSNFRVQPTESIVRFPNITNLCPFGEVFNATRFASVYAWNRKRISNCVADYSVLYNSASFSTFKCYGVSPTKLNDLCFTNVYADSFVIRGDEVRQIAPGQTGKIADYNYKLPDDFTGCVIAWNSNNLDSKVGGNYNYLYRLFRKSNLKPFERDISTEIYQAGSTPCNGVEGFNCYFPLQSYGFQPTNGVGYQPYRVVVLSFELLHAPATVCGPKKSTNLVKNKCVNFNFNGLTGTGVLTESNKKFLPFQQFGRDIADTTDAVRDPQTLEILDITPCSFGGVSVITPGTNTSNQVAVLYQDVNCTEVPVAIHADQLTPTWRVYSTGSNVFQTRAGCLIGAEHVNNSYECDIPIGAGICASYQTQTNSPRRARSVASQSIIAYTMSLGAENSVAYSNNSIAIPTNFTISVTTEILPVSMTKTSVDCTMYICGDSTECSNLLLQYGSFCTQLNRALTGIAVEQDKNTQEVFAQVKQIYKTPPIKDFGGFNFSQILPDPSKPSKRSFIEDLLFNKVTLADAGFIKQYGDCLGDIAARDLICAQKFNGLTVLPPLLTDEMIAQYTSALLAGTITSGWWFGAGAALQIPFAMQMAYRFNGIGVTQNVLYENQKLIANQFNSAIGKIQDSLSSTASALGKLQDVVNQNAQALNTLVKQLSSNFGAISSVLNDILSRLDPPEAEVQIDRLITGRLQSLQTYVTQQLIRAAEIRWSANLAATKMSECVLGQSKRVDFCGKGYHLMSFPQSAPHGVVFLHVTYVPAQEKNFTTAPAICHDGKAHFPREGVFVSNGTHWFVTQRNFYEPQIITTDNTFVSGNCDVVIGIVNNTVYDPLQPELDSFKEELDKYFKNHTSPDVDLGDIPGINASVVNIQKEIDRLNEVAKNLNESLIDLQELGKYEQYIKGGGGSDIIKLLNEQVNKEMQSSNLYMSMSSWCYTHSLDGAGLFLFDHAAEEYEHAKKLIIFLNENNVPVQLTSISAPEHKFEGLTQIFQKAYEHEQHISESINNIVDHAIKSKDHATFNFLQWYVAEQHEEEVLFKDILDKIELIGNENHGLYLADQYVKGIAKSRKS

SEQ ID NO: 4810 - protein, 1379 aa, Artificial Sequence
  SARS-CoV-2/USA/WA-UW261/2020__EPI_ISL_418046 spike protein (1-1211)(K986P_V987P_T887W_A1020W) Ferritin construct
MFVFLVLLPLVSSQCVNLTTRTQLPPAYTNSFTRGVYYPDKVFRSSVLHSTQDLFLPFFSNVTWFHAIHVSGTNGTKRFDNPVLPFNDGVYFASTEKSNIIRGWIFGTTLDSKTQSLLIVNNATNVVIKVCEFQFCNDPFLGVYYHKNNKSWMESEFRVYSSANNCTFEYVSQPFLMDLEGKQGNFKNLREFVFKNIDGYFKIYSKHTPINLVRDLPQGFSALEPLVDLPIGINITRFQTLLALHRSYLTPGDSSSGWTAGAAAYYVGYLQPRTFLLKYNENGTITDAVDCALDPLSETKCTLKSFTVEKGIYQTSNFRVQPTESIVRFPNITNLCPFGEVFNATRFTSVYAWNRKRISNCVADYSVLYNSASFSTFKCYGVSPTKLNDLCFTNVYADSFVIRGDEVRQIAPGQTGKIADYNYKLPDDFTGCVIAWNSNNLDSKVGGNYNYLYRLFRKSNLKPFERDISTEIYQAGSTPCNGVEGFNCYFPLQSYGFQPTNGVGYQPYRVVVLSFELLHAPATVCGPKKSTNLVKNKCVNFNFNGLTGTGVLTESNKKFLPFQQFGRDIADTTDAVRDPQTLEILDITPCSFGGVSVITPGTNTSNQVAVLYQDVNCTEVPVAIHADQLTPTWRVYSTGSNVFQTRAGCLIGAEHVNNSYECDIPIGAGICASYQTQTNSPRRARSVASQSIIAYTMSLGAENSVAYSNNSIAIPTNFTISVTTEILPVSMTKTSVDCTMYICGDSTECSNLLLQYGSFCTQLNRALTGIAVEQDKNTQEVFAQVKQIYKTPPIKDFGGFNFSQILPDPSKPSKRSFIEDLLFNKVTLADAGFIKQYGDCLGDIAARDLICAQKFNGLTVLPPLLTDEMIAQYTSALLAGTITSGWWFGAGAALQIPFAMQMAYRFNGIGVTQNVLYENQKLIANQFNSAIGKIQDSLSSTASALGKLQDVVNQNAQALNTLVKQLSSNFGAISSVLNDILSRLDPPEAEVQIDRLITGRLQSLQTYVTQQLIRAAEIRWSANLAATKMSECVLGQSKRVDFCGKGYHLMSFPQSAPHGVVFLHVTYVPAQEKNFTTAPAICHDGKAHFPREGVFVSNGTHWFVTQRNFYEPQIITTDNTFVSGNCDVVIGIVNNTVYDPLQPELDSFKEELDKYFKNHTSPDVDLGDISGINASVVNIQKEIDRLNEVAKNLNESLIDLQELGKYEQYIKGGGGSDIIKLLNEQVNKEMQSSNLYMSMSSWCYTHSLDGAGLFLFDHAAEEYEHAKKLIIFLNENNVPVQLTSISAPEHKFEGLTQIFQKAYEHEQHISESINNIVDHAIKSKDHATFNFLQWYVAEQHEEEVLFKDILDKIELIGNENHGLYLADQYVKGIAKSRKS

SEQ ID NO: 4811 - protein, 1379 aa, Artificial Sequence
  SARS-CoV-2/Portugal/PT0035/2020__EPI_ISL_418020 spike protein (1-1211)(K986P_V987P_T887W_A1020W) Ferritin construct
MFVFLVLLPLVSSQCVNLTTRTQLPPAYTNSFTRGVYYPDKVFRSSVLHSTQDLFLPFFSNVTWFHAIHVSGTNGTKRFDNPVLPFNDGVYFASTEKSNIIRGWIFGTTLDSKTQSLLIVNNATNVVIKVCEFQFCNDPFLGVYYHKNNKSWMESEFRVYSSANNCTFEYVSQPFLMDLEGKQGNFKNLREFVFKNIDGYFKIYSKHTPINLVRDLPQGFSALEPLVDLPIGINITRFQTLLALHRSYLTPGDSSSGWTAGAAAYYVGYLQPRTFLLKYNENGTITDAVDCALDPLSETKCTLKSFTVEKGIYQTSNFRVQPTESIVRFPNITNLCPFGEVFNATRFASVYAWNRKRISNCVADYSVLYNSASFSTFKCYGVSPTKLNDLCFTNVYADSFVIRGDEVRQIAPGQTGKIADYNYKLPDDFTGCVIAWNSNNLDSKVGGNYNYLYRLFRKSNLKPFERDISTEIYQAGSTPCNGVEGFNCYFPLQSYGFQPTNGVGYQPYRVVVLSFELLHAPATVCGPKKSTNLVKNKCVNFNFNGLTGTGVLTESNKKFLPFQQFGRDIADTTDAVRDPQTLEILDITPCSFGGVSVITPGTNTSNQVAVLYQDVNCTEVPVAIHADQLTPTWRVYSTGSNVFQTRAGCLIGAEHVNNSYECDIPIGAGICASYQTQTNSPRRARSVASQSIIAYTMSLGAENSVAYSNNSIAIPTNFTISVTTEILPVSMTKTSVDCTMYICGDSTECSNLLLQYGSFCTQLNRALTGIAVEQDKNTQEVFAQVKQIYKTPPIKDFGGFNFSQILPDPSKPSKRSFIEDLLFNKVTLADAGFIKQYGDCLGDISARDLICAQKFNGLTVLPPLLTDEMIAQYTSALLAGTITSGWWFGAGAALQIPFAMQMAYRFNGIGVTQNVLYENQKLIANQFNSAIGKIQDSLSSTASALGKLQDVVNQNAQALNTLVKQLSSNFGAISSVLNDILSRLDPPEAEVQIDRLITGRLQSLQTYVTQQLIRAAEIRWSANLAATKMSECVLGQSKRVDFCGKGYHLMSFPQSAPHGVVFLHVTYVPAQEKNFTTAPAICHDGKAHFPREGVFVSNGTHWFVTQRNFYEPQIITTDNTFVSGNCDVVIGIVNNTVYDPLQPELDSFKEELDKYFKNHTSPDVDLGDISGINASVVNIQKEIDRLNEVAKNLNESLIDLQELGKYEQYIKGGGGSDIIKLLNEQVNKEMQSSNLYMSMSSWCYTHSLDGAGLFLFDHAAEEYEHAKKLIIFLNENNVPVQLTSISAPEHKFEGLTQIFQKAYEHEQHISESINNIVDHAIKSKDHATFNFLQWYVAEQHEEEVLFKDILDKIELIGNENHGLYLADQYVKGIAKSRKS

SEQ ID NO: 4812 - protein, 1379 aa, Artificial Sequence
  SARS-CoV-2/USA/NY-NYUMC7/2020__EPI_ISL_418192 spike protein (1-1211)(K986P_V987P_T887W_A1020W) Ferritin construct
MFVFLVLLPLVSSQCVNLTTRTQLPPAYTNSFTRGVYYPDKVFRSSVLHSTQDLFLPFFSNVTWFHAIHVSGTNGTKRFDNPVLPFNDGVYFASTEKSNIIRGWIFGTTLDSKTQSLLIVNNATNVVIKVCEFQFCNDPFLGVYHHKNNKSWMESEFRVYSSANNCTFEYVSQPFLMDLEGKQGNFKNLREFVFKNIDGYFKIYSKHTPINLVRDLPQGFSALEPLVDLPIGINITRFQTLLALHRSYLTPGDSSSGWTAGAAAYYVGYLQPRTFLLKYNENGTITDAVDCALDPLSETKCTLKSFTVEKGIYQTSNFRVQPTESIVRFPNITNLCPFGEVFNATRFASVYAWNRKRISNCVADYSVLYNSASFSTFKCYGVSPTKLNDLCFTNVYADSFVIRGDEVRQIAPGQTGKIADYNYKLPDDFTGCVIAWNSNNLDSKVGGNYNYLYRLFRKSNLKPFERDISTEIYQAGSTPCNGVEGFNCYFPLQSYGFQPTNGVGYQPYRVVVLSFELLHAPATVCGPKKSTNLVKNKCVNFNFNGLTGTGVLTESNKKFLPFQQFGRDIADTTDAVRDPQTLEILDITPCSFGGVSVITPGTNTSNQVAVLYQGVNCTEVPVAIHADQLTPTWRVYSTGSNVFQTRAGCLIGAEHVNNSYECDIPIGAGICASYQTQTNSPRRARSVASQSIIAYTMSLGAENSVAYSNNSIAIPTNFTISVTTEILPVSMTKTSVDCTMYICGDSTECSNLLLQYGSFCTQLNRALTGIAVEQDKNTQEVFAQVKQIYKTPPIKDFGGFNFSQILPDPSKPSKRSFIEDLLFNKVTLADAGFIKQYGDCLGDIAARDLICAQKFNGLTVLPPLLTDEMIAQYTSALLAGTITSGWWFGAGAALQIPFAMQMAYRFNGIGVTQNVLYENQKLIANQFNSAIGKIQDSLSSTASALGKLQDVVNQNAQALNTLVKQLSSNFGAISSVLNDILSRLDPPEAEVQIDRLITGRLQSLQTYVTQQLIRAAEIRWSANLAATKMSECVLGQSKRVDFCGKGYHLMSFPQSAPHGVVFLHVTYVPAQEKNFTTAPAICHDGKAHFPREGVFVSNGTHWFVTQRNFYEPQIITTDNTFVSGNCDVVIGIVNNTVYDPLQPELDSFKEELDKYFKNHTSPDVDLGDISGINASVVNIQKEIDRLNEVAKNLNESLIDLQELGKYEQYIKGGGGSDIIKLLNEQVNKEMQSSNLYMSMSSWCYTHSLDGAGLFLFDHAAEEYEHAKKLIIFLNENNVPVQLTSISAPEHKFEGLTQIFQKAYEHEQHISESINNIVDHAIKSKDHATFNFLQWYVAEQHEEEVLFKDILDKIELIGNENHGLYLADQYVKGIAKSRKS

SEQ ID NO: 4813 - protein, 1379 aa, Artificial Sequence
  SARS-CoV-2/Iceland/189/2020__EPI_ISL_417709 spike protein (1-1211)(K986P_V987P_T887W_A1020W) Ferritin construct
MFVFLVLLPLVSSQCVNLTTRTQLPPAYTNSFTRGVYYPDKVFRSSVLHSTQDLFLPFFSNVTWFHAIHVSGTNGTKRFDNPVLPFNDGVYFASTEKSNIIRGWIFGTTLDSKTQSLLIVNNATNVVIKVCEFQFCNDPFLGVYYHKNNKSWMESEFRVYSSANNCTFEYVSQPFLMDLEGKQGNFKNLREFVFKNIDGYFKIYSKHTPINLVRDLPQGFSALEPLVDLPIGINITRFQTLLALHRSYLTPGDSSSGWTAGAAAYYVGYLQPRTFLLKYNENGTITDAVDCALDPLSETKCTLKSFTVEKGIYQTSNFRVQPTESIVRFPNITNLCPFGEVFNATRFASVYAWNRKRISNCVADYSVLYNSASFSTFKCYGVSPTKLNDLCFTNVYADSFVIRGDEVRQIAPGQTGKIADYNYKLPDDFTGCVIAWNSNNLDSKVGGNYNYLYRLFRKSNLKPFERDISTEIYQAGSTPCNGVEGFNCYFPLQSYGFQPTNGVGYQPYRVVVLSFELLHAPATVCGPKKSTNLVKNKCVNFNFNGLTGTGVLTESNKKFLPFQQFGRDIADTTDAVRDPQTLEILDITPCSFGGVSVITPGTNTSNQVAVLYQGVNCTEVPVAIHADQLTPTWRVYSTGSNVFQTRAGCLIGAEHVNNSYECDIPIGAGICASYQTQTNSPRRARSVASQSIIAYTMSLGAENSVAYSNNSIAIPTNFTISVTTEILPVSMTKTSVDCTMYICGDSTECSNLLLQYGSFCTQLNRALTGIAVEQDKNTQEVFAQVKQIYKTPPIKDFGGFNFSQILPDPSKPSKRSFIEDLLFNKVTLADAGFTKQYGDCLGDIAARDLICAQKFNGLTVLPPLLTDEMIAQYTSALLAGTITSGWWFGAGAALQIPFAMQMAYRFNGIGVTQNVLYENQKLIANQFNSAIGKIQDSLSSTASALGKLQDVVNQNAQALNTLVKQLSSNFGAISSVLNDILSRLDPPEAEVQIDRLITGRLQSLQTYVTQQLIRAAEIRWSANLAATKMSECVLGQSKRVDFCGKGYHLMSFPQSAPHGVVFLHVTYVPAQEKNFTTAPAICHDGKAHFPREGVFVSNGTHWFVTQRNFYEPQIITTDNTFVSGNCDVVIGIVNNTVYDPLQPELDSFKEELDKYFKNHTSPDVDLGDISGINASVVNIQKEIDRLNEVAKNLNESLIDLQELGKYEQYIKGGGGSDIIKLLNEQVNKEMQSSNLYMSMSSWCYTHSLDGAGLFLFDHAAEEYEHAKKLIIFLNENNVPVQLTSISAPEHKFEGLTQIFQKAYEHEQHISESINNIVDHAIKSKDHATFNFLQWYVAEQHEEEVLFKDILDKIELIGNENHGLYLADQYVKGIAKSRKS

SEQ ID NO: 4814 - protein, 1379 aa, Artificial Sequence
  SARS-CoV-2/Australia/NSW56/2020__EPI_ISL_417408 spike protein (1-1211)(K986P_V987P_T887W_A1020W) Ferritin construct
MFVFLVLLPLVSSQCVNLTTRTQLPPAYTNSFTRGVYYPDKVFRSSVLHSTQDLFLPFFSNVTWFHAIHVSGTNGTKRFDNPVLPFNDGVYFASTEKSNIIRGWIFGTTLDSKTQSLLIVNNATNVVIKVCEFQFCNDPFLGVYYHKNNKSWMESEFRVYSSANNCTFEYVSQPFLMDLEGKQGNFKNLREFVFKNIDGYFKIYSKHTPINLVRDLPQGFSALEPLVDLPIGINITRFQTLLALHRSYLTPGDSSSGWTAGAAAYYVGYLQPRTFLLKYNENGTITDAVDCALDPLSETKCTLKSFTVEKGIYQTSNFRVQPTESIVRFPNITNLCPFGEVFNATRFASVYAWNRKRISNCVADYSVLYNSASFSTFKCYGVSPTKLNDLCFTNVYADSFVIRGDEVRQIAPGQTGKIADYNYKLPDDFTGCVIAWNSNNLDSKVGGNYNYLYRLFRKSNLKPFERDISTEIYQAGSTPCNGVEGFNCYFPLQSYGFQPTNGVGYQPYRVVVLSFELLHAPATVCGPKKSTNLVKNKCVNFNFNGLTGTGVLTESNKKFLPFQQFGRDIADTTDAVRDPQTLEILDITPCSFGGVSVITPGTNTSNQVAVLYQDVNCTEVPVAIHADQLTPTWRVYSTGSNVFQTRAGCLIGAEHVNNSYECDIPIGAGICASYQTQTNSPRRARSVASQSIIAYTMSLGAENSVAYSNNSIAIPTNFTISVTTEILPVSMTKTSVDCTMYICGDSTECSNLLLQYGSFCTQLNRALTGIAVEQDKNTQEVFAQVKQIYKTPPIKDFGGFNFSQILPDSSKPSKRSFIEDLLFNKVTLADAGFIKQYGDCLGDIAARDLICAQKFNGLTVLPPLLTDEMIAQYTSALLAGTITSGWWFGAGAALQIPFAMQMAYRFNGIGVTQNVLYENQKLIANQFNSAIGKIQDSLSSTASALGKLQDVVNQNAQALNTLVKQLSSNFGAISSVLNDILSRLDPPEAEVQIDRLITGRLQSLQTYVTQQLIRAAEIRWSANLAATKMSECVLGQSKRVDFCGKGYHLMSFPQSAPHGVVFLHVTYVPAQEKNFTTAPAICHDGKAHFPREGVFVSNGTHWFVTQRNFYEPQIITTDNTFVSGNCDVVIGIVNNTVYDPLQPELDSFKEELDKYFKNHTSPDVDLGDISGINASVVNIQKEIDRLNEVAKNLNESLIDLQELGKYEQYIKGGGGSDIIKLLNEQVNKEMQSSNLYMSMSSWCYTHSLDGAGLFLFDHAAEEYEHAKKLIIFLNENNVPVQLTSISAPEHKFEGLTQIFQKAYEHEQHISESINNIVDHAIKSKDHATFNFLQWYVAEQHEEEVLFKDILDKIELIGNENHGLYLADQYVKGIAKSRKS

SEQ ID NO: 4815 - protein, 1379 aa, Artificial Sequence
  SARS-CoV-2/Iceland/280/2020__EPI_ISL_417608 spike protein (1-1211)(K986P_V987P_T887W_A1020W) Ferritin construct
MFVFLVLLPLVSSQCVNLTTRTQLPPAYTNSFTRGVYYPDKVFRSSVLHSTQDLFLPFFSNVTWFHAIHVSGTNGTKRFDNPVLPFNDGVYFASTEKSNIIRGWIFGTTLDSKTQSLLIVNNATNVVIKVCEFQFCNDPFLGVYYHKNNKSWMESEFRVYSSANNCTFEYVSQPFLMDLEGKQGNFKNLREFVFKNIDGYFKIYSKHTPINLVRDLPQGFSALEPLVDLPIGINITRFQTLLALHRSYLTPGDSSSGWTAGAAAYYVGYLQPRTFLLKYNENGTITDAVDCALDPLSETKCTLKSFTVEKGIYQTSNFRVQPTESIVRFPNITNLCPFGEVFNATRFASVYAWNRKRISNCVADYSVLYNSASFSTFKCYGVSPTKLNDLCFTNVYADSFVIRGDEVRQIAPGQTGKIADYNYKLPDDFTGCVIAWNSNNLDSKVGGNYNYLYRLFRKSNLKPFERDISTEIYQAGSTPCNGVEGFNCYFPLQSYGFQPTNGVGYQPYRVVVLSFELLHAPATVCGPKKSTNLVKNKCVNFNFNGLTGTGVLTESNKKFLPFQQFGRDIADTTDAVRDPQTLEILDITPCSFGGVSVITPGTNTSNQVAVLYQGVNCTEVPVAIHADQLTPTWRVYSTGSNVFQTRAGCLIGAEHVNNSYECDIPIGAGICASYHTQTNSPRRARSVASQSIIAYTMSLGAENSVAYSNNSIAIPTNFTISVTTEILPVSMTKTSVDCTMYICGDSTECSNLLLQYGSFCTQLNRALTGIAVEQDKNTQEVFAQVKQIYKTPPIKDFGGFNFSQILPDPSKPSKRSFIEDLLFNKVTLADAGFIKQYGDCLGDIAARDLICAQKFNGLTVLPPLLTDEMIAQYTSALLAGTITSGWWFGAGAALQIPFAMQMAYRFNGIGVTQNVLYENQKLIANQFNSAIGKIQDSLSSTASALGKLQDVVNQNAQALNTLVKQLSSNFGAISSVLNDILSRLDPPEAEVQIDRLITGRLQSLQTYVTQQLIRAAEIRWSANLAATKMSECVLGQSKRVDFCGKGYHLMSFPQSAPHGVVFLHVTYVPAQEKNFTTAPAICHDGKAHFPREGVFVSNGTHWFVTQRNFYEPQIITTDNTFVSGNCDVVIGIVNNTVYDPLQPELDSFKEELDKYFKNHTSPDVDLGDISGINASVVNIQKEIDRLNEVAKNLNESLIDLQELGKYEQYIKGGGGSDIIKLLNEQVNKEMQSSNLYMSMSSWCYTHSLDGAGLFLFDHAAEEYEHAKKLIIFLNENNVPVQLTSISAPEHKFEGLTQIFQKAYEHEQHISESINNIVDHAIKSKDHATFNFLQWYVAEQHEEEVLFKDILDKIELIGNENHGLYLADQYVKGIAKSRKS

SEQ ID NO: 4816 - protein, 1379 aa, Artificial Sequence; identical to SEQ ID NO: 4771
  SARS-CoV-2/Iceland/247/2020__EPI_ISL_417575 spike protein (1-1211)(K986P_V987P_T887W_A1020W) Ferritin construct

SEQ ID NO: 4817 - protein, 1379 aa, Artificial Sequence
  SARS-CoV-2/Iceland/238/2020__EPI_ISL_417566 spike protein (1-1211)(K986P_V987P_T887W_A1020W) Ferritin construct
MFVFLVLLPLVSSQCVNLTTRTQLPPAYTNSFTRGVYYPDKVFRSSVLHSTQDLFLPFFSNVTWFHAIHVSGTNGTKRFDNPVLPFNDGVYFASTEKSNIIRGWIFGTTLDSKTQSLLIVNNATNVVIKVCEFQFCNDPFLGVYYHKNNKSWMESEFRVYSSANNCTFEYVSQPFLMDLEGKQGNFKNLREFVFKNIDGYFKIYSKHTPINLVRDLPQGFSALEPLVDLPIGINITRFQTLLALHRSYLTPGDSSSGWTAGAAAYYVGYLQPRTFLLKYNENGTITDAVDCALDPLSETKCTLKSFTVEKGIYQTSNFRVQPTESIVRFPNITNLCPFGEVFNATRFASVYAWNRKRISNCVADYSVLYNSASFSTFKCYGVSPTKLNDLCFTNVYADSFVIRGDEVRQIAPGQTGKIADYNYKLPDDFTGCVIAWNSNNLDSKVGGNYNYLYRLFRKSNLKPFERDISTEIYQAGSTPCNGVEGFNCYFPLQSYGFQPTNGVGYQPYRVVVLSFELLHAPATVCGPKKSTNLVKNKCVNFNFNGLTGTGVLTESNKKFLPFQQFGRDIADTTDAVRDPQTLEILDITPCSFGGVSVITPGTNTSNQVAVLYQGVNCTEVPVAIHADQLTPTWRVYSTGSNVFQTRAGCLIGAEHVNNSYECDIPIGAGICASYQTQTNSPRRARSVASQSIIAYTMSLGAENSVAYSNNSIAIPTNFTISVTTEILPVSMTKTSVDCTMYICGDSTECSNLLLQYGSFCTQLNRALTGIAVEQDKNTQEVFAQVKQIYKTPPIKDFGGFNFSQILPDPSKPSKRSFIEDLLFNKVTLADVGFIKQYGDCLGDIAARDLICAQKFNGLTVLPPLLTDEMIAQYTSALLAGTITSGWWFGAGAALQIPFAMQMAYRFNGIGVTQNVLYENQKLIANQFNSAIGKIQDSLSSTASALGKLQDVVNQNAQALNTLVKQLSSNFGAISSVLNDILSRLDPPEAEVQIDRLITGRLQSLQTYVTQQLIRAAEIRWSANLAATKMSECVLGQSKRVDFCGKGYHLMSFPQSAPHGVVFLHVTYVPAQEKNFTTAPAICHDGKAHFPREGVFVSNGTHWFVTQRNFYEPQIITTDNTFVSGNCDVVIGIVNNTVYDPLQPELDSFKEELDKYFKNHTSPDVDLGDISGINASVVNIQKEIDRLNEVAKNLNESLIDLQELGKYEQYIKGGGGSDIIKLLNEQVNKEMQSSNLYMSMSSWCYTHSLDGAGLFLFDHAAEEYEHAKKLIIFLNENNVPVQLTSISAPEHKFEGLTQIFQKAYEHEQHISESINNIVDHAIKSKDHATFNFLQWYVAEQHEEEVLFKDILDKIELIGNENHGLYLADQYVKGIAKSRKS

SEQ ID NO: 4818 - protein, 1379 aa, Artificial Sequence
  SARS-CoV-2/Greece/16/2020__EPI_ISL_418265 spike protein (1-1211)(K986P_V987P_T887W_A1020W) Ferritin construct
MFVFLVLLPLVSSQCVNLTTRTQLPPAYTNSFTRGVYYPDKVFRSSVLHSTQDLFLPFFSNVTWFHAIHVSGTNGTKRFDNPVLPFNDGVYFASTEKSNIIRGWIFGTTLDSKTQSLLIVNNATNVVIKVCEFQFCNDPFLGVYYHKNNKSWMESEFRVYSSANNCTFEYVSQPFLMDLEGKQGNFKNLREFVFKNVDGYFKIYSKHTPINLVRDLPQGFSALEPLVDLPIGINITRFQTLLALHRSYLTPGDSSSGWTAGAAAYYVGYLQPRTFLLKYNENGTITDAVDCALDPLSETKCTLKSFTVEKGIYQTSNFRVQPTESIVRFPNITNLCPFGEVFNATRFASVYAWNRKRISNCVADYSVLYNSASFSTFKCYGVSPTKLNDLCFTNVYADSFVIRGDEVRQIAPGQTGKIADYNYKLPDDFTGCVIAWNSNNLDSKVGGNYNYLYRLFRKSNLKPFERDISTEIYQAGSTPCNGVEGFNCYFPLQSYGFQPTNGVGYQPYRVVVLSFELLHAPATVCGPKKSTNLVKNKCVNFNFNGLTGTGVLTESNKKFLPFQQFGRDIADTTDAVRDPQTLEILDITPCSFGGVSVITPGTNTSNQVAVLYQDVNCTEVPVAIHADQLTPTWRVYSTGSNVFQTRAGCLIGAEHVNNSYECDIPIGAGICASYQTQTNSPRRARSVASQSIIAYTMSLGAENSVAYSNNSIAIPTNFTISVTTEILPVSMTKTSVDCTMYICGDSTECSNLLLQYGSFCTQLNRALTGIAVEQDKNTQEVFAQVKQIYKTPPIKDFGGFNFSQILPDPSKPSKRSFIEDLLFNKVTLADAGFIKQYGDCLGDIAARDLICAQKFNGLTVLPPLLTDEMIAQYTSALLAGTITSGWWFGAGAALQIPFAMQMAYRFNGIGVTQNVLYENQKLIANQFNSAIGKIQDSLSSTASALGKLQDVVNQNAQALNTLVKQLSSNFGAISSVLNDILSRLDPPEAEVQIDRLITGRLQSLQTYVTQQLIRAAEIRWSANLAATKMSECVLGQSKRVDFCGKGYHLMSFPQSAPHGVVFLHVTYVPAQEKNFTTAPAICHDGKAHFPREGVFVSNGTHWFVTQRNFYEPQIITTDNTFVSGNCDVVIGIVNNTVYDPLQPELDSFKEELDKYFKNHTSPDVDLGDISGINASVVNIQKEIDRLNEVAKNLNESLIDLQELGKYEQYIKGGGGSDIIKLLNEQVNKEMQSSNLYMSMSSWCYTHSLDGAGLFLFDHAAEEYEHAKKLIIFLNENNVPVQLTSISAPEHKFEGLTQIFQKAYEHEQHISESINNIVDHAIKSKDHATFNFLQWYVAEQHEEEVLFKDILDKIELIGNENHGLYLADQYVKGIAKSRKS

SEQ ID NO: 4819 - protein, 1379 aa, Artificial Sequence
  SARS-CoV-2/Iceland/319/2020__EPI_ISL_417648 spike protein (1-1211)(K986P_V987P_T887W_A1020W) Ferritin construct
MFVFLVLLPLVSSQCVNLTTRTQLPPAYTNSFTRGVYYPDKVFRSSVLHSTQDLFLPFFSNVTWFHAIHVSGTNGTKRFDNPVLPFNDGVYFASTEKSNIIRGWIFGTTLDSKTQSLLIVNNATNVVIKVCEFQFCNDPFLGVYYHKNNKSWMESEFRVYSSANNCTFEYVSQPFLIDLEGKQGNFKNLREFVFKNIDGYFKIYSKHTPINLVRDLPQGFSALEPLVDLPIGINITRFQTLLALHRSYLTPGDSSSGWTAGAAAYYVGYLQPRTFLLKYNENGTITDAVDCALDPLSETKCTLKSFTVEKGIYQTSNFRVQPTESIVRFPNITNLCPFGEVFNATRFASVYAWNRKRISNCVADYSVLYNSASFSTFKCYGVSPTKLNDLCFTNVYADSFVIRGDEVRQIAPGQTGKIADYNYKLPDDFTGCVIAWNSNNLDSKVGGNYNYLYRLFRKSNLKPFERDISTEIYQAGSTPCNGVEGFNCYFPLQSYGFQPTNGVGYQPYRVVVLSFELLHAPATVCGPKKSTNLVKNKCVNFNFNGLTGTGVLTESNKKFLPFQQFGRDIADTTDAVRDPQTLEILDITPCSFGGVSVITPGTNTSNQVAVLYQGVNCTEVPVAIHADQLTPTWRVYSTGSNVFQTRAGCLIGAEHVNNSYECDIPIGAGICASYQTQTNSPRRARSVASQSIIAYTMSLGAENSVAYSNNSIAIPTNFTISVTTEILPVSMTKTSVDCTMYICGDSTECSNLLLQYGSFCTQLNRALTGIAVEQDKNTQEVFAQVKQIYKTPPIKDFGGFNFSQILPDPSKPSKRSFIEDLLFNKVTLADAGFIKQYGDCLGDIAARDLICAQKFNGLTVLPPLLTDEMIAQYTSALLAGTITSGWWFGAGAALQIPFAMQMAYRFNGIGVTQNVLYENQKLIANQFNSAIGKIQDSLSSTASALGKLQDVVNQNAQALNTLVKQLSSNFGAISSVLNDILSRLDPPEAEVQIDRLITGRLQSLQTYVTQQLIRAAEIRWSANLAATKMSECVLGQSKRVDFCGKGYHLMSFPQSAPHGVVFLHVTYVPAQEKNFTTAPAICHDGKAHFPREGVFVSNGTHWFVTQRNFYEPQIITTDNTFVSGNCDVVIGIVNNTVYDPLQPELDSFKEELDKYFKNHTSPDVDLGDISGINASVVNIQKEIDRLNEVAKNLNESLIDLQELGKYEQYIKGGGGSDIIKLLNEQVNKEMQSSNLYMSMSSWCYTHSLDGAGLFLFDHAAEEYEHAKKLIIFLNENNVPVQLTSISAPEHKFEGLTQIFQKAYEHEQHISESINNIVDHAIKSKDHATFNFLQWYVAEQHEEEVLFKDILDKIELIGNENHGLYLADQYVKGIAKSRKS

SEQ ID NO: 4820 - protein, 1379 aa, Artificial Sequence
  SARS-CoV-2/Congo/94/2020__EPI_ISL_417947 spike protein (1-1211)(K986P_V987P_T887W_A1020W) Ferritin construct
MFVFLVLLPLVSSQCVNLTTRTQLPPAYTNSFTRGVYYPDKVFRSSVLHSTQDLFLPFFSNVTWFHAIHVSGTNGTKRFDNPVLPFNDGVYFASTEKSNIIRGWIFGTTLDSKTQSLLIVNNATNVVIKVCEFQFCNDPFLGVYYHKNNKSWMESEFRVYSSANNCTFEYVSQPFLMDLEGKQGNFKNLREFVFKNIDGYFKIYSKHTPINLVRDLPQGFSALEPLVDLPIGINITRFQTLLALHRSYLTPGDSSSGWTAGAAAYYVGYLQPRTFLLKYNENGTITDAVDCALDPLSETKCTLKSFTVEKGIYQTSNFRVQPTESIVRFPNITNLCPFGEVFNATRFASVYAWNRKRISNCVADYSVLYNSASFSTFKCYGVSPTKLNDLCFTNVYADSFVIRGDEVRQIAPGQTGKIADYNYKLPDDFTGCVIAWNSNNLDSKVGGNYNYLYRLFRKSNLKPFERDISTEIYQAGSTPCNGVEGFNCYFPLQSYGFQPTNGVGYQPYRVVVLSFELLHAPATVCGPKKSTNLVKNKCVNFNFNGLTGTGVLTESNKKFLPFQQFGRDIADTTDAVRDPQTLEILDITPCSFGGVSVITPGTNTSNQVAVLYQGVNCTEVPVAIHADQLTPTWRVYSTGSNVFQTRAGCLIGAEHVNNSYECDIPIGAGICASYQTQTNSPRRARSVASQSIIAYTMSLGAENSVAYSNNSIAIPTNFTISVTTEILPVSMTKTSVDCTMYICGDSTECSNLLLQYGSFCTQLNRALTGIAVEQDKNTQEVFAQVKQIYKTPPIKDFGGFNFSQILPDPSKPSKRSFIEDILFNKVTLADAGFIKQYGDCLGDIAARDLICAQKFNGLTVLPPLLTDEMIAQYTSALLAGTITSGWWFGAGAALQIPFAMQMAYRFNGIGVTQNVLYENQKLIANQFNSAIGKIQDSLSSTASALGKLQDVVNQNAQALNTLVKQLSSNFGAISSVLNDILSRLDPPEAEVQIDRLITGRLQSLQTYVTQQLIRAAEIRWSANLAATKMSECVLGQSKRVDFCGKGYHLMSFPQSAPHGVVFLHVTYVPAQEKNFTTAPAICHDGKAHFPREGVFVSNGTHWFVTQRNFYEPQIITTDNTFVSGNCDVVIGIVNNTVYDPLQPELDSFKEELDKYFKNHTSPDVDLGDISGINASVVNIQKEIDRLNEVAKNLNESLIDLQELGKYEQYIKGGGGSDIIKLLNEQVNKEMQSSNLYMSMSSWCYTHSLDGAGLFLFDHAAEEYEHAKKLIIFLNENNVPVQLTSISAPEHKFEGLTQIFQKAYEHEQHISESINNIVDHAIKSKDHATFNFLQWYVAEQHEEEVLFKDILDKIELIGNENHGLYLADQYVKGIAKSRKS

SEQ ID NO: 4821 - protein, 1379 aa, Artificial Sequence
  SARS-CoV-2/Congo/158/2020__EPI_ISL_417950 spike protein (1-1211)(K986P_V987P_T887W_A1020W) Ferritin construct
MFVFLVLLPLVSSQCVNLTTRTQLPPAYTNSFTRGVYYPDKVFRSSVLHSTQDLFLPFFSNVTWFHAIHVSGTNGTKRFDNPVLPFNDGVYFASTEKSNIIRGWIFGTTLDSKTQSLLIVNNATNVVIKVCEFQFCNDPFLGVYYHKNNKSWMESEFRVYSSANNCTFEYVSQPFLMDLEGKQGNFKNLREFVFKNIDGYFKIYSKHTPINLVRDLPQGFSALEPLVDLPIGINITRFQTLLALHRSYLTPGDSSSGWTAGAAAYYVGYLQPRTFLLKYNENGTITDAVDCALDPLSETKCTLKSFTVEKGIYQTSNFRVQPTESIVRFPNITNLCPFGEVFNATRFASVYAWNRKRISNCVADYSVLYNSASFSTFKCYGVSPTKLNDLCFTNVYADSFVIRGDEVRQIAPGQTGKIADYNYKLPDDFTGCVIAWNSNNLDSKVGGNYNYLYRLFRKSNLKPFERDISTEIYQAGSTPCNGVEGFNCYFPLQSYGFQPTNGVGYQPYRVVVLSFELLHAPATVCGPKKSTNLVKNKCVNFNFNGLTGTGVLTESNKKFLPFQQFGRDIADTTDAVRDPQTLEILDITPCSFGGVSVITPGTNTSNQVAVLYQDVNCTEVPVAIHADQLTPTWRVYSTGSNVFQTRAGCLIGAEHVNNSYECDIPIGAGICASYQTQTNSPRRARSVASQSIIAYTMSLGAENSVAYSNNSIAIPTNFTISVTTEILPVSMTKTSVDCTMYICGDSTECSNLLLQYGSFCTQLNRALTGIAVEQDKNTQEVFAQVKQIYKTPPIKDFGGFNFSQILPDPSKPSKRSFIEDLLFNKVTLADAGFIKQYGDCLGDIAARDLICAQKFNGLTVLPPLLTDEMIAQYTSALLAGTITSGWWFGAGAALQIPFAMQMAYRFNGIGVTQNVLYENQKLIANQFNSAIGKIQDSLSSTASALGKLQDVVNQNAQALNTLVKQLSSNFGAISSVLNDILSRLDPPEAEVQIDRLITGRLQSLQTYVTQQLIRAAEIRWSANLAATKMSECVLGQSKRVDFCGKGYHLMSFPQSAPHGVVFLHVTYVPAQEKNFTTAPAICHDGKAHFPREGVFVSNGTHWFVTQRNFYEPQIITTDNTFLSGNCDVVIGIVNNTVYDPLQPELDSFKEELDKYFKNHTSPDVDLGDISGINASVVNIQKEIDRLNEVAKNLNESLIDLQELGKYEQYIKGGGGSDIIKLLNEQVNKEMQSSNLYMSMSSWCYTHSLDGAGLFLFDHAAEEYEHAKKLIIFLNENNVPVQLTSISAPEHKFEGLTQIFQKAYEHEQHISESINNIVDHAIKSKDHATFNFLQWYVAEQHEEEVLFKDILDKIELIGNENHGLYLADQYVKGIAKSRKS

SEQ ID NO: 4822 - protein, 1379 aa, Artificial Sequence
  SARS-CoV-2/USA/UT-00034/2020__EPI_ISL_417977 spike protein (1-1211)(K986P_V987P_T887W_A1020W) Ferritin construct
MFVFLVLLPLVSSQCVNLTTRTQLPPAYTNSFTRGVYYPDKVFRSSVLHSTQDLFLPFFSNVTWFHAIHVSGTNGTKRFDNPVLPFNDGVYFASTEKSNIIRGWIFGTTLDSKTQSLLIVNNATNVVIKVCEFQFCNDPFLGVYYYKNNKSWMESEFRVYSSANNCTFEYVSQPFLMDLEGKQGNFKNLREFVFKNIDGYFKIYSKHTPINLVRDLPQGFSALEPLVDLPIGINITRFQTLLALHRSYLTPGDSSSGWTAGAAAYYVGYLQPRTFLLKYNENGTITDAVDCALDPLSETKCTLKSFTVEKGIYQTSNFRVQPTESIVRFPNITNLCPFGEVFNATRFASVYAWNRKRISNCVADYSVLYNSASFSTFKCYGVSPTKLNDLCFTNVYADSFVIRGDEVRQIAPGQTGKIADYNYKLPDDFTGCVIAWNSNNLDSKVGGNYNYLYRLFRKSNLKPFERDISTEIYQAGSTPCNGVEGFNCYFPLQSYGFQPTNGVGYQPYRVVVLSFELLHAPATVCGPKKSTNLVKNKCVNFNFNGLTGTGVLTESNKKFLPFQQFGRDIADTTDAVRDPQTLEILDITPCSFGGVSVITPGTNTSNQVAVLYQGVNCTEVPVAIHADQLTPTWRVYSTGSNVFQTRAGCLIGAEHVNNSYECDIPIGAGICASYQTQTNSPRRARSVASQSIIAYTMSLGAENSVAYSNNSIAIPTNFTISVTTEILPVSMTKTSVDCTMYICGDSTECSNLLLQYGSFCTQLNRALTGIAVEQDKNTQEVFAQVKQIYKTPPIKDFGGFNFSQILPDPSKPSKRSFIEDLLFNKVTLADAGFIKQYGDCLGDIAARDLICAQKFNGLTVLPPLLTDEMIAQYTSALLAGTITSGWWFGAGAALQIPFAMQMAYRFNGIGVTQNVLYENQKLIANQFNSAIGKIQDSLSSTASALGKLQDVVNQNAQALNTLVKQLSSNFGAISSVLNDILSRLDPPEAEVQIDRLITGRLQSLQTYVTQQLIRAAEIRWSANLAATKMSECVLGQSKRVDFCGKGYHLMSFPQSAPHGVVFLHVTYVPAQEKNFTTAPAICHDGKAHFPREGVFVSNGTHWFVTQRNFYEPQIITTDNTFVSGNCDVVIGIVNNTVYDPLQPELDSFKEELDKYFKNHTSPDVDLGDISGINASVVNIQKEIDRLNEVAKNLNESLIDLQELGKYEQYIKGGGGSDIIKLLNEQVNKEMQSSNLYMSMSSWCYTHSLDGAGLFLFDHAAEEYEHAKKLIIFLNENNVPVQLTSISAPEHKFEGLTQIFQKAYEHEQHISESINNIVDHAIKSKDHATFNFLQWYVAEQHEEEVLFKDILDKIELIGNENHGLYLADQYVKGIAKSRKS

SEQ ID NO: 4823 - protein, 1379 aa, Artificial Sequence
  SARS-CoV-2/USA/UT-00033/2020__EPI_ISL_417976 spike protein (1-1211)(K986P_V987P_T887W_A1020W) Ferritin construct
MFVFLVLLPLVSSQCVNLTTRTQLPPAYTNSFTRGVYYPDKVFRSSVLHSTQDLFLPFFSNVTWFHAIHVSGTNGTKRFDNPVLPFNDGVYFASTEKSNIIRGWIFGTTLDSKTQSLLIVNNATNVVIKVCEFQFCNDPFLGVYYHKNNKSWMESEFRVYSSANNCTFEYVSQPFLMDLEGKQGNFKNLREFVFKNIDGYFKIYSKHTPINLVRDLPQGFSALEPLVDLPIGINITRFQTLLALHRSYLTPGDSSSGLTAGAAAYYVGYLQPRTFLLKYNENGTITDAVDCALDPLSETKCTLKSFTVEKGIYQTSNFRVQPTESIVRFPNITNLCPFGEVFNATRFASVYAWNRKRISNCVADYSVLYNSASFSTFKCYGVSPTKLNDLCFTNVYADSFVIRGDEVRQIAPGQTGKIADYNYKLPDDFTGCVIAWNSNNLDSKVGGNYNYLYRLFRKSNLKPFERDISTEIYQAGSTPCNGVEGFNCYFPLQSYGFQPTNGVGYQPYRVVVLSFELLHAPATVCGPKKSTNLVKNKCVNFNFNGLTGTGVLTESNKKFLPFQQFGRDIADTTDAVRDPQTLEILDITPCSFGGVSVITPGTNTSNQVAVLYQGVNCTEVPVAIHADQLTPTWRVYSTGSNVFQTRAGCLIGAEHVNNSYECDIPIGAGICASYQTQTNSPRRARSVASQSIIAYTMSLGAENSVAYSNNSIAIPTNFTISVTTEILPVSMTKTSVDCTMYICGDSTECSNLLLQYGSFCTQLNRALTGIAVEQDKNTQEVFAQVKQIYKTPPIKDFGGFNFSQILPDPSKPSKRSFIEDLLFNKVTLADAGFIKQYGDCLGDIAARDLICAQKFNGLTVLPPLLTDEMIAQYTSALLAGTITSGWWFGAGAALQIPFAMQMAYRFNGIGVTQNVLYENQKLIANQFNSAIGKIQDSLSSTASALGKLQDVVNQNAQALNTLVKQLSSNFGAISSVLNDILSRLDPPEAEVQIDRLITGRLQSLQTYVTQQLIRAAEIRWSANLAATKMSECVLGQSKRVDFCGKGYHLMSFPQSAPHGVVFLHVTYVPAQEKNFTTAPAICHDGKAHFPREGVFVSNGTHWFVTQRNFYEPQIITTDNTFVSGNCDVVIGIVNNTVYDPLQPELDSFKEELDKYFKNHTSPDVDLGDISGINASVVNIQKEIDRLNEVAKNLNESLIDLQELGKYEQYIKGGGGSDIIKLLNEQVNKEMQSSNLYMSMSSWCYTHSLDGAGLFLFDHAAEEYEHAKKLIIFLNENNVPVQLTSISAPEHKFEGLTQIFQKAYEHEQHISESINNIVDHAIKSKDHATFNFLQWYVAEQHEEEVLFKDILDKIELIGNENHGLYLADQYVKGIAKSRKS

SEQ ID NO: 4824 - protein, 1379 aa, Artificial Sequence
  SARS-CoV-2/USA/WI-13/2020__EPI_ISL_417516 spike protein (1-1211)(K986P_V987P_T887W_A1020W) Ferritin construct
MFVFLVLLPLVSSQCVNLTTRTQLPPAYTNSFTRGVYYPDKVFRSSVLHSTQDLFLPFFSNVTWFHAIHVSGTNGTKRFDNPVLPFNDGVYFASTEKSNIIRGWIFGTTLDSKTQSLLIVNNATNVVIKVCEFQFCNDPFLGVYYHKNNKSWMESEFRVYSSANNCTFEYVSQPFLMDLEGKQGNFKNLREFVFKNIDGYFKIYSKHTPINLVRDLPQGFSALEPLVDLPIGINITRFQTLLALHRSYLTPGDSSSGWTAGAAAYYVGYLQPRTFLLKYNENGTITDAVDCALDPLSETKCTLKSFTVEKGIYQTSNFRVLPTESIVRFPNITNLCPFGEVFNATRFASVYAWNRKRISNCVADYSVLYNSASFSTFKCYGVSPTKLNDLCFTNVYADSFVIRGDEVRQIAPGQTGKIADYNYKLPDDFTGCVIAWNSNNLDSKVGGNYNYLYRLFRKSNLKPFERDISTEIYQAGSTPCNGVEGFNCYFPLQSYGFQPTNGVGYQPYRVVVLSFELLHAPATVCGPKKSTNLVKNKCVNFNFNGLTGTGVLTESNKKFLPFQQFGRDIADTTDAVRDPQTLEILDITPCSFGGVSVITPGTNTSNQVAVLYQGVNCTEVPVAIHADQLTPTWRVYSTGSNVFQTRAGCLIGAEHVNNSYECDIPIGAGICASYQTQTNSPRRARSVASQSIIAYTMSLGAENSVAYSNNSIAIPTNFTISVTTEILPVSMTKTSVDCTMYICGDSTECSNLLLQYGSFCTQLNRALTGIAVEQDKNTQEVFAQVKQIYKTPPIKDFGGFNFSQILPDPSKPSKRSFIEDLLFNKVTLADAGFIKQYGDCLGDIAARDLICAQKFNGLTVLPPLLTDEMIAQYTSALLAGTITSGWWFGAGAALQIPFAMQMAYRFNGIGVTQNVLYENQKLIANQFNSAIGKIQDSLSSTASALGKLQDVVNQNAQALNTLVKQLSSNFGAISSVLNDILSRLDPPEAEVQIDRLITGRLQSLQTYVTQQLIRAAEIRWSANLAATKMSECVLGQSKRVDFCGKGYHLMSFPQSAPHGVVFLHVTYVPAQEKNFTTAPAICHDGKAHFPREGVFVSNGTHWFVTQRNFYEPQIITTDNTFVSGNCDVVIGIVNNTVYDPLQPELDSFKEELDKYFKNHTSPDVDLGDISGINASVVNIQKEIDRLNEVAKNLNESLIDLQELGKYEQYIKGGGGSDIIKLLNEQVNKEMQSSNLYMSMSSWCYTHSLDGAGLFLFDHAAEEYEHAKKLIIFLNENNVPVQLTSISAPEHKFEGLTQIFQKAYEHEQHISESINNIVDHAIKSKDHATFNFLQWYVAEQHEEEVLFKDILDKIELIGNENHGLYLADQYVKGIAKSRKS

SEQ ID NO: 4825 - protein, 1378 aa, Artificial Sequence
  SARS-CoV-2/India/1-27/2020__EPI_ISL_413522 spike protein (1-1210)(K985P_V986P_T886W_A1019W) Ferritin construct
MFVFLVLLPLVSSQCVNLTTRTQLPPAYTNSFTRGVYYPDKVFRSSVLHSTQDLFLPFFSNVTWFHAIHVSGTNGTKRFDNPVLPFNDGVYFASTEKSNIIRGWIFGTTLDSKTQSLLIVNNATNVVIKVCEFQFCNDPFLGVYHKNNKSWMESEFRVYSSANNCTFEYVSQPFLMDLEGKQGNFKNLREFVFKNIDGYFKIYSKHTPINLVRDLPQGFSALEPLVDLPIGINITRFQTLLALHRSYLTPGDSSSGWTAGAAAYYVGYLQPRTFLLKYNENGTITDAVDCALDPLSETKCTLKSFTVEKGIYQTSNFRVQPTESIVRFPNITNLCPFGEVFNATRFASVYAWNRKRISNCVADYSVLYNSASFSTFKCYGVSPTKLNDLCFTNVYADSFVIRGDEVIQIAPGQTGKIADYNYKLPDDFTGCVIAWNSNNLDSKVGGNYNYLYRLFRKSNLKPFERDISTEIYQAGSTPCNGVEGFNCYFPLQSYGFQPTNGVGYQPYRVVVLSFELLHAPATVCGPKKSTNLVKNKCVNFNFNGLTGTGVLTESNKKFLPFQQFGRDIADTTDAVRDPQTLEILDITPCSFGGVSVITPGTNTSNQVAVLYQDVNCTEVPVAIHADQLTPTWRVYSTGSNVFQTRAGCLIGAEHVNNSYECDIPIGAGICASYQTQTNSPRRARSVASQSIIAYTMSLGAENSVAYSNNSIAIPTNFTISVTTEILPVSMTKTSVDCTMYICGDSTECSNLLLQYGSFCTQLNRALTGIAVEQDKNTQEVFAQVKQIYKTPPIKDFGGFNFSQILPDPSKPSKRSFIEDLLFNKVTLADAGFIKQYGDCLGDIAARDLICAQKFNGLTVLPPLLTDEMIAQYTSALLAGTITSGWWFGAGAALQIPFAMQMAYRFNGIGVTQNVLYENQKLIANQFNSAIGKIQDSLSSTASALGKLQDVVNQNAQALNTLVKQLSSNFGAISSVLNDILSRLDPPEAEVQIDRLITGRLQSLQTYVTQQLIRAAEIRWSANLAATKMSECVLGQSKRVDFCGKGYHLMSFPQSAPHGVVFLHVTYVPAQEKNFTTAPAICHDGKAHFPREGVFVSNGTHWFVTQRNFYEPQIITTDNTFVSGNCDVVIGIVNNTVYDPLQPELDSFKEELDKYFKNHTSPDVDLGDISGINASVVNIQKEIDRLNEVAKNLNESLIDLQELGKYEQYIKGGGGSDIIKLLNEQVNKEMQSSNLYMSMSSWCYTHSLDGAGLFLFDHAAEEYEHAKKLIIFLNENNVPVQLTSISAPEHKFEGLTQIFQKAYEHEQHISESINNIVDHAIKSKDHATFNFLQWYVAEQHEEEVLFKDILDKIELIGNENHGLYLADQYVKGIAKSRKS

SEQ ID NO: 4826 - protein, 1373 aa, Artificial Sequence
  SARS-CoV-2/pangolin/Guangxi/P4L/2017__EPI_ISL_410538 spike protein (1-1205)(K980P_V981P_T881W_A1014W) Ferritin construct
MFVFLFVLPLVSSQCVNLTTRTGIPPGYTNSSTRGVYYPDKVFRSSILHLTQDLFLPFFSNVTWFNTINYQGGFKKFDNPVLPFNDGVYFASTEKSNIIRGWIFGTTLDARTQSLLIVNNATNVVIKVCEFQFCTDPFLGVYYHNNNKTWVENEFRVYSSANNCTFEYISQPFLMDLEGKQGNFKNLREFVFKNVDGYFKIYSKHTPIDLVRDLPRGFAALEPLVDLPIGINITRFQTLLALHRSYLTPGNLESGWTTGAAAYYVGYLQQRTFLLSYNQNGTITDAVDCSLDPLSETKCTLKSLTVEKGIYQTSNFRVQPTISIVRFPNITNLCPFGEVFNASKFASVYAWNRKRISNCVADYSVLYNSTSFSTFKCYGVSPTKLNDLCFTNVYADSFVVKGDEVRQIAPGQTGVIADYNYKLPDDFTGCVIAWNSVKQDALTGGNYGYLYRLFRKSKLKPFERDISTEIYQAGSTPCNGQVGLNCYYPLERYGFHPTTGVNYQPFRVVVLSFELLNGPATVCGPKLSTTLVKDKCVNFNFNGLTGTGVLTTSKKQFLPFQQFGRDISDTTDAVRDPQTLEILDITPCSFGGVSVITPGTNTSNQVAVLYQDVNCTEVPMAIHAEQLTPAWRVYSAGANVFQTRAGCLVGAEHVNNSYECDIPVGAGICASYHSMSSLRSVNQRSIIAYTMSLGAENSVAYSNNSIAIPTNFTISVTTEILPVSMTKTSVDCTMYICGDSIECSNLLLQYGSFCTQLNRALTGIAVEQDKNTQEVFAQVKQIYKTPPIKDFGGFNFSQILPDPSKPSKRSFIEDLLFNKVTLADAGFIKQYGDCLGDIAARDLICAQKFNGLTVLPPLLTDEMIAQYTSALLAGTITSGWWFGAGAALQIPFAMQMAYRFNGIGVTQNVLYENQKLIANQFNSAIGKIQDSLSSTASALGKLQDVVNQNAQALNTLVKQLSSNFGAISSVLNDILSRLDPPEAEVQIDRLITGRLQSLQTYVTQQLIRAAEIRWSANLAATKMSECVLGQSKRVDFCGKGYHLMSFPQSAPHGVVFLHVTYVPAQEKNFTTAPAICHEGKAHFPREGVFVSNGTHWFITQRNFYEPQIITTDNTFVSGSCDVVIGIVNNTVYDPLQPELDSFKEELDKYFKNHTSPDVDLGDISGINASVVNIQKEIDRLNEVAKNLNESPIDLQELGKYEQYIKGGGGSDIIKLLNEQVNKEMQSSNLYMSMSSWCYTHSLDGAGLFLFDHAAEEYEHAKKLIIFLNENNVPVQLTSISAPEHKFEGLTQIFQKAYEHEQHISESINNIVDHAIKSKDHATFNFLQWYVAEQHEEEVLFKDILDKIELIGNENHGLYLADQYVKGIAKSRKS

SEQ ID NO: 4827 - protein, 1373 aa, Artificial Sequence
  SARS-CoV-2/pangolin/Guangxi/P5L/2017__EPI_ISL_410540 spike protein (1-1205)(K980P_V981P_T881W_A1014W) Ferritin construct
MFVFLFVLPLVSSQCVNLTTRTGIPPGYTNSSTRGVYYPDKVFRSSILHLTQDLFLPFFSNVTWFNTINYQGGFKKFDNPVLPFNDGVYFASTEKSNIIRGWIFGTTLDARTQSLLIVNNATNVVIKVCEFQFCTDPFLGVYYHNNNKTWVENEFRVYSSANNCTFEYISQPFLMDLEGKQGNFKNLREFVFKNVDGYFKIYSKHTPIDLVRDLPRGFAALEPLVDLPIGINITRFQTLLALHRSYLTPGKLESGWTTGAAAYYVGYLQQRTFLLSYNQNGTITDAVDCSLDPLSETKCTLKSLTVEKGIYQTSNFRVQPTISIVRFPNITNLCPFGEVFNASKFASVYAWNRKRISNCVADYSVLYNSTSFSTFKCYGVSPTKLNDLCFTNVYADSFVVKGDEVRQIAPGQTGVIADYNYKLPDDFTGCVIAWNSVKQDALTGGNYGYLYRLFRKSKLKPFERDISTEIYQAGSTPCNGQVGLNCYYPLERYGFHPTTGVNYQPFRVVVLSFELLNGPATVCGPKLSTTLVKDKCVNFNFNGLTGTGVLTTSKKQFLPFQQFGRDISDTTDAVRDPQTLEILDITPCSFGGVSVITPGTNTSNQVAVLYQDVNCTEVPMAIHAEQLTPAWRVYSAGANVFQTRAGCLVGAEHVNNSYECDIPVGAGICASYHSMSSFRSVNQRSIIAYTMSLGAENSVAYSNNSIAIPTNFTISVTTEILPVSMTKTSVDCTMYICGDSIECSNLLLQYGSFCTQLNRALTGIAVEQDKNTQEVFAQVKQIYKTPPIKDFGGFNFSQILPDPSKPSKRSFIEDLLFNKVTLADAGFIKQYGDCLGDIAARDLICAQKFNGLTVLPPLLTDEMIAQYTSALLAGTITSGWWFGAGAALQIPFAMQMAYRFNGIGVTQNVLYENQKLIANQFNSAIGKIQDSLSSTASALGKLQDVVNQNAQALNTLVKQLSSNFGAISSVLNDILSRLDPPEAEVQIDRLITGRLQSLQTYVTQQLIRAAEIRWSANLAATKMSECVLGQSKRVDFCGKGYHLMSFPQSAPHGVVFLHVTYVPAQEKNFTTAPAICHEGKAHFPREGVFVSNGTHWFITQRNFYEPQIITTDNTFVSGSCDVVIGIVNNTVYDPLQPELDSFKEELDKYFKNHTSPDVDLGDISGINASVVNIQKEIDRLNEVAKNLNESLIDLQELGKYEQYIKGGGGSDIIKLLNEQVNKEMQSSNLYMSMSSWCYTHSLDGAGLFLFDHAAEEYEHAKKLIIFLNENNVPVQLTSISAPEHKFEGLTQIFQKAYEHEQHISESINNIVDHAIKSKDHATFNFLQWYVAEQHEEEVLFKDILDKIELIGNENHGLYLADQYVKGIAKSRKS

SEQ ID NO: 4828 - protein, 1373 aa, Artificial Sequence
  SARS-CoV-2/pangolin/Guangxi/P5E/2017__EPI_ISL_410541 spike protein (1-1205)(K980P_V981P_T881W_A1014W) Ferritin construct
MFVFLFVLPLVSSQCVNLTTRTGIPPGYTNSSTRGVYYPDKVFRSSILHLTQDLFLPFFSNVTWFNTITYQGGSKKFDNPVLPFNDGVYFASTEKSNIIRGWIFGTTLDARTQSLLIVNNATNVVIKVCEFQFCTDPFLGVYYHNNNKTWVENEFRVYSSANNCTFEYISQPFLMDLEGKQGNFKNLREFVFKNVDGYFKIYSKHTPIDLVRDLPRGFAALEPLVDLPIGINITRFQTLLALHRSYLTPGKLESGWTTGAAAYYVGYLQQRTFLLSYNQNGTITDAVDCSLDPLSETKCTLKSLTVEKGIYQTSNFRVQPTISIVRFPNITNLCPFGEVFNASKFASVYAWNRKRISNCVADYSVLYNSTSFSTFKCYGVSPTKLNDLCFTNVYADSFVVKGDEVRQIAPGQTGVIADYNYKLPDDFTGCVIAWNSVKQDALTGDNYGYLYRLFRKSKLKPFERDISTEIYQAGSTPCNGQVGLNCYYPLERYGFHPTTGVNYQPFRVVVLSFELLNGPATVCGPKLSTTLVKDKCVNFNFNGLTGTGVLTTSKKQFLPFQQFGRDISDTTDAVRDPQTLEILDITPCSFGGVSVITPGTNTSNQVAVLYQDVNCTEVPMAIHAEQLTPAWRVYSAGANVFQTRAGCLVGAEHVNNSYECDIPVGAGICASYHSMSSFRSVNQRSIIAYTMSLGAENSVAYSNNSIAIPTNFTISVTTEILPVSMTKTSVDCTMYICGDSIECSNLLLQYGSFCTQLNRALTGIAVEQDKNTQEVFAQVKQIYKTPPIKDFGGFNFSQILPDPSKPSKRSFIEDLLFNKVTLADAGFIKQYGDCLGDIAARDLICAQKFNGLTVLPPLLTDEMIAQYTSALLAGTITSGWWFGAGAALQIPFAMQMAYRFNGIGVTQNVLYENQKLIANQFNSAIGKIQDSLSSTASALGKLQDVVNQNAQALNTLVKQLSSNFGAISSVLNDILSRLDPPEAEVQIDRLITGRLQSLQTYVTQQLIRAAEIRWSANLAATKMSECVLGQSKRVDFCGKGYHLMSFPQSAPHGVVFLHVTYVPAQEKNFTTAPAICHEGKAHFPREGVFVSNGTHWFITQRNFYEPQIITTDNTFVSGSCDVVIGIVNNTVYDPLQPELDSFKEELDKYFKNHTSPDVDLGDISGINASVVNIQKEIDRLNEVAKNLNESLIDLQELGKYEQYIKGGGGSDIIKLLNEQVNKEMQSSNLYMSMSSWCYTHSLDGAGLFLFDHAAEEYEHAKKLIIFLNENNVPVQLTSISAPEHKFEGLTQIFQKAYEHEQHISESINNIVDHAIKSKDHATFNFLQWYVAEQHEEEVLFKDILDKIELIGNENHGLYLADQYVKGIAKSRKS

SEQ ID NO: 4829 - protein, 1371 aa, Artificial Sequence
  SARS-CoV-2/pangolin/Guangxi/P1E/2017__EPI_ISL_410539 spike protein (1-1203)(K978P_V979P_T879W_A1012W) Ferritin construct
MFVFLFVLPLVSSQCVNLTTRTGIQPGYTNSSTRGVYYPDKVFRSSILHLTQDLFLPFFSNVTWFNTINYQGGFKKFDNPVLPFNDGVYFASTEKSNIIRGWIFGTTLDARTQSLLIVNNATNVVIKVCEFQFCTDPFLGVYYHNNNKTWVENEFRVYSSANNCTFEYISQPFLMDLEGKQGNFKNLREFVFKNVDGYFKIYSKHTPIDLVRDLPRGFAALEPLVDLPIGINITRFQTLLALHRSYLTPGKLESGWTTGAAAYYVGYLQQRTFLLSYNQNGTITDAVDCSLDPLSETKCTLKSLTVEKGIYQTSNFRVQPTISIVRFPNITNLCPFGEVFNASKFASVYAWNRKRISNCVADYSVLYNSTSFSTFKCYGVSPTKLNDLCFTNVYADSFVVKGDEVRQIAPGQTGVIADYNYKLPDDFTGCVIAWNSVKQDALTGGNYLYRLFRKSKLKPFERDISTEIYQAGSTPCNGQVGLNCYYPLERYGFHPTTGVNYQPFRVVVLSFELLNGPATVCGPKLSTTLVKDKCVNFNFNGLTGTGVLTTSKKQFLPFQQFGRDISDTTDAVRDPQTLEILDITPCSFGGVSVITPGTNTSNQVAVLYQDVNCTEVPMAIHAEQLTPAWRVYSAGANVFQTRAGCLVGAEHVNNSYECDIPVGAGICASYHSMSSLRSVNQRSIIAYTMSLGAENSVAYSNNSIAIPTNFTISVTTEILPVSMTKTSVDCTMYICGDSIECSNLLLQYGSFCTQLNRALTGIAVEQDKNTQEVFAQVKQIYKTPPIKDFGGFNFSQILPDPSKPSKRSFIEDLLFNKVTLADAGFIKQYGDCLGDIAARDLICAQKFNGLTVLPPLLTDEMIAQYTSALLAGTITSGWWFGAGAALQIPFAMQMAYRFNGIGVTQNVLYENQKLIANQFNSAIGKIQDSLSSTASALGKLQDVVNQNAQALNTLVKQLSSNFGAISSVLNDILSRLDPPEAEVQIDRLITGRLQSLQTYVTQQLIRAAEIRWSANLAATKMSECVLGQSKRVDFCGKGYHLMSFPQSAPHGVVFLHVTYVPAQEKNFTTAPAICHEGKAHFPREGVFVSNGTHWFITQRNFYEPQIITTDNTFVSGSCDVVIGIVNNTVYDPLQPELDSFKEELDKYFKNHTSPDVDLGDISGINASVVNIQKEIDRLNEVAKNLNESLIDLQELGKYEQYIKGGGGSDIIKLLNEQVNKEMQSSNLYMSMSSWCYTHSLDGAGLFLFDHAAEEYEHAKKLIIFLNENNVPVQLTSISAPEHKFEGLTQIFQKAYEHEQHISESINNIVDHAIKSKDHATFNFLQWYVAEQHEEEVLFKDILDKIELIGNENHGLYLADQYVKGIAKSRKS

SEQ ID NO: 4830 - protein, 1379 aa, Artificial Sequence
  SARS-CoV-2/Wuhan/WIV05/2019__EPI_ISL_402128 spike protein (1-1211)(K986P_V987P_P1069F) Ferritin construct
MFVFLVLLPLVSSQCVNLTTRTQLPPAYTNSFTRGVYYPDKVFRSSVLHSTQDLFLPFFSNVTWFHAIHVSGTNGTKRFDNPVLPFNDGVYFASTEKSNIIRGWIFGTTLDSKTQSLLIVNNATNVVIKVCEFQFCNDPFLGVYYHKNNKSWMESEFRVYSSANNCTFEYVSQPFLMDLEGKQGNFKNLREFVFKNIDGYFKIYSKHTPINLVRDLPQGFSALEPLVDLPIGINITRFQTLLALHRSYLTPGDSSSGWTAGAAAYYVGYLQPRTFLLKYNENGTITDAVDCALDPLSETKCTLKSFTVEKGIYQTSNFRVQPTESIVRFPNITNLCPFGEVFNATRFASVYAWNRKRISNCVADYSVLYNSASFSTFKCYGVSPTKLNDLCFTNVYADSFVIRGDEVRQIAPGQTGKIADYNYKLPDDFTGCVIAWNSNNLDSKVGGNYNYLYRLFRKSNLKPFERDISTEIYQAGSTPCNGVEGFNCYFPLQSYGFQPTNGVGYQPYRVVVLSFELLHAPATVCGPKKSTNLVKNKCVNFNFNGLTGTGVLTESNKKFLPFQQFGRDIADTTDAVRDPQTLEILDITPCSFGGVSVITPGTNTSNQVAVLYQDVNCTEVPVAIHADQLTPTWRVYSTGSNVFQTRAGCLIGAEHVNNSYECDIPIGAGICASYQTQTNSPRRARSVASQSIIAYTMSLGAENSVAYSNNSIAIPTNFTISVTTEILPVSMTKTSVDCTMYICGDSTECSNLLLQYGSFCTQLNRALTGIAVEQDKNTQEVFAQVKQIYKTPPIKDFGGFNFSQILPDPSKPSKRSFIEDLLFNKVTLADAGFIKQYGDCLGDIAARDLICAQKFNGLTVLPPLLTDEMIAQYTSALLAGTITSGWTFGAGAALQIPFAMQMAYRFNGIGVTQNVLYENQKLIANQFNSAIGKIQDSLSSTASALGKLQDVVNQNAQALNTLVKQLSSNFGAISSVLNDILSRLDPPEAEVQIDRLITGRLQSLQTYVTQQLIRAAEIRASANLAATKMSECVLGQSKRVDFCGKGYHLMSFPQSAPHGVVFLHVTYVFAQEKNFTTAPAICHDGKAHFPREGVFVSNGTHWFVTQRNFYEPQIITTDNTFVSGNCDVVIGIVNNTVYDPLQPELDSFKEELDKYFKNHTSPDVDLGDISGINASVVNIQKEIDRLNEVAKNLNESLIDLQELGKYEQYIKGGGGSDIIKLLNEQVNKEMQSSNLYMSMSSWCYTHSLDGAGLFLFDHAAEEYEHAKKLIIFLNENNVPVQLTSISAPEHKFEGLTQIFQKAYEHEQHISESINNIVDHAIKSKDHATFNFLQWYVAEQHEEEVLFKDILDKIELIGNENHGLYLADQYVKGIAKSRKS

SEQ ID NO: 4831 - protein, 1375 aa, Artificial Sequence
  SARS-CoV-2/bat/Yunnan/RaTG13/2013__EPI_ISL_402131 spike protein (1-1207)(K982P_V983P_P1065F) Ferritin construct
MFVFLVLLPLVSSQCVNLTTRTQLPPAYTNSSTRGVYYPDKVFRSSVLHLTQDLFLPFFSNVTWFHAIHVSGTNGIKRFDNPVLPFNDGVYFASTEKSNIIRGWIFGTTLDSKTQSLLIVNNATNVVIKVCEFQFCNDPFLGVYYHKNNKSWMESEFRVYSSANNCTFEYVSQPFLMDLEGKQGNFKNLREFVFKNIDGYFKIYSKHTPINLVRDLPPGFSALEPLVDLPIGINITRFQTLLALHRSYLTPGDSSSGWTAGAAAYYVGYLQPRTFLLKYNENGTITDAVDCALDPLSETKCTLKSFTVEKGIYQTSNFRVQPTDSIVRFPNITNLCPFGEVFNATTFASVYAWNRKRISNCVADYSVLYNSTSFSTFKCYGVSPTKLNDLCFTNVYADSFVITGDEVRQIAPGQTGKIADYNYKLPDDFTGCVIAWNSKHIDAKEGGNFNYLYRLFRKANLKPFERDISTEIYQAGSKPCNGQTGLNCYYPLYRYGFYPTDGVGHQPYRVVVLSFELLNAPATVCGPKKSTNLVKNKCVNFNFNGLTGTGVLTESNKKFLPFQQFGRDIADTTDAVRDPQTLEILDITPCSFGGVSVITPGTNASNQVAVLYQDVNCTEVPVAIHADQLTPTWRVYSTGSNVFQTRAGCLIGAEHVNNSYECDIPIGAGICASYQTQTNSRSVASQSIIAYTMSLGAENSVAYSNNSIAIPTNFTISVTTEILPVSMTKTSVDCTMYICGDSTECSNLLLQYGSFCTQLNRALTGIAVEQDKNTQEVFAQVKQIYKTPPIKDFGGFNFSQILPDPSKPSKRSFIEDLLFNKVTLADAGFIKQYGDCLGDIAARDLICAQKFNGLTVLPPLLTDEMIAQYTSALLAGTITSGWTFGAGAALQIPFAMQMAYRFNGIGVTQNVLYENQKLIANQFNSAIGKIQDSLSSTASALGKLQDVVNQNAQALNTLVKQLSSNFGAISSVLNDILSRLDPPEAEVQIDRLITGRLQSLQTYVTQQLIRAAEIRASANLAATKMSECVLGQSKRVDFCGKGYHLMSFPQSAPHGVVFLHVTYVFAQEKNFTTAPAICHDGKAHFPREGVFVSNGTHWFVTQRNFYEPQIITTDNTFVSGSCDVVIGIVNNTVYDPLQPELDSFKEELDKYFKNHTSPDVDLGDISGINASVVNIQKEIDRLNEVAKNLNESLIDLQELGKYEQYIKGGGGSDIIKLLNEQVNKEMQSSNLYMSMSSWCYTHSLDGAGLFLFDHAAEEYEHAKKLIIFLNENNVPVQLTSISAPEHKFEGLTQIFQKAYEHEQHISESINNIVDHAIKSKDHATFNFLQWYVAEQHEEEVLFKDILDKIELIGNENHGLYLADQYVKGIAKSRKS

SEQ ID NO: 4832 - protein, 1379 aa, Artificial Sequence
  SARS-CoV-2/Wuhan/HBCDC-HB-01/2019__EPI_ISL_402132 spike protein (1-1211)(K986P_V987P_P1069F) Ferritin construct
MFVFLVLLPLVSSQCVNLTTRTQLPPAYTNSITRGVYYPDKVFRSSVLHSTQDLFLPFFSNVTWFHAIHVSGTNGTKRFDNPVLPFNDGVYFASTEKSNIIRGWIFGTTLDSKTQSLLIVNNATNVVIKVCEFQFCNDPFLGVYYHKNNKSWMESEFRVYSSANNCTFEYVSQPFLMDLEGKQGNFKNLREFVFKNIDGYFKIYSKHTPINLVRDLPQGFSALEPLVDLPIGINITRFQTLLALHRSYLTPGDSSSGWTAGAAAYYVGYLQPRTFLLKYNENGTITDAVDCALDPLSETKCTLKSFTVEKGIYQTSNFRVQPTESIVRFPNITNLCPFGEVFNATRFASVYAWNRKRISNCVADYSVLYNSASFSTFKCYGVSPTKLNDLCFTNVYADSFVIRGDEVRQIAPGQTGKIADYNYKLPDDFTGCVIAWNSNNLDSKVGGNYNYLYRLFRKSNLKPFERDISTEIYQAGSTPCNGVEGFNCYFPLQSYGFQPTNGVGYQPYRVVVLSFELLHAPATVCGPKKSTNLVKNKCVNFNFNGLTGTGVLTESNKKFLPFQQFGRDIADTTDAVRDPQTLEILDITPCSFGGVSVITPGTNTSNQVAVLYQDVNCTEVPVAIHADQLTPTWRVYSTGSNVFQTRAGCLIGAEHVNNSYECDIPIGAGICASYQTQTNSPRRARSVASQSIIAYTMSLGAENSVAYSNNSIAIPTNFTISVTTEILPVSMTKTSVDCTMYICGDSTECSNLLLQYGSFCTQLNRALTGIAVEQDKNTQEVFAQVKQIYKTPPIKDFGGFNFSQILPDPSKPSKRSFIEDLLFNKVTLADAGFIKQYGDCLGDIAARDLICAQKFNGLTVLPPLLTDEMIAQYTSALLAGTITSGWTFGAGAALQIPFAMQMAYRFNGIGVTQNVLYENQKLIANQFNSAIGKIQDSLSSTASALGKLQDVVNQNAQALNTLVKQLSSNFGAISSVLNDILSRLDPPEAEVQIDRLITGRLQSLQTYVTQQLIRAAEIRASANLAATKMSECVLGQSKRVDFCGKGYHLMSFPQSAPHGVVFLHVTYVFAQEKNFTTAPAICHDGKAHFPREGVFVSNGTHWFVTQRNFYEPQIITTDNTFVSGNCDVVIGIVNNTVYDPLQPELDSFKEELDKYFKNHTSPDVDLGDISGINASVVNIQKEIDRLNEVAKNLNESLIDLQELGKYEQYIKGGGGSDIIKLLNEQVNKEMQSSNLYMSMSSWCYTHSLDGAGLFLFDHAAEEYEHAKKLIIFLNENNVPVQLTSISAPEHKFEGLTQIFQKAYEHEQHISESINNIVDHAIKSKDHATFNFLQWYVAEQHEEEVLFKDILDKIELIGNENHGLYLADQYVKGIAKSRKS

SEQ ID NO: 4833 - protein, 1379 aa, Artificial Sequence
  SARS-CoV-2/Guangdong/20SF028/2020__EPI_ISL_403936 spike protein (1-1211)(K986P_V987P_P1069F) Ferritin construct
MFVFLVLLPLVSSQCVNLTTRTQLPPAYTNSFTRGVYYPDKVFRSSVLYSTQDLFLPFFSNVTWFHAIHVSGTNGTKRFDNPVLPFNDGVYFASTEKSNIIRGWIFGTTLDSKTQSLLIVNNATNVVIKVCEFQFCNDPFLGVYYHKNNKSWMESEFRVYSSANNCTFEYVSQPFLMDLEGKQGNFKNLREFVFKNIDGYFKIYSKHTPINLVRDLPQGFSALEPLVDLPIGINITRFQTLLALHRSYLTPGDSSSGWTAGAAAYYVGYLQPRTFLLKYNENGTITDAVDCALDPLSETKCTLKSFTVEKGIYQTSNFRVQPTESIVRFPNITNLCPFGEVFNATRFASVYAWNRKRISNCVADYSVLYNSASFSTFKCYGVSPTKLNDLCFTNVYADSFVIRGDEVRQIAPGQTGKIADYNYKLPDDFTGCVIAWNSNNLDSKVGGNYNYLYRLFRKSNLKPFERDISTEIYQAGSTPCNGVEGFNCYFPLQSYGFQPTNGVGYQPYRVVVLSFELLHAPATVCGPKKSTNLVKNKCVNFNFNGLTGTGVLTESNKKFLPFQQFGRDIADTTDAVRDPQTLEILDITPCSFGGVSVITPGTNTSNQVAVLYQDVNCTEVPVAIHADQLTPTWRVYSTGSNVFQTRAGCLIGAEHVNNSYECDIPIGAGICASYQTQTNSPRRARSVASQSIIAYTMSLGAENSVAYSNNSIAIPTNFTISVTTEILPVSMTKTSVDCTMYICGDSTECSNLLLQYGSFCTQLNRALTGIAVEQDKNTQEVFAQVKQIYKTPPIKDFGGFNFSQILPDPSKPSKRSFIEDLLFNKVTLADAGFIKQYGDCLGDIAARDLICAQKFNGLTVLPPLLTDEMIAQYTSALLAGTITSGWTFGAGAALQIPFAMQMAYRFNGIGVTQNVLYENQKLIANQFNSAIGKIQDSLSSTASALGKLQDVVNQNAQALNTLVKQLSSNFGAISSVLNDILSRLDPPEAEVQIDRLITGRLQSLQTYVTQQLIRAAEIRASANLAATKMSECVLGQSKRVDFCGKGYHLMSFPQSAPHGVVFLHVTYVFAQEKNFTTAPAICHDGKAHFPREGVFVSNGTHWFVTQRNFYEPQIITTDNTFVSGNCDVVIGIVNNTVYDPLQPELDSFKEELDKYFKNHTSPDVDLGDISGINASVVNIQKEIDRLNEVAKNLNESLIDLQELGKYEQYIKGGGGSDIIKLLNEQVNKEMQSSNLYMSMSSWCYTHSLDGAGLFLFDHAAEEYEHAKKLIIFLNENNVPVQLTSISAPEHKFEGLTQIFQKAYEHEQHISESINNIVDHAIKSKDHATFNFLQWYVAEQHEEEVLFKDILDKIELIGNENHGLYLADQYVKGIAKSRKS

SEQ ID NO: 4834 - protein, 1379 aa, Artificial Sequence
  SARS-CoV-2/Shenzhen/SZTH-001/2020__EPI_ISL_406592 spike protein (1-1211)(K986P_V987P_P1069F) Ferritin construct
MFVFLVLLPLVSSQCVNLTTRTQLPPAYTNSFTRGVYYPDKVFRSSVLHSTQDLFLPFFSNVTWFHAIHVSGTNGTKRFDNPVLPFNDGVYFASTEKSNIIRGWIFGTTLDSKTQSLLIVNNATNVVIKVCEFQFCNDPFLGVYYHKNNKSWMESEFRVYSSANNCTFEYVSQPFLMDLEGKQGNFKNLREFVFKNIDGYFKIYSKHTPINLVRDLPQGFSALEPLVDLPIGINITRFQTLLALHRSYLTPGDSSSGWTAGAAAYYVGYLQPRTFLLKYNENGTITDAVDCALDPLSETKCTLKSFTVEKGIYQTSNFRVQPTESIVRFPNITNLCPFGEVFNATRFASVYAWNRKRISNCVADYSVLYNSASFSTFKCYGVSPTKLNDLCFTNVYADSFVIRGDEVRQIAPGQTGKIADYNYKLPDDFTGCVIAWNSNNLDSKVGGNYNYLYRLFRKSNLKPFERDISTEIYQAGSTPCNGVEGFNCYFPLQSYGFQPTNGVGYQPYRVVVLSFELLHAPATVCGPKKSTNLVKNKCVNFNFNGLTGTGVLTESNKKFLPFQQFGRDIADTTDAVRDPQTLEILDITPCSFGGVSVITPGTNTSNQVAVLYQDVNCTEVPVAIHADQLTPTWRVYSTGSNVFQTRAGCLIGAEHVNNSYECDIPIGAGICASYQTQTNSPRRARSVASQSIIAYTMSLGAENSVAYSNNSIAIPTNFTISVTTEILPVSMTKTSVDCTMYICGDSTECSNLLLQYGSFCTQLNRALTGIAVEQDKNTQEVFAQVKQIYKTPPIKDFGGFNFSQILPDPSKPSKRSFIEDLLFNKVTLADAGFIKQYGDCLGDIAARDLICAQKFNGLTVLPPLLTDEMIAQYTSALLAGTITSGWTFGAGAALQIPFAMQMAYRFNGIGVTQNVLYENQKLIANQFNSAIGKIQDSLSSTASALGKLQDVVNQNAQALNTLVKQLSSNFGAISSVLNDILSRLDPPEAEVQIDRLITGRLQSLQTYVTQQLIRAAEIRASANLAATKMSECVLGQSKRVDFCGKGYHLMSFPQSAPHGVVFLHVTYVFAQEKNFTTAPAICHDGKAHFPREGVFVSNGTHWFVTQRNFYEPQIITTDNTFVSGNCDVLIGIVNNTVYDPLQPELDSFKEELDKYFKNHTSPDVDLGDISGINASVVNIQKEIDRLNEVAKNLNESLIDLQELGKYEQYIKGGGGSDIIKLLNEQVNKEMQSSNLYMSMSSWCYTHSLDGAGLFLFDHAAEEYEHAKKLIIFLNENNVPVQLTSISAPEHKFEGLTQIFQKAYEHEQHISESINNIVDHAIKSKDHATFNFLQWYVAEQHEEEVLFKDILDKIELIGNENHGLYLADQYVKGIAKSRKS

SEQ ID NO: 4835 - protein, 1379 aa, Artificial Sequence
  SARS-CoV-2/Shenzhen/SZTH-004/2020__EPI_ISL_406595 spike protein (1-1211)(K986P_V987P_P1069F) Ferritin construct
MFVFLVLLPLVSSQCVNLTTRTQLPPAYTNSFTRGVYYPDKVFRSSVLHSTQDLFLPFFSNVTWFHAIHVSGTNGTKRFDNPVLPFNDGVYFASTEKSNIIRGWIFGTTLDSKTQSLLIVNNATNVVIKVCEFQFCNDPFLGVYYHKNNKSWMESEFRVYSSANNCTFEYVSQPFLMDLEGKQGNFKNLREFVFKNIDGYFKIYSKHTPINLVRDLPQGFSALEPLVDLPIGINITRFQTLLALHRSYLTPGDSSSGWTAGAAAYYVGYLQPRTFLLKYNENGTITDAVDCALDPLSETKCTLKSFTVEKGIYQTSNFRVQPTESIVRFPNITNLCPFGEVFNATRFASVYAWDRKRISNCVAYYSVLYNSASFSTFKCYGVSPTKLNDLCFTNVYADSFVIRGDEVRQIAPGQTGKIADYNYKLPDDFTGCVIAWNSNNLDSKVGGNYNYLYRLFRKSNLKPFERDISTEIYQAGSTPCNGVEGFNCYFPLQSYGFQPTNGVGYQPYRVVVLSFELLHAPATVCGPKKSTNLVKNKCVNFNFNGLTGTGVLTESNKKFLPFQQFGRDIADTTDAVRDPQTLEILDITPCSFGGVSVITPGTNTSNQVAVLYQDVNCTEVPVAIHADQLTPTWRVYSTGSNVFQTRAGCLIGAEHVNNSYECDIPIGAGICASYQTQTNSPRRARSVASQSIIAYTMSLGAENSVAYSNNSIAIPTNFTISVTTEILPVSMTKTSVDCTMYICGDSTECSNLLLQYGSFCTQLNRALTGIAVEQDKNTQEVFAQVKQIYKTPPIKDFGGFNFSQILPDPSKPSKRSFIEDLLFNKVTLADAGFIKQYGDCLGDIAARDLICAQKFNGLTVLPPLLTDEMIAQYTSALLAGTITSGWTFGAGAALQIPFAMQMAYRFNGIGVTQNVLYENQKLIANQFNSAIGKIQDSLSSTASALGKLQDVVNQNAQALNTLVKQLSSNFGAISSVLNDILSRLDPPEAEVQIDRLITGRLQSLQTYVTQQLIRAAEIRASANLAATKMSECVLGQSKRVDFCGKGYHLMSFPQSAPHGVVFLHVTYVFAQEKNFTTAPAICHDGKAHFPREGVFVSNGTHWFVTQRNFYEPQIITTDNTFVSGNCDVVIGIVNNTVYDPLQPELDSFKEELDKYFKNHTSPDVDLGDISGINASVVNIQKEIDRLNEVAKNLNESLIDLQELGKYEQYIKGGGGSDIIKLLNEQVNKEMQSSNLYMSMSSWCYTHSLDGAGLFLFDHAAEEYEHAKKLIIFLNENNVPVQLTSISAPEHKFEGLTQIFQKAYEHEQHISESINNIVDHAIKSKDHATFNFLQWYVAEQHEEEVLFKDILDKIELIGNENHGLYLADQYVKGIAKSRKS

SEQ ID NO: 4836 - protein, 1379 aa, Artificial Sequence
  SARS-CoV-2/France/IDF0372/2020__EPI_ISL_406596 spike protein (1-1211)(K986P_V987P_P1069F) Ferritin construct
MFVFLVLLPLVSSQCVNLTTRTQLPPAYTNSFTRGVYYPDKVFRSSVLHSTQDLFLPFFSNVTWFHAIHVSGTNGTKRFDNPVLPFNDGVYFASTEKSNIIRGWIFGTTLDSKTQSLLIVNNATNVVIKVCEFQFCNDPFLGVYYHKNNKSWMESEFRVYSSANNCTFEYVSQPFLMDLEGKQGNFKNLREFVFKNIDGYFKIYSKHTPINLVRDLPQGFSALEPLVDLPIGINITRFQTLLALHRSYLTPGDSSSGWTAGAAAYYVGYLQPRTFLLKYNENGTITDAVDCALDPLSETKCTLKSFTVEKGIYQTSNFRVQPTESIVRFPNITNLCPFGEVFNATRFASVYAWNRKRISNCVADYSFLYNSASFSTFKCYGVSPTKLNDLCFTNVYADSFVIRGDEVRQIAPGQTGKIADYNYKLPDDFTGCVIAWNSNNLDSKVGGNYNYLYRLFRKSNLKPFERDISTEIYQAGSTPCNGVEGFNCYFPLQSYGFQPTNGVGYQPYRVVVLSFELLHAPATVCGPKKSTNLVKNKCVNFNFNGLTGTGVLTESNKKFLPFQQFGRDIADTTDAVRDPQTLEILDITPCSFGGVSVITPGTNTSNQVAVLYQDVNCTEVPVAIHADQLTPTWRVYSTGSNVFQTRAGCLIGAEHVNNSYECDIPIGAGICASYQTQTNSPRRARSVASQSIIAYTMSLGAENSVAYSNNSIAIPTNFTISVTTEILPVSMTKTSVDCTMYICGDSTECSNLLLQYGSFCTQLNRALTGIAVEQDKNTQEVFAQVKQIYKTPPIKDFGGFNFSQILPDPSKPSKRSFIEDLLFNKVTLADAGFIKQYGDCLGDIAARDLICAQKFNGLTVLPPLLTDEMIAQYTSALLAGTITSGWTFGAGAALQIPFAMQMAYRFNGIGVTQNVLYENQKLIANQFNSAIGKIQDSLSSTASALGKLQDVVNQNAQALNTLVKQLSSNFGAISSVLNDILSRLDPPEAEVQIDRLITGRLQSLQTYVTQQLIRAAEIRASANLAATKMSECVLGQSKRVDFCGKGYHLMSFPQSAPHGVVFLHVTYVFAQEKNFTTAPAICHDGKAHFPREGVFVSNGTHWFVTQRNFYEPQIITTDNTFVSGNCDVVIGIVNNTVYDPLQPELDSFKEELDKYFKNHTSPDVDLGDISGINASVVNIQKEIDRLNEVAKNLNESLIDLQELGKYEQYIKGGGGSDIIKLLNEQVNKEMQSSNLYMSMSSWCYTHSLDGAGLFLFDHAAEEYEHAKKLIIFLNENNVPVQLTSISAPEHKFEGLTQIFQKAYEHEQHISESINNIVDHAIKSKDHATFNFLQWYVAEQHEEEVLFKDILDKIELIGNENHGLYLADQYVKGIAKSRKS

SEQ ID NO: 4837 - protein, 1379 aa, Artificial Sequence
  SARS-CoV-2/Australia/VIC01/2020__EPI_ISL_406844 spike protein (1-1211)(K986P_V987P_P1069F) Ferritin construct
MFVFLVLLPLVSSQCVNLTTRTQLPPAYTNSFTRGVYYPDKVFRSSVLHSTQDLFLPFFSNVTWFHAIHVSGTNGTKRFDNPVLPFNDGVYFASTEKSNIIRGWIFGTTLDSKTQSLLIVNNATNVVIKVCEFQFCNDPFLGVYYHKNNKSWMESEFRVYSSANNCTFEYVSQPFLMDLEGKQGNFKNLREFVFKNIDGYFKIYSKHTPINLVRDLPQGFSALEPLVDLPIGINITRFQTLLALHRRYLTPGDSSSGWTAGAAAYYVGYLQPRTFLLKYNENGTITDAVDCALDPLSETKCTLKSFTVEKGIYQTSNFRVQPTESIVRFPNITNLCPFGEVFNATRFASVYAWNRKRISNCVADYSVLYNSASFSTFKCYGVSPTKLNDLCFTNVYADSFVIRGDEVRQIAPGQTGKIADYNYKLPDDFTGCVIAWNSNNLDSKVGGNYNYLYRLFRKSNLKPFERDISTEIYQAGSTPCNGVEGFNCYFPLQSYGFQPTNGVGYQPYRVVVLSFELLHAPATVCGPKKSTNLVKNKCVNFNFNGLTGTGVLTESNKKFLPFQQFGRDIADTTDAVRDPQTLEILDITPCSFGGVSVITPGTNTSNQVAVLYQDVNCTEVPVAIHADQLTPTWRVYSTGSNVFQTRAGCLIGAEHVNNSYECDIPIGAGICASYQTQTNSPRRARSVASQSIIAYTMSLGAENSVAYSNNSIAIPTNFTISVTTEILPVSMTKTSVDCTMYICGDSTECSNLLLQYGSFCTQLNRALTGIAVEQDKNTQEVFAQVKQIYKTPPIKDFGGFNFSQILPDPSKPSKRSFIEDLLFNKVTLADAGFIKQYGDCLGDIAARDLICAQKFNGLTVLPPLLTDEMIAQYTSALLAGTITSGWTFGAGAALQIPFAMQMAYRFNGIGVTQNVLYENQKLIANQFNSAIGKIQDSLSSTASALGKLQDVVNQNAQALNTLVKQLSSNFGAISSVLNDILSRLDPPEAEVQIDRLITGRLQSLQTYVTQQLIRAAEIRASANLAATKMSECVLGQSKRVDFCGKGYHLMSFPQSAPHGVVFLHVTYVFAQEKNFTTAPAICHDGKAHFPREGVFVSNGTHWFVTQRNFYEPQIITTDNTFVSGNCDVVIGIVNNTVYDPLQPELDSFKEELDKYFKNHTSPDVDLGDISGINASVVNIQKEIDRLNEVAKNLNESLIDLQELGKYEQYIKGGGGSDIIKLLNEQVNKEMQSSNLYMSMSSWCYTHSLDGAGLFLFDHAAEEYEHAKKLIIFLNENNVPVQLTSISAPEHKFEGLTQIFQKAYEHEQHISESINNIVDHAIKSKDHATFNFLQWYVAEQHEEEVLFKDILDKIELIGNENHGLYLADQYVKGIAKSRKS

SEQ ID NO: 4838 - protein, 1379 aa, Artificial Sequence
  SARS-CoV-2/Germany/BavPat1/2020__EPI_ISL_406862 spike protein (1-1211)(K986P_V987P_P1069F) Ferritin construct
MFVFLVLLPLVSSQCVNLTTRTQLPPAYTNSFTRGVYYPDKVFRSSVLHSTQDLFLPFFSNVTWFHAIHVSGTNGTKRFDNPVLPFNDGVYFASTEKSNIIRGWIFGTTLDSKTQSLLIVNNATNVVIKVCEFQFCNDPFLGVYYHKNNKSWMESEFRVYSSANNCTFEYVSQPFLMDLEGKQGNFKNLREFVFKNIDGYFKIYSKHTPINLVRDLPQGFSALEPLVDLPIGINITRFQTLLALHRSYLTPGDSSSGWTAGAAAYYVGYLQPRTFLLKYNENGTITDAVDCALDPLSETKCTLKSFTVEKGIYQTSNFRVQPTESIVRFPNITNLCPFGEVFNATRFASVYAWNRKRISNCVADYSVLYNSASFSTFKCYGVSPTKLNDLCFTNVYADSFVIRGDEVRQIAPGQTGKIADYNYKLPDDFTGCVIAWNSNNLDSKVGGNYNYLYRLFRKSNLKPFERDISTEIYQAGSTPCNGVEGFNCYFPLQSYGFQPTNGVGYQPYRVVVLSFELLHAPATVCGPKKSTNLVKNKCVNFNFNGLTGTGVLTESNKKFLPFQQFGRDIADTTDAVRDPQTLEILDITPCSFGGVSVITPGTNTSNQVAVLYQGVNCTEVPVAIHADQLTPTWRVYSTGSNVFQTRAGCLIGAEHVNNSYECDIPIGAGICASYQTQTNSPRRARSVASQSIIAYTMSLGAENSVAYSNNSIAIPTNFTISVTTEILPVSMTKTSVDCTMYICGDSTECSNLLLQYGSFCTQLNRALTGIAVEQDKNTQEVFAQVKQIYKTPPIKDFGGFNFSQILPDPSKPSKRSFIEDLLFNKVTLADAGFIKQYGDCLGDIAARDLICAQKFNGLTVLPPLLTDEMIAQYTSALLAGTITSGWTFGAGAALQIPFAMQMAYRFNGIGVTQNVLYENQKLIANQFNSAIGKIQDSLSSTASALGKLQDVVNQNAQALNTLVKQLSSNFGAISSVLNDILSRLDPPEAEVQIDRLITGRLQSLQTYVTQQLIRAAEIRASANLAATKMSECVLGQSKRVDFCGKGYHLMSFPQSAPHGVVFLHVTYVFAQEKNFTTAPAICHDGKAHFPREGVFVSNGTHWFVTQRNFYEPQIITTDNTFVSGNCDVVIGIVNNTVYDPLQPELDSFKEELDKYFKNHTSPDVDLGDISGINASVVNIQKEIDRLNEVAKNLNESLIDLQELGKYEQYIKGGGGSDIIKLLNEQVNKEMQSSNLYMSMSSWCYTHSLDGAGLFLFDHAAEEYEHAKKLIIFLNENNVPVQLTSISAPEHKFEGLTQIFQKAYEHEQHISESINNIVDHAIKSKDHATFNFLQWYVAEQHEEEVLFKDILDKIELIGNENHGLYLADQYVKGIAKSRKS

SEQ ID NO: 4839 - protein, 1379 aa, Artificial Sequence
  SARS-CoV-2/Wuhan/HBCDC-HB-02/2020__EPI_ISL_412978 spike protein (1-1211)(K986P_V987P_P1069F) Ferritin construct
MFVFLVLLPLVSSQCVNLTTRTQLPPAYTNSFTRGVYYPDKVFRSSVLHSTQDLFLPFFSNVTWFHAIHVSGTNGTKRFDNPVLPFNDGVYFASTEKSNIIRGWIFGTTLDSKTQSLLIVNNATNVVIKVCEFQFCNDPFLGVYYHKNNKSWMESEFRVYSSANNCTFEYVSQPFLMDLEGKQGNFKNLREFVFKNIDGYFKIYSKHTPINLVRDLPQGFSALEPLVDLPIGINITRFQTLLALHRSYLTPGDSSSGWTAGAAAYYVGYLQPRTFLLKYNENGTITDAVDCALDPLSETKCTLKSFTVEKGIYQTSNFRVQPTESIVRFPNITNLCPFGEVFNATRFASVYAWNRKRISNCVADYSVLYNSASFSTFKCYGVSPTKLNDLCFTNVYADSFVIRGDEVRQIAPGQTGKIADYNYKLPDDFTGCVIAWNSNNLDSKVGGNYNYLYRLFRKSNLKPFERDISTEIYQAGSTPCNGVEGFNCYFPLQSYGFQPTNGVGYQPYRVVVLSFELLHAPATVCGPKKSTNLVKNKCVNFNFNGLTGTGVLTESNKKFLPFQQFGRDIADTTDAVRDPQTLEILDITPCSFGGVSVITPGTNTSNQVAVLYQDVNCTEVPVAIHADQLTPTWRVYSTGSNVFQTRAGCLIGAEHVNNSYECDIPIGAGICASYQTQTNSPRRARSVASQSIIAYTMSLGAENSVAYSNNSIAIPTNFTISVTTEILPVSMTKTSVDCTMYICGDSTECSNFLLQYGSFCTQLNRALTGIAVEQDKNTQEVFAQVKQIYKTPPIKDFGGFNFSQILPDPSKPSKRSFIEDLLFNKVTLADAGFIKQYGDCLGDIAARDLICAQKFNGLTVLPPLLTDEMIAQYTSALLAGTITSGWTFGAGAALQIPFAMQMAYRFNGIGVTQNVLYENQKLIANQFNSAIGKIQDSLSSTASALGKLQDVVNQNAQALNTLVKQLSSNFGAISSVLNDILSRLDPPEAEVQIDRLITGRLQSLQTYVTQQLIRAAEIRASANLAATKMSECVLGQSKRVDFCGKGYHLMSFPQSAPHGVVFLHVTYVFAQEKNFTTAPAICHDGKAHFPREGVFVSNGTHWFVTQRNFYEPQIITTDNTFVSGNCDVVIGIVNNTVYDPLQPELDSFKEELDKYFKNHTSPDVDLGDISGINASVVNIQKEIDRLNEVAKNLNESLIDLQELGKYEQYIKGGGGSDIIKLLNEQVNKEMQSSNLYMSMSSWCYTHSLDGAGLFLFDHAAEEYEHAKKLIIFLNENNVPVQLTSISAPEHKFEGLTQIFQKAYEHEQHISESINNIVDHAIKSKDHATFNFLQWYVAEQHEEEVLFKDILDKIELIGNENHGLYLADQYVKGIAKSRKS

SEQ ID NO: 4840 - protein, 1379 aa, Artificial Sequence
  SARS-CoV-2/Australia/QLD02/2020__EPI_ISL_407896 spike protein (1-1211)(K986P_V987P_P1069F) Ferritin construct
MFVFLVLLPLVSSQCVNLTTRTQLPPAYTNSFTRGVYYPDKVFRSSVLHSTQDLFLPFFSNVTWFHAIHVSGTNGTKRFDNPVLPFNDGVYFASTEKSNIIRGWIFGTTLDSKTQSLLIVNNATNVVIKVCEFQFCNDPFLGVYYHKNNKSWMESEFRVYSSANNCTFEYVSQPFLMDLEGKQGNFKNLREFVFKNIDGYFKIYSKHTPINLVRDLPQGFSALEPLVDLPIGINITRFQTLLALHRSYLTPGDSSSGWTAGAAAYYVGYLQPRTFLLKYNENGTITDAVDCALDPLSETKCTLKSFTVEKGIYQTSNFRVQPTESIVRFPNITNLCPFGEVFNATRFASVYAWNRKRISNCVADYSVLYNSASFSTFKCYGVSPTKLNDLCFTNVYADSFVIRGDEVRQIAPGQTGKIADYNYKLPDDFTGCVIAWNSNNLDSKVGGNYNYLYRLFRKSNLKPFERDISTEIYQAGSTPCNGVEGFNCYFPLQSYGFQPTNGVGYQPYRVVVLSFELLHAPATVCGPKKSTNLVKNKCVNFNFNGLTGTGVLTESNKKFLPFQQFGRDIADTTDAVRDPQTLEILDITPCSFGGVSVITPGTNTSNQVAVLYQDVNCTEVPVAIHADQLTPTWRVYSTGSNVFQTRAGCLIGAEHVNNSYECDIPIGAGICASYQTQTNSPRRARSVASQSIIAYTMSLGAENSVAYSNNSIAIPTNFTISVTTEILPVSMTKTSVDCTMYICGDSTECSNLLLQYGSFCTQLNRALTGIAVEQDKNTQEVFAQVKQIYKTPPIKDFGGFNFSQILPDPSKPSKRSFIEDLLFNKVTLADAGFIKQYGDCLGDIAARDLICAQKFNGLTVLPPLLTDEMIAQYTSALLAGTITSGWTFGAGAALQIPFAMQMAYRFNGIGVTQNVLYENQKLIANQFNSAIGKIQDSLSSTASALGKLQDVVNQNAQALNTLVKQLSSNFGAISSVLNDILSRLDPPEAEVQIDRLITGRLQSLQTYVTQQLIRAAEIRASANLAATKMSECVLGQSKRVDFCGKGYHLMSFPQSAPHGVVFLHVTYVFAQEKNFTTAPAICHDGKAHFPREGVFVSNGTHWFVTQRNFYEPQIITTDNTFVSGNCDVVIGIVNNTVYDPLQLELDSFKEELDKYFKNHTSPDVDLGDISGINASVVNIQKEIDRLNEVAKNLNESLIDLQELGKYEQYIKGGGGSDIIKLLNEQVNKEMQSSNLYMSMSSWCYTHSLDGAGLFLFDHAAEEYEHAKKLIIFLNENNVPVQLTSISAPEHKFEGLTQIFQKAYEHEQHISESINNIVDHAIKSKDHATFNFLQWYVAEQHEEEVLFKDILDKIELIGNENHGLYLADQYVKGIAKSRKS

SEQ ID NO: 4841 - protein, 1379 aa, Artificial Sequence
  SARS-CoV-2/India/1-31/2020__EPI_ISL_413523 spike protein (1-1211)(K986P_V987P_P1069F) Ferritin construct
MFVFLVLLPLVSSQCVNLTTRTQLPPAYTNSFTRGVYYPDKVFRSSVLHSTQDLFLPFFSNVTWFHAIHVSGTNGTKRFDNPVLPFNDGVYFASTEKSNIIRGWIFGTTLDSKTQSLLIVNNATNVVIKVCEFQFCNDPFLGVYYHKNNKSWMESEFRVYSSANNCTFEYVSQPFLMDLEGKQGNFKNLREFVFKNIDGYFKIYSKHTPINLVRDLPQGFSALEPLVDLPIGINITRFQTLLALHRSYLTPGDSSSGWTAGAAAYYVGYLQPRTFLLKYNENGTITDAVDCALDPLSETKCTLKSFTVEKGIYQTSNFRVQPTESIVRFPNITNLCPFGEVFNATRFASVYAWNRKRISNCVADYSVLYNSASFSTFKCYGVSPTKLNDLCFTNVYADSFVIRGDEVRQIAPGQTGKIADYNYKLPDDFTGCVIAWNSNNLDSKVGGNYNYLYRLFRKSNLKPFERDISTEIYQAGSTPCNGVEGFNCYFPLQSYGFQPTNGVGYQPYRVVVLSFELLHAPATVCGPKKSTNLVKNKCVNFNFNGLTGTGVLTESNKKFLPFQQFGRDIADTTDAVRDPQTLEILDITPCSFGGVSVITPGTNTSNQVAVLYQDVNCTEVPVAIHADQLTPTWRVYSTGSNVFQTRAGCLIGAEHVNNSYECDIPIGAGICASYQTQTNSPRRARSVASQSIIAYTMSLGAENSVAYSNNSIAIPTNFTISVTTEILPVSMTKTSVDCTMYICGDSTECSNLLLQYGSFCTQLNRALTGIAVEQDKNTQEVFAQVKQIYKTPPIKDFGGFNFSQILPDPSKPSKRSFIEDLLFNKVTLADAGFIKQYGDCLGDIAARDLICAQKFNGLTVLPPLLTDEMIAQYTSALLAGTITSGWTFGAGAALQIPFAMQMAYRFNGIGVTQNVLYENQKLIANQFNSVIGKIQDSLSSTASALGKLQDVVNQNAQALNTLVKQLSSNFGAISSVLNDILSRLDPPEAEVQIDRLITGRLQSLQTYVTQQLIRAAEIRASANLAATKMSECVLGQSKRVDFCGKGYHLMSFPQSAPHGVVFLHVTYVFAQEKNFTTAPAICHDGKAHFPREGVFVSNGTHWFVTQRNFYEPQIITTDNTFVSGNCDVVIGIVNNTVYDPLQPELDSFKEELDKYFKNHTSPDVDLGDISGINASVVNIQKEIDRLNEVAKNLNESLIDLQELGKYEQYIKGGGGSDIIKLLNEQVNKEMQSSNLYMSMSSWCYTHSLDGAGLFLFDHAAEEYEHAKKLIIFLNENNVPVQLTSISAPEHKFEGLTQIFQKAYEHEQHISESINNIVDHAIKSKDHATFNFLQWYVAEQHEEEVLFKDILDKIELIGNENHGLYLADQYVKGIAKSRKS

SEQ ID NO: 4842 - protein, 1379 aa, Artificial Sequence
  SARS-CoV-2/Guangdong/GD2020087-P0008/2020__EPI_ISL_413863 spike protein (1-1211)(K986P_V987P_P1069F) Ferritin construct
MFVFLVLLPLVSSQCVNLTTRTQLPPAYTNSFTRGVYYPDKVFRSSVLHSTQDLFLPFFSNVTWFHAIHVSGTNGTKRFDNPVLPFNDGVYFASTEKSNIIRGWIFGTTLDSKTQSLLIVNNATNVVIKVCEFQFCNDPFLGVYYHKNNKSWMESEFRVYSSANNCTFEYVSQPFLMDLEGKQGNFKNLREFVFKNIDGYFKIYSKHTPINLVRDLPQGFSALEPLVDLPIGINITRFQTLLALHRSYLTPGDSSSGWTAGAAAYYVGYLQPRTFLLKYNENGTITDAVDCALDPLSETKCTLKSFTVEKGIYQTSNFRVQPTESIVRFPNITNLCPFGEVFNATRFASVYAWNRKRISNCVADYSVLYNSASFSTFKCYGVSPTKLNDLCFTNVYADSFVIRGDEVREIAPGQTGKIADYNYKLPDDFTGCVIAWNSNNLDSKVGGNYNYLYRLFRKSNLKPFERDISTEIYQAGSTPCNGVEGFNCYFPLQSYGFQPTNGVGYQPYRVVVLSFELLHAPATVCGPKKSTNLVKNKCVNFNFNGLTGTGVLTESNKKFLPFQQFGRDIADTTDAVRDPQTLEILDITPCSFGGVSVITPGTNTSNQVAVLYQDVNCTEVPVAIHADQLTPTWRVYSTGSNVFQTRAGCLIGAEHVNNSYECDIPIGAGICASYQTQTNSPRRARSVASQSIIAYTMSLGAENSVAYSNNSIAIPTNFTISVTTEILPVSMTKTSVDCTMYICGDSTECSNLLLQYGSFCTQLNRALTGIAVEQDKNTQEVFAQVKQIYKTPPIKDFGGFNFSQILPDPSKPSKRSFIEDLLFNKVTLADAGFIKQYGDCLGDIAARDLICAQKFNGLTVLPPLLTDEMIAQYTSALLAGTITSGWTFGAGAALQIPFAMQMAYRFNGIGVTQNVLYENQKLIANQFNSAIGKIQDSLSSTASALGKLQDVVNQNAQALNTLVKQLSSNFGAISSVLNDILSRLDPPEAEVQIDRLITGRLQSLQTYVTQQLIRAAEIRASANLAATKMSECVLGQSKRVDFCGKGYHLMSFPQSAPHGVVFLHVTYVFAQEKNFTTAPAICHDGKAHFPREGVFVSNGTHWFVTQRNFYEPQIITTDNTFVSGNCDVVIGIVNNTVYDPLQPELDSFKEELDKYFKNHTSPDVDLGDISGINASVVNIQKEIDRLNEVAKNLNESLIDLQELGKYEQYIKGGGGSDIIKLLNEQVNKEMQSSNLYMSMSSWCYTHSLDGAGLFLFDHAAEEYEHAKKLIIFLNENNVPVQLTSISAPEHKFEGLTQIFQKAYEHEQHISESINNIVDHAIKSKDHATFNFLQWYVAEQHEEEVLFKDILDKIELIGNENHGLYLADQYVKGIAKSRKS

SEQ ID NO: 4843 - protein, 1379 aa, Artificial Sequence
  SARS-CoV-2/Sweden/01/2020__EPI_ISL_411951 spike protein (1-1211)(K986P_V987P_P1069F) Ferritin construct
MFVFLVLLPLVSSQCVNLTTRTQLPPAYTNSFTRGVYYPDKVFRSSVLHSTQDLFLPFFSNVTWFHAIHVSGTNGTKRFDNPVLPFNDGVYFASTEKSNIIRGWIFGTTLDSKTQSLLIVNNATNVVIKVCEFQFCNDPFLGVYYHKNNKSWMESEFRVYSSANNCTFEYVSQPFLMDLEGKQGNFKNLREFVFKNIDGYFKIYSKHTPINLVRDLPQGFSALEPLVDLPIGINITRFQTLLALHRSYLTPGDSSSGWTAGAAAYYVGYLQPRTFLLKYNENGTITDAVDCALDPLSETKCTLKSFTVEKGIYQTSNFRVQPTESIVRFPNITNLCPFGEVFNATRFASVYAWNRKRISNCVADYSVLYNSASFSTFKCYGVSPTKLNDLCFTNVYADSFVIRGDEVRQIAPGQTGKIADYNYKLPDDFTGCVIAWNSNNLDSKVGGNYNYLYRLFRKSNLKPFERDISTEIYQAGSTPCNGVEGFNCYFPLQSYGFQPTNGVGYQPYRVVVLSFELLHAPATVCGPKKSTNLVKNKCVNFNFNGLTGTGVLTESNKKFLPFQQFGRDIADTTDAVRDPQTLEILDITPCSFGGVSVITPGTNTSNQVAVLYQDVNCTEVPVAIHADQLTPTWRVYSTGSNVFQTRAGCLIGAEHVNNSYECDIPIGAGICASYQTQTNSPRRARSVASQSIIAYTMSLGAENSVAYSNNSIAIPTNFTISVTTEILPVSMTKTSVDCTMYICGDSTECSNLLLQYGSFCTQLNRALTGIAVEQDKNTQEVFAQVKQIYKTPPIKDCGGFNFSQILPDPSKPSKRSFIEDLLFNKVTLADAGFIKQYGDCLGDIAARDLICAQKFNGLTVLPPLLTDEMIAQYTSALLAGTITSGWTFGAGAALQIPFAMQMAYRFNGIGVTQNVLYENQKLIANQFNSAIGKIQDSLSSTASALGKLQDVVNQNAQALNTLVKQLSSNFGAISSVLNDILSRLDPPEAEVQIDRLITGRLQSLQTYVTQQLIRAAEIRASANLAATKMSECVLGQSKRVDFCGKGYHLMSFPQSAPHGVVFLHVTYVFAQEKNFTTAPAICHDGKAHFPREGVFVSNGTHWFVTQRNFYEPQIITTDNTFVSGNCDVVIGIVNNTVYDPLQPELDSFKEELDKYFKNHTSPDVDLGDISGINASVVNIQKEIDRLNEVAKNLNESLIDLQELGKYEQYIKGGGGSDIIKLLNEQVNKEMQSSNLYMSMSSWCYTHSLDGAGLFLFDHAAEEYEHAKKLIIFLNENNVPVQLTSISAPEHKFEGLTQIFQKAYEHEQHISESINNIVDHAIKSKDHATFNFLQWYVAEQHEEEVLFKDILDKIELIGNENHGLYLADQYVKGIAKSRKS

SEQ ID NO: 4844 - protein, 1379 aa, Artificial Sequence
  SARS-CoV-2/Tianmen/HBCDC-HB-07/2020__EPI_ISL_412983 spike protein (1-1211)(K986P_V987P_P1069F) Ferritin construct
MFVFLVLLPLVSSQCVNLTTRTQLPPAYTNSFTRGVYYPDKVFRSSVLHSTQDLFLPFFSNVTWFHAIHVSGTNGTKRFDNPVLPFNDGVYFASTEKSNIIRGWIFGTTLDSKTQSLLIVNNATNVVIKVCEFQFCNDPFLGVYYHKNNKSWMESEFRVYSSANNCTFEYVSQPFLMDLEGKQGNFKNLREFVFKNIDGYFKIYSKHTPINLVRDLPQGFSALEPLVDLPIGINITRFQTLLALHRSYLTPGDSSSGWTAGAAAYYVGYLQPRTFLLKYNENGTITDAVDCALDPLSETKCTLKSFTVEKGIYQTSNFRVQPTESIVRFPNITNLCPFGEVFNATRFASVYAWNRKRISNCVADYSVLYNSASFSTFKCYGVSPTKLNDLCFTNVYADSFVIRGDEVRQIAPGQTGKIADYNYKLPDDFTGCVIAWNSNNLDSKVGGNYNYLYRLFRKSNLKPFERDISTEIYQAGSTPCNGVEGFNCYFPLQSYGFQPTNGVGYQPYRVVVLSFELLHAPATVCGPKKSTNLVKNKCVNFNFNGLTGTGVLTESNKKFLPFQQFGRDIADTTDAVRDPQTLEILDITPCSFGGVSVITPGTNTSNQVAVLYQDLNCTEVPVAIHADQLTPTWRVYSTGSNVFQTRAGCLIGAEHVNNSYECDIPIGAGICASYQTQTNSPRRARSVASQSIIAYTMSLGAENSVAYSNNSIAIPTNFTISVTTEILPVSMTKTSVDCTMYICGDSTECSNLLLQYGSFCTQLNRALTGIAVEQDKNTQEVFAQVKQIYKTPPIKDFGGFNFSQILPDPSKPSKRSFIEDLLFNKVTLADAGFIKQYGDCLGDIAARDLICAQKFNGLTVLPPLLTDEMIAQYTSALLAGTITSGWTFGAGAALQIPFAMQMAYRFNGIGVTQNVLYENQKLIANQFNSAIGKIQDSLSSTASALGKLQDVVNQNAQALNTLVKQLSSNFGAISSVLNDILSRLDPPEAEVQIDRLITGRLQSLQTYVTQQLIRAAEIRASANLAATKMSECVLGQSKRVDFCGKGYHLMSFPQSAPHGVVFLHVTYVFAQEKNFTTAPAICHDGKAHFPREGVFVSNGTHWFVTQRNFYEPQIITTDNTFVSGNCDVVIGIVNNTVYDPLQPELDSFKEELDKYFKNHTSPDVDLGDISGINASVVNIQKEIDRLNEVAKNLNESLIDLQELGKYEQYIKGGGGSDIIKLLNEQVNKEMQSSNLYMSMSSWCYTHSLDGAGLFLFDHAAEEYEHAKKLIIFLNENNVPVQLTSISAPEHKFEGLTQIFQKAYEHEQHISESINNIVDHAIKSKDHATFNFLQWYVAEQHEEEVLFKDILDKIELIGNENHGLYLADQYVKGIAKSRKS

SEQ ID NO: 4845 - protein, 1379 aa, Artificial Sequence
  SARS-CoV-2/Hong Kong/case42_VM20002493/2020__EPI_ISL_414527 spike protein (1-1211)(K986P_V987P_P1069F) Ferritin construct
MFVFLVLLPLVSSQCVNLTTRTQLPPAYTNSFTRGVYYPDKVFRSSVLHSTQDLFLPFFSNVTWFHAIHVSGTNGTKRFDNPVLPFNDGVYFASTEKSNIIRGWIFGTTLDSKTQSLLIVNNATNVVIKVCEFQFCNDPFLGVYYHKNNKSWMESEFRVYSSANNCTFEYVSQPFLMDLEGKQGNFKNLREFVFKNIDGYFKIYSKHTPINLVRDLPQGFSALEPLVDLPIGINITRFQTLLALHRSYLTPGDSSSGWTAGAAAYYVGYLQPRTFLLKYNENGTITDAVDCALDPLSETKCTLKSFTVEKGIYQTSNFRVQPTESIVRFPNITNLCPFGEVFNATRFASVYAWNRKRISNCVADYSVLYNSASFSTFKCYGVSPTKLNDLCFTNVYADSFVIRGDEVRQIAPGQTGKIADYNYKLPDDFTGCVIAWNSNNLDSKVGGNYNYLYRLFRKSNLKPFERDISTEIYQAGSTPCNGVEGFNCYFPLQSYGFQPTNGVGYQPYRVVVLSFELLHAPATVCGPKKSTNLVKNKCVNFNFNGLTGTGVLTESNKKFLPFQQFGRDIADTTDAVRDPQTLEILDITPCSFGGVSVITPGTNTSNQVAVLYQDVNCTEVPVAIHADQLTPTWRVYSTGSNVFQTRAGCLIGAEHVNNSYECDIPIGAGICASYQTQTNSPRRARSVASQSIIAYTMSLGAENSVAYSNNSIAIPTNFAISVTTEILPVSMTKTSVDCTMYICGDSTECSNLLLQYGSFCTQLNRALTGIAVEQDKNTQEVFAQVKQIYKTPPIKDFGGFNFSQILPDPSKPSKRSFIEDLLFNKVTLADAGFIKQYGDCLGDIAARDLICAQKFNGLTVLPPLLTDEMIAQYTSALLAGTITSGWTFGAGAALQIPFAMQMAYRFNGIGVTQNVLYENQKLIANQFNSAIGKIQDSLSSTASALGKLQDVVNQNAQALNTLVKQLSSNFGAISSVLNDILSRLDPPEAEVQIDRLITGRLQSLQTYVTQQLIRAAEIRASANLAATKMSECVLGQSKRVDFCGKGYHLMSFPQSAPHGVVFLHVTYVFAQEKNFTTAPAICHDGKAHFPREGVFVSNGTHWFVTQRNFYEPQIITTDNTFVSGNCDVVIGIVNNTVYDPLQPELDSFKEELDKYFKNHTSPDVDLGDISGINASVVNIQKEIDRLNEVAKNLNESLIDLQELGKYEQYIKGGGGSDIIKLLNEQVNKEMQSSNLYMSMSSWCYTHSLDGAGLFLFDHAAEEYEHAKKLIIFLNENNVPVQLTSISAPEHKFEGLTQIFQKAYEHEQHISESINNIVDHAIKSKDHATFNFLQWYVAEQHEEEVLFKDILDKIELIGNENHGLYLADQYVKGIAKSRKS

SEQ ID NO: 4846 - protein, 1379 aa, Artificial Sequence
  SARS-CoV-2/USA/CruiseA-23/2020__EPI_ISL_414482 spike protein (1-1211)(K986P_V987P_P1069F) Ferritin construct
MFVFLVLLPLVSSQCVNLTTRTQLPPAYTNSFTRGVYYPDKVFRSSVLHSTQDLFLPFFSNVTWFHAIHVSGTNGTKRFDNPVLPFNDGVYFASTEKSNIIRGWIFGTTLDSKTQSLLIVNNATNVVIKVCEFQFCNDPFLGVYYHKNNKSWMESEFRVYSSANNCTFEYVSQPFLMDLEVKQGNFKNLREFVFKNIDGYFKIYSKHTPINLVRDLPQGFSALEPLVDLPIGINITRFQTLLALHRSYLTPGDSSSGWTAGAAAYYVGYLQPRTFLLKYNENGTITDAVDCALDPLSETKCTLKSFTVEKGIYQTSNFRVQPTESIVRFPNITNLCPFGEVFNATRFASVYAWNRKRISNCVADYSVLYNSASFSTFKCYGVSPTKLNDLCFTNVYADSFVIRGDEVRQIAPGQTGKIADYNYKLPDDFTGCVIAWNSNNLDSKVGGNYNYLYRLFRKSNLKPFERDISTEIYQAGSTPCNGVEGFNCYFPLQSYGFQPTNGVGYQPYRVVVLSFELLHAPATVCGPKKSTNLVKNKCVNFNFNGLTGTGVLTESNKKFLPFQQFGRDIADTTDAVRDPQTLEILDITPCSFGGVSVITPGTNTSNQVAVLYQDVNCTEVPVAIHADQLTPTWRVYSTGSNVFQTRAGCLIGAEHVNNSYECDIPIGAGICASYQTQTNSPRRARSVASQSIIAYTMSLGAENSVAYSNNSIAIPTNFTISVTTEILPVSMTKTSVDCTMYICGDSTECSNLLLQYGSFCTQLNRALTGIAVEQDKNTQEVFAQVKQIYKTPPIKDFGGFNFSQILPDPSKPSKRSFIEDLLFNKVTLADAGFIKQYGDCLGDIAARDLICAQKFNGLTVLPPLLTDEMIAQYTSALLAGTITSGWTFGAGAALQIPFAMQMAYRFNGIGVTQNVLYENQKLIANQFNSAIGKIQDSLSSTASALGKLQDVVNQNAQALNTLVKQLSSNFGAISSVLNDILSRLDPPEAEVQIDRLITGRLQSLQTYVTQQLIRAAEIRASANLAATKMSECVLGQSKRVDFCGKGYHLMSFPQSAPHGVVFLHVTYVFAQEKNFTTAPAICHDGKAHFPREGVFVSNGTHWFVTQRNFYEPQIITTDNTFVSGNCDVVIGIVNNTVYDPLQPELDSFKEELDKYFKNHTSPDVDLGDISGINASVVNIQKEIDRLNEVAKNLNESLIDLQELGKYEQYIKGGGGSDIIKLLNEQVNKEMQSSNLYMSMSSWCYTHSLDGAGLFLFDHAAEEYEHAKKLIIFLNENNVPVQLTSISAPEHKFEGLTQIFQKAYEHEQHISESINNIVDHAIKSKDHATFNFLQWYVAEQHEEEVLFKDILDKIELIGNENHGLYLADQYVKGIAKSRKS

SEQ ID NO: 4847 - protein, 1379 aa, Artificial Sequence
  SARS-CoV-2/Hong Kong/case85_VM20002868/2020__EPI_ISL_414519 spike protein (1-1211)(K986P_V987P_P1069F) Ferritin construct
MFVFLVLVPLVSSQCVNLTTRTQLPPAYTNSFTRGVYYPDKVFRSSVLHSTQDLFLPFFSNVTWFHAIHVSGTNGTKRFDNPVLPFNDGVYFASTEKSNIIRGWIFGTTLDSKTQSLLIVNNATNVVIKVCEFQFCNDPFLGVYYHKNNKSWMESEFRVYSSANNCTFEYVSQPFLMDLEGKQGNFKNLREFVFKNIDGYFKIYSKHTPINLVRDLPQGFSALEPLVDLPIGINITRFQTLLALHRSYLTPGDSSSGWTAGAAAYYVGYLQPRTFLLKYNENGTITDAVDCALDPLSETKCTLKSFTVEKGIYQTSNFRVQPTESIVRFPNITNLCPFGEVFNATRFASVYAWNRKRISNCVADYSVLYNSASFSTFKCYGVSPTKLNDLCFTNVYADSFVIRGDEVRQIAPGQTGKIADYNYKLPDDFTGCVIAWNSNNLDSKVGGNYNYLYRLFRKSNLKPFERDISTEIYQAGSTPCNGVEGFNCYFPLQSYGFQPTNGVGYQPYRVVVLSFELLHAPATVCGPKKSTNLVKNKCVNFNFNGLTGTGVLTESNKKFLPFQQFGRDIADTTDAVRDPQTLEILDITPCSFGGVSVITPGTNTSNQVAVLYQDVNCTEVPVAIHADQLTPTWRVYSTGSNVFQTRAGCLIGAEHVNNSYECDIPIGAGICASYQTQTNSPRRARSVASQSIIAYTMSLGAENSVAYSNNSIAIPTNFTISVTTEILPVSMTKTSVDCTMYICGDSTECSNLLLQYGSFCTQLNRALTGIAVEQDKNTQEVFAQVKQIYKTPPIKDFGGFNFSQILPDPSKPSKRSFIEDLLFNKVTLADAGFIKQYGDCLGDIAARDLICAQKFNGLTVLPPLLTDEMIAQYTSALLAGTITSGWTFGAGAALQIPFAMQMAYRFNGIGVTQNVLYENQKLIANQFNSAIGKIQDSLSSTASALGKLQDVVNQNAQALNTLVKQLSSNFGAISSVLNDILSRLDPPEAEVQIDRLITGRLQSLQTYVTQQLIRAAEIRASANLAATKMSECVLGQSKRVDFCGKGYHLMSFPQSAPHGVVFLHVTYVFAQEKNFTTAPAICHDGKAHFPREGVFVSNGTHWFVTQRNFYEPQIITTDNTFVSGNCDVVIGIVNNTVYDPLQPELDSFKEELDKYFKNHTSPDVDLGDISGINASVVNIQKEIDRLNEVAKNLNESLIDLQELGKYEQYIKGGGGSDIIKLLNEQVNKEMQSSNLYMSMSSWCYTHSLDGAGLFLFDHAAEEYEHAKKLIIFLNENNVPVQLTSISAPEHKFEGLTQIFQKAYEHEQHISESINNIVDHAIKSKDHATFNFLQWYVAEQHEEEVLFKDILDKIELIGNENHGLYLADQYVKGIAKSRKS

SEQ ID NO: 4848 - protein, 1379 aa, Artificial Sequence; identical to SEQ ID NO: 4838
  SARS-CoV-2/England/200990660/2020__EPI_ISL_414523 spike protein (1-1211)(K986P_V987P_P1069F) Ferritin construct

SEQ ID NO: 4849 - protein, 1379 aa, Artificial Sequence
  SARS-CoV-2/Australia/NSW09/2020__EPI_ISL_413595 spike protein (1-1211)(K986P_V987P_P1069F) Ferritin construct
MFVFLVLLPLVSSQCVNLTTRTQLPPAYTNSFTRGVYYPDKVFRSSVLHSTQDLFLPFFSNVTWFHAIHVSGTNGTKRFDNPVLPFNDGVYFASTEKSNIIRGWIFGTTLDSKTQSLLIVNNATNVVIKVCEFQFCNDPFLGVYYHKNNKSWMESEFRVYSSANNCTFEYVSQPFLMDLEGKQGNFKNLREFVFKNIDGYFKIYSKHTPINLVRDLPQGFSALEPLVDLPIGINITRFQTLLALHRSYLTPGDSSSGWTAGAAAYYVGYLQPRTFLLKYNENGTITDAVDCALDPLSETKCTLKSFTVEKGIYQTSNFRVQPTESIVRFPNITNLCPFGEVFNATRFASVYAWNRKRISNCVADYSVLYNSASFSTFKCYGVSPTKLNDLCFTNVYADSFVIRGDEVRQIAPGQTGKIADYNYKLPDDFTGCVIAWNSNNLDSKVGGNYNYLYRLFRKSNLKPFERDISTEIYQAGSTPCNGVEGFNCYFPLQSYGFQPTNGVGYQPYRVVVLSFELLHAPATVCGPKKSTNLVKNKCVNFNFNGLTGTGVLTESNKKFLPFQQFGRDIADTTDAVRDPQTLEILDITPCSFGGVSVITPGTNTSNQVAVLYQDVNCTEVPVAIHADQLTPTWRVYSTGSNVFQTRAGCLIGAEHVNNSYECDIPIGAGICASYQTQTNSPRRARSVASQSIIAYTMSLGAENSVAYSNNSIAIPTNFTISVTTEILPVSMTKTSVDCTMYICGDSTECSNLLLQYGSFCTQLNRALTGIAVEQDKNTQEVFAQVKQIYKTPPIKDFGGFNFSQILPDPSKPSKRSFIEDLLFNKVTLADAGFIKQYGDCLGDIAARDLICAQKFNGLTVLPPLLTDEMIAQYTSALLAGTITSGWTFGAGAALQIPFAMQMAYRFNGIGVTQNVLYENQKLIANQFNSAIGKIQDSLSFTASALGKLQDVVNQNAQALNTLVKQLSSNFGAISSVLNDILSRLDPPEAEVQIDRLITGRLQSLQTYVTQQLIRAAEIRASANLAATKMSECVLGQSKRVDFCGKGYHLMSFPQSAPHGVVFLHVTYVFAQEKNFTTAPAICHDGKAHFPREGVFVSNGTHWFVTQRNFYEPQIITTDNTFVSGNCDVVIGIVNNTVYDPLQPELDSFKEELDKYFKNHTSPDVDLGDISGINASVVNIQKEIDRLNEVAKNLNESLIDLQELGKYEQYIKGGGGSDIIKLLNEQVNKEMQSSNLYMSMSSWCYTHSLDGAGLFLFDHAAEEYEHAKKLIIFLNENNVPVQLTSISAPEHKFEGLTQIFQKAYEHEQHISESINNIVDHAIKSKDHATFNFLQWYVAEQHEEEVLFKDILDKIELIGNENHGLYLADQYVKGIAKSRKS

SEQ ID NO: 4850 - protein, 1379 aa, Artificial Sequence; identical to SEQ ID NO: 4830
  SARS-CoV-2/Australia/NSW10/2020__EPI_ISL_413596 spike protein (1-1211)(K986P_V987P_P1069F) Ferritin construct

SEQ ID NO: 4851 - protein, 1379 aa, Artificial Sequence
  SARS-CoV-2/Switzerland/1000477797/2020__EPI_ISL_413023 spike protein (1-1211)(K986P_V987P_P1069F) Ferritin construct
MFVFLVLLPLVSSQCVNLTTRTQLPPAYTNSFTRGVYYPDKVFRSSVLHSTQDLFLPFFSNVTWFHAIHVSGTNGTKRFDNPVLPFNDGVYFASTEKSNIIRGWIFGTTLDSKTQSLLIVNNATNVVIKVCEFQFCNDPFLGVYYHKNNKSWMESEFRVYSSANNCTFEYVSQPFLMDLEGKQGNFKNLREFVFKNIDGYFNIYSKHTPINLVRDLPQGFSALEPLVDLPIGINITRFQTLLALHRSYLTPGDSSSGWTAGAAAYYVGYLQPRTFLLKYNENGTITDAVDCALDPLSETKCTLKSFTVEKGIYQTSNFRVQPTESIVRFPNITNLCPFGEVFNATRFASVYAWNRKRISNCVADYSVLYNSASFSTFKCYGVSPTKLNDLCFTNVYADSFVIRGDEVRQIAPGQTGKIADYNYKLPDDFTGCVIAWNSNNLDSKVGGNYNYLYRLFRKSNLKPFERDISTEIYQAGSTPCNGVEGFNCYFPLQSYGFQPTNGVGYQPYRVVVLSFELLHAPATVCGPKKSTNLVKNKCVNFNFNGLTGTGVLTESNKKFLPFQQFGRDIADTTDAVRDPQTLEILDITPCSFGGVSVITPGTNTSNQVAVLYQGVNCTEVPVAIHADQLTPTWRVYSTGSNVFQTRAGCLIGAEHVNNSYECDIPIGAGICASYQTQTNSPRRARSVASQSIIAYTMSLGAENSVAYSNNSIAIPTNFTISVTTEILPVSMTKTSVDCTMYICGDSTECSNLLLQYGSFCTQLNRALTGIAVEQDKNTQEVFAQVKQIYKTPPIKDFGGFNFSQILPDPSKPSKRSFIEDLLFNKVTLADAGFIKQYGDCLGDIAARDLICAQKFNGLTVLPPLLTDEMIAQYTSALLAGTITSGWTFGAGAALQIPFAMQMAYRFNGIGVTQNVLYENQKLIANQFNSAIGKIQDSLSSTASALGKLQDVVNQNAQALNTLVKQLSSNFGAISSVLNDILSRLDPPEAEVQIDRLITGRLQSLQTYVTQQLIRAAEIRASANLAATKMSECVLGQSKRVDFCGKGYHLMSFPQSAPHGVVFLHVTYVFAQEKNFTTAPAICHDGKAHFPREGVFVSNGTHWFVTQRNFYEPQIITTDNTFVSGNCDVVIGIVNNTVYDPLQPELDSFKEELDKYFKNHTSPDVDLGDISGINASVVNIQKEIDRLNEVAKNLNESLIDLQELGKYEQYIKGGGGSDIIKLLNEQVNKEMQSSNLYMSMSSWCYTHSLDGAGLFLFDHAAEEYEHAKKLIIFLNENNVPVQLTSISAPEHKFEGLTQIFQKAYEHEQHISESINNIVDHAIKSKDHATFNFLQWYVAEQHEEEVLFKDILDKIELIGNENHGLYLADQYVKGIAKSRKS

SEQ ID NO: 4852 - protein, 1379 aa, Artificial Sequence
  SARS-CoV-2/Belgium/BA-02291/2020__EPI_ISL_415159 spike protein (1-1211)(K986P_V987P_P1069F) Ferritin construct
MFVFLVLLPLVSSQCVNLTTRTQLPPAYTNSFTRGVYYPDKVFRSSVLHSTQDLFLPFFSNVTWFHAIHVSGTNGTKRFDNPVLPFNDGVYFASTEKSNIIRGWIFGTTLDSKTQSLLIVNNATNVVIKVCEFQFCNDPFLGVYYHKNNKSWMESEFRVYSSANNCTFEYVSQPFLMDLEGKQGNFKNLREFVFKNIDGYFKIYSKHTPINLVRDLPQGFSALEPLVDLPIGINITRFQTLLALHRSYLTPGDSSSGWTAGAAAYYVGYLQPRTFLLKYNENGTITDAVDCALDPLSETKCTLKSFTVEKGIYQTSNFRVQPTESIVRFPNITNLCPFGEVFNATRFASVYAWNRKRISNCVADYSVLYNSASFSTFKCYGVSPTKLNDLCFTNVYADSFVIRGDEVRQIAPGQTGKIADYNYKLPDDFTGCVIAWNSNNLDSKVGGNYNYLYRLFRRSNLKPFERDISTEIYQAGSTPCNGVEGFNCYFPLQSYGFQPTNGVGYQPYRVVVLSFELLPAPATVCGPKKSTNLVKNKCVNFNFNGLTGTGVLTESNKKFLPFQQFGRDIADTTDAVRDPQTLEILDITPCSFGGVSVITPGTNTSNQVAVLYQGVNCTEVPVAIHADQLTPTWRVYSTGSNVFQTRAGCLIGAEHVNNSYECDIPIGAGICASYQTQTNSPRRARSVASQSIIAYTMSLGAENSVAYSNNSIAIPTNFTISVTTEILPVSMTKTSVDCTMYICGDSTECSNLLLQYGSFCTQLNRALTGIAVEQDKNTQEVFAQVKQIYKTPPIKDFGGFNFSQILPDPSKPSKRSFIEDLLFNKVTLADAGFIKQYGDCLGDIAARDLICAQKFNGLTVLPPLLTDEMIAQYTSALLAGTITSGWTFGAGAALQIPFAMQMAYRFNGIGVTQNVLYENQKLIANQFNSAIGKIQDSLSSAAPALGKLQDVVNQNAQALNTLVKQLSSNFGAISSVLNDILSRLDPPEAEVQIDRLITGRLQSLQTYVTQQLIRAAEIRASANLAATKMSECVLGQSKRVDFCGKGYHLMSFPQSAPHGVVFLHVTYVFAQEKNFTTAPAICHDGKAHFPREGVFVSNGTHWFVTQRNFYEPQIITTDNTFVSGNCDVVIGIVNNTVYDPLQPELDSFKEELDKYFKNHTSPDVDLGDISGINASVVNIQKEIDRLNEVAKNLNESLIDLQELGKYEQYIKGGGGSDIIKLLNEQVNKEMQSSNLYMSMSSWCYTHSLDGAGLFLFDHAAEEYEHAKKLIIFLNENNVPVQLTSISAPEHKFEGLTQIFQKAYEHEQHISESINNIVDHAIKSKDHATFNFLQWYVAEQHEEEVLFKDILDKIELIGNENHGLYLADQYVKGIAKSRKS

SEQ ID NO: 4853 - protein, 1379 aa, Artificial Sequence
  SARS-CoV-2/USA/WA8-UW5/2020__EPI_ISL_413486 spike protein (1-1211)(K986P_V987P_P1069F) Ferritin construct
MFVFLVLLPLVSSQCVNLTTRTQLPPAYTNSFTRGVYYPDKVFRSSVLHSTQDLFLPFFSNVTWFHAIHVSGTNGTKRFDNPVLPFNDGVYFASTEKSNIIRGWIFGTTLDSKTQSLLIVNNATNVVIKVCEFQFCNDPFLGVYYHKNNKSWMESEFRVYSSANNCTFEYVSQPFLMDLEGKQGNFKNLREFVFKNIDGYFKIYSKHTPINLVRDLPQGFSALEPLVDLPIGINITRFQTLLALHRSYLTPGDSSSGWTAGAAAYYVGYLQPRTFLLKYNENGTITDAVDCALDPLSETKCTLKSFTVEKGIYQTSNFRVQPTESIVRFPNITNLCPFGEVFNATRFASVYAWNRKRISNCVADYSVLYNSASFSTFKCYGVSPTKLNDLCFTNVYADSFVIRGDEVRQIAPGQTGKIADYNYKLPDDFTGCVIAWNSNNLDSKVGGNYNYLYRLFRKSNLKPFERDISTEIYQAGSTPCNGVEGFNCYFPLQSYGFQPTNGVGYQPYRVVVLSFELLHAPATVCGPKKSTNLVKNKCVNFNFNGLTGTGVLTESNKKFLPFQQFGRDIADTTDAVRDPQTLEILDITPCSFGGVSVITPGTNTSNQVAVLYQDVNCTEVPVAIHADQLTPTWRVYSTGSNVFQTRAGCLIGAEYVNNSYECDIPIGAGICASYQTQTNSPRRARSVASQSIIAYTMSLGAENSVAYSNNSIAIPTNFTISVTTEILPVSMTKTSVDCTMYICGDSTECSNLLLQYGSFCTQLNRALTGIAVEQDKNTQEVFAQVKQIYKTPPIKDFGGFNFSQILPDPSKPSKRSFIEDLLFNKVTLADAGFIKQYGDCLGDIAARDLICAQKFNGLTVLPPLLTDEMIAQYTSALLAGTITSGWTFGAGAALQIPFAMQMAYRFNGIGVTQNVLYENQKLIANQFNSAIGKIQDSLSSTASALGKLQDVVNQNAQALNTLVKQLSSNFGAISSVLNDILSRLDPPEAEVQIDRLITGRLQSLQTYVTQQLIRAAEIRASANLAATKMSECVLGQSKRVDFCGKGYHLMSFPQSAPHGVVFLHVTYVFAQEKNFTTAPAICHDGKAHFPREGVFVSNGTHWFVTQRNFYEPQIITTDNTFVSGNCDVVIGIVNNTVYDPLQPELDSFKEELDKYFKNHTSPDVDLGDISGINASVVNIQKEIDRLNEVAKNLNESLIDLQELGKYEQYIKGGGGSDIIKLLNEQVNKEMQSSNLYMSMSSWCYTHSLDGAGLFLFDHAAEEYEHAKKLIIFLNENNVPVQLTSISAPEHKFEGLTQIFQKAYEHEQHISESINNIVDHAIKSKDHATFNFLQWYVAEQHEEEVLFKDILDKIELIGNENHGLYLADQYVKGIAKSRKS

SEQ ID NO: 4854 - protein, 1379 aa, Artificial Sequence
  SARS-CoV-2/England/20102000506/2020__EPI_ISL_415147 spike protein (1-1211)(K986P_V987P_P1069F) Ferritin construct
MFVFLVLLPLVSSQCVNLTTRTQLPPAYTNSFTRGVYYPDKVFRSSVLHSTQDLFLPFFSNVTWFHAIHVSGTNGTKRFDNPVLPFNDGVYFASTEKSNIIRGWIFGTTLDSKTQSLLIVNNATNVVIKVCEFQFCNDPFLGVYYHKNNKSWMESEFRVYSSANNCTFEYVSQPFLMDLEGKQGNFKNLREFVFKNIDGYFKIYSKHTPINLVRDLPQGFSALEPLVDLPIGINITRFQTLLALHRSYLTPGDSSSGWTAGAAAYYVGYLQPRTFLLKYNENGTITDAVDCALDPLSETKCTLKSFTVEKGIYQTSNFRVQPTESIVRFPNITNLCPFGEVFNATRFASVYAWNRKRISNCVADYSVLYNSASFSTFKCYGVSPTKLNDLCFTNVYADSFVIRGDEVRQIAPGQTGKIADYNYKLPDDFTGCVIAWNSNNLDSKVGGNYNYLYRLFRKSNLKPFERDISTEIYQAGSTPCNGVEGFNCYFPLQSYGFQPTNGVGYQPYRVVVLSFELLHAPATVCGPKKSTNLVKNKCVNFNFNGLTGTGVLTESNKKFLPFQQFGRDIADTTDAVRDPQTLEILDITPCSFGGVSVITPGTNTSNQVAVLYQGVNCTEVPVAIHADQLTPTWRVYSTGSNVFQTRAGCLIGAEHVNNSYECDIPIGAGICASYQTQTNSPRRARSVASQSIIAYTMSLGAENSVAYSNNSIAIPTNFTISVTTEILPVSMTKTSVDCTMYICGDSTECSNLLLQYGSFCTQLNRALTGIAVEQDKNTQEVFAQVKQIYKTPPIKDFGGFNFSQILPDPSKPSKRSFIEDLLFNKVTLADAGFIKQYGYCLGDIAARDLICAQKFNGLTVLPPLLTDEMIAQYTSALLAGTITSGWTFGAGAALQIPFAMQMAYRFNGIGVTQNVLYENQKLIANQFNSAIGKIQDSLSSTASALGKLQDVVNQNAQALNTLVKQLSSNFGAISSVLNDILSRLDPPEAEVQIDRLITGRLQSLQTYVTQQLIRAAEIRASANLAATKMSECVLGQSKRVDFCGKGYHLMSFPQSAPHGVVFLHVTYVFAQEKNFTTAPAICHDGKAHFPREGVFVSNGTHWFVTQRNFYEPQIITTDNTFVSGNCDVVIGIVNNTVYDPLQPELDSFKEELDKYFKNHTSPDVDLGDISGINASVVNIQKEIDRLNEVAKNLNESLIDLQELGKYEQYIKGGGGSDIIKLLNEQVNKEMQSSNLYMSMSSWCYTHSLDGAGLFLFDHAAEEYEHAKKLIIFLNENNVPVQLTSISAPEHKFEGLTQIFQKAYEHEQHISESINNIVDHAIKSKDHATFNFLQWYVAEQHEEEVLFKDILDKIELIGNENHGLYLADQYVKGIAKSRKS

SEQ ID NO: 4855 - protein, 1379 aa, Artificial Sequence
  SARS-CoV-2/Belgium/VAG-03013/2020__EPI_ISL_415155 spike protein (1-1211)(K986P_V987P_P1069F) Ferritin construct
MFVFLVLLPLVSSQCVNLTTRTQLPPAYTNSFTRGVYYPDKVFRSSVLHSTQDLFLPFFSNVTWFHAIHVSGTNGTKRFDNPVLPFNDGVYFASTEKSNIIRGWIFGTTLDSKTQSLLIVNNATNVVIKVCEFQFCNDPFLGVYYHKNNKSWMESEFRVYSSANNCTFEYVSQPFLMDLEGKQGNFKNLREFVFKNIDGYFKIYSKHTPINLVRDLPQGFSALEPLVDLPIGINITRFQTLLALHRSYLTPGDSSSGWTAGAAAYYVGYLQPRTFLLKYNENGTITDAVDCALDPLSETKCTLKSFTVEKGIYQTSNFRVQPTESIVRFPNITNLCPFGEVFNATRFASVYAWNRKRISNCVADYSVLYNSASFSTFKCYGVSPTKLNDLCFTNVYADSFVIRGDEVRQIAPGQTGKIADYNYKLPDDFTGCVIAWNSNNLDSKVGGNYNYLYRLFRKSNLKPFERDISTEIYQAGSTPCNGVEGFNCYFPLQSYGFQPTNGVGYQPYRVVVLSFELLHAPATVCGPKKSTNLVKNKCVNFNFNGLTGTGVLTESNKKFLPFQQFGRDIADTTDAVRDPQTLEILDITPCSFGGVSVITPGTNTSNQVAVLYQGVNCTEVPVAIHADQLTPTWRVYSTGSNVFQTRAGCLIGAEHVNNSYECDIPIGAGICASYQTQTNSPRRARSVASQSIIAYTMSLGAENSVAYSNNSIAIPTNFTISVTTEILPVSMTKTSVDCTMYICGDSTECSNLLLQYGSFCTQLNRALTGIAVEQDKNTQEVFAQVKQIYKTPPIKDFGGFNFSQILPDPSKPSKRSFIEDLLFNKVTLADAGFIKQYGDCLGDIAARDLICAQKFNGLTVLPPLLTDEMIAQYTSALLAGTITSGWTFGAGAALQIPFAMQMAYRFNGIGVTQNVLYENQKLIANQFNSAIGKIQDSLSSTATALGKLQDVVNQNAQALNTLVKQLSSNFGAISSVLNDILSRLDPPEAEVQIDRLITGRLQSLQTYVTQQLIRAAEIRASANLAATKMSECVLGQSKRVDFCGKGYHLMSFPQSAPHGVVFLHVTYVFAQEKNFTTAPAICHDGKAHFPREGVFVSNGTHWFVTQRNFYEPQIITTDNTFVSGNCDVVIGIVNNTVYDPLQPELDSFKEELDKYFKNHTSPDVDLGDISGINASVVNIQKEIDRLNEVAKNLNESLIDLQELGKYEQYIKGGGGSDIIKLLNEQVNKEMQSSNLYMSMSSWCYTHSLDGAGLFLFDHAAEEYEHAKKLIIFLNENNVPVQLTSISAPEHKFEGLTQIFQKAYEHEQHISESINNIVDHAIKSKDHATFNFLQWYVAEQHEEEVLFKDILDKIELIGNENHGLYLADQYVKGIAKSRKS

SEQ ID NO: 4856 - protein, 1379 aa, Artificial Sequence
  SARS-CoV-2/Belgium/BC-03016/2020__EPI_ISL_415157 spike protein (1-1211)(K986P_V987P_P1069F) Ferritin construct
MFVFLVLLPLVSSQCVNLTTRTQLPPAYTNSFTRGVYYPDKVFRSSVLHSTQDLFLPFFSNVTWFHAIHVSGTNGTKRFDNPVLPFNDGVYFASTEKSNIIRGWIFGTTLDSKTQSLLIVNNATNVVIKVCEFQFCNDPFLGVYYHKNNKSWMESEFRVYSSANNCTFEYVSQPFLMDLEGKQGNFKNLREFVFKNIDGYFKIYSKHTPINLVRDLPQGFSALEPLVDLPIGINITRFQTLLALHRSYLTPGDSSSGWTAGAAAYYVGYLQPRTFLLKYNENGTITDAVDCALDPLSETKCTLKSFTVEKGIYQTSNFRVQPTESIVRFPNITNLCPFGEVFNATRFASVYAWNRKRISNCVADYSVLYNSASFSTFKCYGVSPTKLNDLCFTNVYADSFVIRGDEVRQIAPGQTGKIADYNYKLPDDFTGCVIAWNSNNLDSKVGGNYNYLYRLFRKSNLKPFERDISTEIYQAGSTPCNGVEGFNCYFPLQSYGFQPTNGVGYQPYRVVVLSFELLHAPATVCGPKKSTNLVKNKCVNFNFNGLTGTGVLTESNKKFLPFQQFGRDIADTTDAVRDPQTLEILDITPCSFGGVSVITPGTNTSNQVAVLYQGVNCTEVPVAIHADQLTPTWRVYSTGSNVFQTRAGCLIGAEHVNNSYECDIPIGAGICASYQTQTNSPRRARSVASQSIIAYTMSLGAENSVAYSNNSIAIPTNFTISVTTEILPVSMTKTSVDCTMYICGDSTECSNLLLQYGSFCTQLNRALTGIAVEQDKNTQEVFAQVKQIYKTPPIKDFGGFNFSQILPDPSKPSKRSFIEDLLFNKVTLADAGFIKQYGDCLGDIAARDLICAQKFNGLTVLPPLLTDEMIAQYTSALLAGTITSGWTFGAGAALQIPFAMQMAYRFNGIGVTQNVLYENQKLIANQFNSAIGKIQDSLSSTAPALGKLQDVVNQNAQALNTLVKQLSSNFGAISSVLNDILSRLDPPEAEVQIDRLITGRLQSLQTYVTQQLIRAAEIRASANLAATKMSECVLGQSKRVDFCGKGYHLMSFPQSAPHGVVFLHVTYVFAQEKNFTTAPAICHDGKAHFPREGVFVSNGTHWFVTQRNFYEPQIITTDNTFVSGNCDVVIGIVNNTVYDPLQPELDSFKEELDKYFKNHTSPDVDLGDISGINASVVNIQKEIDRLNEVAKNLNESLIDLQELGKYEQYIKGGGGSDIIKLLNEQVNKEMQSSNLYMSMSSWCYTHSLDGAGLFLFDHAAEEYEHAKKLIIFLNENNVPVQLTSISAPEHKFEGLTQIFQKAYEHEQHISESINNIVDHAIKSKDHATFNFLQWYVAEQHEEEVLFKDILDKIELIGNENHGLYLADQYVKGIAKSRKS

SEQ ID NO: 4857 - protein, 1379 aa, Artificial Sequence
  SARS-CoV-2/Germany/BavPat3/2020__EPI_ISL_414521 spike protein (1-1211)(K986P_V987P_P1069F) Ferritin construct
MFVFLVLLPLVSSQCVNLTTRTQLPPAYTNSFTRGVYYPDKVFRSSVLHSTQDLFLPFFSNVTWFHAIHVSGTNGTKRFDNPVLPFNDGVYFASTEKSNIIRGWIFGTTLDSKTQSLLIVNNATNVVIKVCEFQFCNDPFLGVYYHKNNKSWMESEFRVYSSANNCTFEYVSQPFLMDLEGKQGNFKNLREFVFKNIDGYFKIYSKHTPINLVRDLPQGFSALEPLVDLPIGINITRFQTLLALHRSYLTPGDSSSGWTAGAAAYYVGYLQPRTFLLKYNENGTITDAVDCALDPLSETKCTLKSFTVEKGIYQTSNFRVQPTESIVRFPNITNLCPFGEVFNATRFASVYAWNRKRISNCVADYSVLYNSASFSTFKCYGVSPTKLNDLCFTNVYADSFVIRGDEVRQIAPGQTGKIADYNYKLPDDFTGCVIAWNSNNLDSKVGGNYNYLYRLFRKSNLKPFERDISTEIYQAGSTPCNGVEGFNCYFPLQSYGFQPTNGVGYQPYRVVVLSFELLHAPATVCGPKKSTNLVKNKCVNFNFNGLTGTGVLTESNKKFLPFQQFGRDIADTTDAVRDPQTLEILDITPCSFGGVSVITPGTNTSNQVAVLYQDVNCTEVPVAIHADQLTPTWRVYSTGSNVFQTRAGCLIGAEHVNNSYECDIPIGAGICASYQTQTNSPRRARSVASQSIIAYTMSLGAENSVAYSNNSIAIPTNFTISVTTEILPVSMTKTSVDCTMYICGDSTECSNLLLQYGSFCTQLNRALTGIAVEQDKNTQQVFAQVKQIYKTPPIKDFGGFNFSQILPDPSKPSKRSFIEDLLFNKVTLADAGFIKQYGDCLGDIAARDLICAQKFNGLTVLPPLLTDEMIAQYTSALLAGTITSGWTFGAGAALQIPFAMQMAYRFNGIGVTQNVLYENQKLIANQFNSAIGKIQDSLSSTASALGKLQDVVNQNAQALNTLVKQLSSNFGAISSVLNDILSRLDPPEAEVQIDRLITGRLQSLQTYVTQQLIRAAEIRASANLAATKMSECVLGQSKRVDFCGKGYHLMSFPQSAPHGVVFLHVTYVFAQEKNFTTAPAICHDGKAHFPREGVFVSNGTHWFVTQRNFYEPQIITTDNTFVSGNCDVVIGIVNNTVYDPLQPELDSFKEELDKYFKNHTSPDVDLGDISGINASVVNIQKEIDRLNEVAKNLNESLIDLQELGKYEQYIKGGGGSDIIKLLNEQVNKEMQSSNLYMSMSSWCYTHSLDGAGLFLFDHAAEEYEHAKKLIIFLNENNVPVQLTSISAPEHKFEGLTQIFQKAYEHEQHISESINNIVDHAIKSKDHATFNFLQWYVAEQHEEEVLFKDILDKIELIGNENHGLYLADQYVKGIAKSRKS

SEQ ID NO: 4858 - protein, 1379 aa, Artificial Sequence
  SARS-CoV-2/France/HF1805/2020__EPI_ISL_414628 spike protein (1-1211)(K986P_V987P_P1069F) Ferritin construct
MFVFLVLLPLVSSQCVNLTTRTQLPPAYTNSFTRGVYYPDKVFRSSVLHSTQDLFLPFFSNVTWFHAIHVSGTNGTKRFDNPVLPFNDGVYFASTEKSNIIRGWIFGTTLDSKTQSLLIVNNATNVVIKVCEFQFCNDPFLGVYYHKNNKSWMESEFRVYSSANNCTFEYVSQPFLMDLEGKQGNFKNLREFVFKNIDGYFKIYSKHTPINLVRDLPQGFSALEPLVDLPIGINITRFQTLLALHRSYLTPGDSSSGWTAGAAAYYVGYLQPRTFLLKYNENGTITDAVDCALDPLSETKCTLKSFTVEKGIYQTSNFRVQPTESIVRFPNITNLCPFGEVFNATRFASVYAWNRKRISNCVADYSVLYNSASFSTFKCYGVSPTKLNDLCFTNVYADSFVIRGDEVRQIAPGQTGKIADYNYKLPDDFTGCVIAWNSNNLDSKVGGNYNYLYRLFRKSNLKPFERDISTEIYQAGSTPCNGVEGFNCYFPLQSYGFQPTNGVGYQPYRVVVLSFELLHAPATVCGPKKSTNLVKNKCVNFNFNGLTGTGVLTESNKKFLPFQQFGRDIADTTDAVRDPQTLEILDITPCSFGGVSVITPGTNTSNQVAVLYQGVNCTEVPVAIHADQLTPTWRVYSTGSNVFQTRAGCLIGAEHVNNSYECDIPIGAGICASYQTQTNSPRRARSVASQSIIAYTMSLGAENSVAYSNNSIAIPTNFTISVTTEILPVSMTKTSVDCTMYICGDSTECSNLLLQYGSFCTQLNRALTGIAVEQDKNTQEVFAQVKQIYKTPPIKDFGGFNFSQILPDPSKPSKRSFIEDLLFNKVTLADAGFIKQYGDCLGDIAARDLICAQKFNGLTVLPPLLTDEMIAQYTSALLAGTITSGWTFGAGAALQIPFAMQMAYRFNGIGVTQNVLYENQKLIANQFNSAIGKIQDSLSSTASALGKLQDVVNQNAQALNTLVKQLSSNFGAISSVLNDILSRLDPPEAEVQIDRLITGRLQSLQTYVTQQLIRAAEIRASANLAATKMSECVLGQSKRVDFCGKGYHLMSFPQSAPHGVVFLHVTYVFAQEKNFTTAPAICHDGKAHFPREGVFVSNGTHWFVTQRNFYEPQIITTDNTFVSGNCDVVIGVVNNTVYDPLQPELDSFKEELDKYFKNHTSPDVDLGDISGINASVVNIQKEIDRLNEVAKNLNESLIDLQELGKYEQYIKGGGGSDIIKLLNEQVNKEMQSSNLYMSMSSWCYTHSLDGAGLFLFDHAAEEYEHAKKLIIFLNENNVPVQLTSISAPEHKFEGLTQIFQKAYEHEQHISESINNIVDHAIKSKDHATFNFLQWYVAEQHEEEVLFKDILDKIELIGNENHGLYLADQYVKGIAKSRKS

SEQ ID NO: 4859 - protein, 1379 aa, Artificial Sequence
  SARS-CoV-2/Netherlands/ZuidHolland_9/2020__EPI_ISL_414445 spike protein (1-1211)(K986P_V987P_P1069F) Ferritin construct
MFVFLVLLPLVSSQCVNLTTRTQLPPAYTNSFTRGVYYPDKVFRSSVLHSTQDLFLPFFSNVTWFHAIHVSGTNGTKRFDNPVLPFNDGVYFASTEKSNIIRGWIFGTTLDSKTQSLLIVNNATNVVIKVCEFQFCNDPFLGVYYHKNNKSWMESEFRVYSSANNCTFEYVSQPFLMDLEGKQGNFKNLREFVFKNIDGYFKIYSKHTPINLVRDLPQGFSALEPLVDLPIGINITRFQTLLALHRSYLTPGDSSSGWTAGAAAYYVGYLQPRTFLLKYNENGTITDAVDCALDPLSETKCTLKSFTVEKGIYQTSNFRVQPTESIVRFPNITNLCPFGEVFNATRFASVYAWNRKRISNCVADYSVLYNSASFSTFKCYGVSPTKLNDLCFTNVYADSFVIRGDEVRQIAPGQTGKIADYNYKLPDDFTGCVIAWNSNNLDSKVGGNYNYLYRLFRKSNLKPFERDISTEIYQAGSTPCNGVEGFNCYFPLQSYGFQPTNGVGYQPYRVVVLSFELLHAPATVCGPKKSTNLVKNKCVNFNFNGLTGTGVLTESNKKFLPFQQFGRDIADTTDAVRDPQTLEILDITPCSFGGVSVITPGTNTSNQVAVLYQGVNCTEVPVAIHADQLTPTWRVYSTGSNVFQTRAGCLIGAEHVNNSYECDIPIGAGICASYQTQTNSPRRARSVASQSIIAYTMSLGAENSVAYSNNSIAIPTNFTISVTTEILPVSMTKTSVDCTMYICGDSTECSNLLLQYGSFCTQLNRALTGIAVEQDKNTQEVFAQVKQIYKTPPIKDFGGFNFSQILPDPSKPSKRSFIEDLLFNKVTLADAGFIKQYGDCLGDIAARDLICVQKFNGLTVLPPLLTDEMIAQYTSALLAGTITSGWTFGAGAALQIPFAMQMAYRFNGIGVTQNVLYENQKLIANQFNSAIGKIQDSLSSTASALGKLQDVVNQNAQALNTLVKQLSSNFGAISSVLNDILSRLDPPEAEVQIDRLITGRLQSLQTYVTQQLIRAAEIRASANLAATKMSECVLGQSKRVDFCGKGYHLMSFPQSAPHGVVFLHVTYVFAQEKNFTTAPAICHDGKAHFPREGVFVSNGTHWFVTQRNFYEPQIITTDNTFVSGNCDVVIGIVNNTVYDPLQPELDSFKEELDKYFKNHTSPDVDLGDISGINASVVNIQKEIDRLNEVAKNLNESLIDLQELGKYEQYIKGGGGSDIIKLLNEQVNKEMQSSNLYMSMSSWCYTHSLDGAGLFLFDHAAEEYEHAKKLIIFLNENNVPVQLTSISAPEHKFEGLTQIFQKAYEHEQHISESINNIVDHAIKSKDHATFNFLQWYVAEQHEEEVLFKDILDKIELIGNENHGLYLADQYVKGIAKSRKS

SEQ ID NO: 4860 - protein, 1379 aa, Artificial Sequence
  SARS-CoV-2/Finland/FIN03032020A/2020__EPI_ISL_413602 spike protein (1-1211)(K986P_V987P_P1069F) Ferritin construct
MFVFLVLLPLVSSQCVNLTTRTQLPPAYTNSFTRGVYYPDKVFRSSVLHSTQDLFLPFFSNVTWFHAIHVSGTNGTKRFDNPVLPFNDGVYFASTEKSNIIRGWIFGTTLDSKTQSLLIVNNATNVVIKVCEFQFCNDPFLGVYYHKNNKSWMESEFRVYSSANNCTFEYVSQPFLMDLEGKQGNFKNLREFVFKNIDGYFKIYSKHTPINLVRDLPQGFSALEPLVDLPIGINITRFQTLLALHRSYLTPGDSSSGWTAGAAAYYVGYLQPRTFLLKYNENGTITDAVDCALDPLSETKCTLKSFTVEKGIYQTSNFRVQPTESIVRFPNITNLCPFGEVFNATRFASVYAWNRKRISNCVADYSVLYNSASFSTFKCYGVSPTKLNDLCFTNVYADSFVIRGDEVRQIAPGQTGKIADYNYKLPDDFTGCVISWNSNNLDSKVGGNYNYLYRLFRKSNLKPFERDISTEIYQAGSTPCNGVEGFNCYFPLQSYGFQPTNGVGYQPYRVVVLSFELLHAPATVCGPKKSTNLVKNKCVNFNFNGLTGTGVLTESNKKFLPFQQFGRDIADTTDAVRDPQTLEILDITPCSFGGVSVITPGTNTSNQVAVLYQGVNCTEVPVAIHADQLTPTWRVYSTGSNVFQTRAGCLIGAEHVNNSYECDIPIGAGICASYQTQTNSPRRARSVASQSIIAYTMSLGAENSVAYSNNSIAIPTNFTISVTTEILPVSMTKTSVDCTMYICGDSTECSNLLLQYGSFCTQLNRALTGIAVEQDKNTQEVFAQVKQIYKTPPIKDFGGFNFSQILPDPSKPSKRSFIEDLLFNKVTLADAGFIKQYGDCLGDIAARDLICAQKFNGLTVLPPLLTDEMIAQYTSALLAGTITSGWTFGAGAALQIPFAMQMAYRFNGIGVTQNVLYENQKLIANQFNSAIGKIQDSLSSTASALGKLQDVVNQNAQALNTLVKQLSSNFGAISSVLNDILSRLDPPEAEVQIDRLITGRLQSLQTYVTQQLIRAAEIRASANLAATKMSECVLGQSKRVDFCGKGYHLMSFPQSAPHGVVFLHVTYVFAQEKNFTTAPAICHDGKAHFPREGVFVSNGTHWFVTQRNFYEPQIITTDNTFVSGNCDVVIGIVNNTVYDPLQPELDSFKEELDKYFKNHTSPDVDLGDISGINASVVNIQKEIDRLNEVAKNLNESLIDLQELGKYEQYIKGGGGSDIIKLLNEQVNKEMQSSNLYMSMSSWCYTHSLDGAGLFLFDHAAEEYEHAKKLIIFLNENNVPVQLTSISAPEHKFEGLTQIFQKAYEHEQHISESINNIVDHAIKSKDHATFNFLQWYVAEQHEEEVLFKDILDKIELIGNENHGLYLADQYVKGIAKSRKS

SEQ ID NO: 4861 - protein, 1379 aa, Artificial Sequence
  SARS-CoV-2/France/GE1977/2020__EPI_ISL_414632 spike protein (1-1211)(K986P_V987P_P1069F) Ferritin construct
MFVFLVLLPLVSSQCVNLTTRTQLPPAYTNSFTRGVYYPDKVFRSSVLHSTQDLFLPFFSNVTWFHAIHVSGTNGTKRFDNPVLPFNDGVYFASTEKSNIIRGWIFGTTLDSKTQSLLIVNNATNVVIKVCEFQFCNDPFLGVYYHKNNKSWMESEFRVYSSANNCTFEYVSQPFLMDLEGKQGNFKNLREFVFKNIDGYFKIYSKHTPINLVRDLPQGFSALEPLVDLPIGINITRFQTLLALHRSYLTPGDSSSGWTAGAAAYYVGYLQPRTFLLKYNENGTITDAVDCALDPLSETKCTLKSFTVEKGIYQTSNFRVQPTESIVRFPNITNLCPFGEVFNATRFASVYAWNRKRISNCVADYSVLYNSASFSTFKCYGVSPTKLNDLCFTNVYADSFVIRGDEVRQIAPGQTGKIADYNYKLPDDFTGCVIAWNSNNLDSKVGGNYNYLYRLFRKSNLKPFERDISTEIYQAGSTPCNGVEGFNCYFPLQSYGFQPTNGVGYQPYRVVVLSFELLHAPATVCGPKKSTNLVKNKCVNFNFNGLTGTGVLTESNKKFLPFQQFGRDIADTTDAVRDPQTLEILDITPCSFGGVSVITPGTNTSNQVAVLYQGVNCTEVPVAIHADQLTPTWRVYSTGSNVFQTRAGCLIGAEHVNNSYECDIPIGAGICASYQTQTNSPRRARSVASQSIIAYTMSLGAENSVAYSNNSIAIPTNFTISVTTEILPVSMTKTSVDCTMYICGDSTECSNLLLQYGSFCTQLNRALTGIAVEQDKNTQEVFAQVKQIYKTPPIKDFGGFNFSQILPDPSKPSKRSFIEDLLFNKVTLADAGFIKQYGDCLGDIAARDLICAQKFNGLTVLPPLLTDEMIAQYTSALLAGTITSGWTFGAGAALQIPFAMQMAYRFNGIGVTQNVLYENQKLIANQFNSAIGKIQDSLFSTASALGKLQDVVNQNAQALNTLVKQLSSNFGAISSVLNDILSRLDPPEAEVQIDRLITGRLQSLQTYVTQQLIRAAEIRASANLAATKMSECVLGQSKRVDFCGKGYHLMSFPQSAPHGVVFLHVTYVFAQEKNFTTAPAICHDGKAHFPREGVFVSNGTHWFVTQRNFYEPQIITTDNTFVSGNCDVVIGIVNNTVYDPLQPELDSFKEELDKYFKNHTSPDVDLGDISGINASVVNIQKEIDRLNEVAKNLNESLIDLQELGKYEQYIKGGGGSDIIKLLNEQVNKEMQSSNLYMSMSSWCYTHSLDGAGLFLFDHAAEEYEHAKKLIIFLNENNVPVQLTSISAPEHKFEGLTQIFQKAYEHEQHISESINNIVDHAIKSKDHATFNFLQWYVAEQHEEEVLFKDILDKIELIGNENHGLYLADQYVKGIAKSRKS

SEQ ID NO: 4862 - protein, 1379 aa, Artificial Sequence
  SARS-CoV-2/Finland/FIN-313/2020__EPI_ISL_414641 spike protein (1-1211)(K986P_V987P_P1069F) Ferritin construct
MFVFLVLLPLVSSQCVNLTTRTQLPPAYTNSFTRGVYYPDKVFRSSVLHSTQDLFLPFFSNVTWFHAIHVSGTNGTKRFDNPVLPFNDGVYFASTEKSNIIRGWIFGTTLDSKTQSLLIVNNATNVVIKVCEFQFCNDPFLGVYYHKNNKSWMESEFRVYSSANNCTFEYVSQPFLMDLEGKQGNFKNLREFVFKNIDGYFKIYSKHTPINLVRDLPQGFSALEPLVDLPIGINITRFKTLLALHRSYLTPGDSSSGWTAGAAAYYVGYLQPRTFLLKYNENGTITDAVDCALDPLSETKCTLKSFTVEKGIYQTSNFRVQPTESIVRFPNITNLCPFGEVFNATRFASVYAWNRKRISNCVADYSVLYNSASFSTFKCYGVSPTKLNDLCFTNVYADSFVIRGDEVRQIAPGQTGKIADYNYKLPDDFTGCVIAWNSNNLDSKVGGNYNYLYRLFRKSNLKPFERDISTEIYQAGSTPCNGVEGFNCYFPLQSYGFQPTNGVGYQPYRVVVLSFELLHAPATVCGPKKSTNLVKNKCVNFNFNGLTGTGVLTESNKKFLPFQQFGRDIADTTDAVRDPQTLEILDITPCSFGGVSVITPGTNTSNQVAVLYQGVNCTEVPVAIHADQLTPTWRVYSTGSNVFQTRAGCLIGAEHVNNSYECDIPIGAGICASYQTQTNSPRRARSVASQSIIAYTMSLGAENSVAYSNNSIAIPTNFTISVTTEILPVSMTKTSVDCTMYICGDSTECSNLLLQYGSFCTQLNRALTGIAVEQDKNTQEVFAQVKQIYKTPPIKDFGGFNFSQILPDPSKPSKRSFIEDLLFNKVTLADAGFIKQYGDCLGDIAARDLICAQKFNGLTVLPPLLTDEMIAQYTSALLAGTITSGWTFGAGAALQIPFAMQMAYRFNGIGVTQNVLYENQKLIANQFNSAIGKIQDSLSSTASALGKLQDVVNQNAQALNTLVKQLSSNFGAISSVLNDILSRLDPPEAEVQIDRLITGRLQSLQTYVTQQLIRAAEIRASANLAATKMSECVLGQSKRVDFCGKGYHLMSFPQSAPHGVVFLHVTYVFAQEKNFTTAPAICHDGKAHFPREGVFVSNGTHWFVTQRNFYEPQIITTDNTFVSGNCDVVIGIVNNTVYDPLQPELDSFKEELDKYFKNHTSPDVDLGDISGINASVVNIQKEIDRLNEVAKNLNESLIDLQELGKYEQYIKGGGGSDIIKLLNEQVNKEMQSSNLYMSMSSWCYTHSLDGAGLFLFDHAAEEYEHAKKLIIFLNENNVPVQLTSISAPEHKFEGLTQIFQKAYEHEQHISESINNIVDHAIKSKDHATFNFLQWYVAEQHEEEVLFKDILDKIELIGNENHGLYLADQYVKGIAKSRKS

SEQ ID NO: 4863 - protein, 1379 aa, Artificial Sequence
  SARS-CoV-2/Netherlands/ZuidHolland_2/2020__EPI_ISL_414556 spike protein (1-1211)(K986P_V987P_P1069F) Ferritin construct
MFVFLVLLPLVSSQCVNLTTRTQLPPAYTNSFTRGVYYPDKVFRSSVLHSTQDLFLPFFSNVTWFHAIHVSGTNGTKRFDNPVLPFNDGVYFASTEKSNIIRGWIFGTTLDSKTQSLLIVNNATNVVIKVCEFQFCNDPFLGVYYHKNNKSWMESEFRVYSSANNCTFEYVSQPFLMDLEGKQGNFKNLREFVFKNIDGYFKIYSKHTPINLVRDLPQGFSALEPLVDLPIGINITRFQTLLALHRSYLTPGDSSSGWTAGAAAYYVGYLQPRTFLLKYNENGTITDAVDCALDPLSETKCTLKSFTVEKGIYQTSNFRVQPTESIVRFPNITNLCPFGEVFNATRFASVYAWNRKRISNCVADYSVLYNSASFSTFKCYGVSPTKLNDLCFTNVYADSFVIRGDEVRQIAPGQTGKIADYNYKLPDDFTGCVIAWNSNNLDSKVGGNYNYLYRLFRKSNLKPFERDISTEIYQAGSTPCNGVEGFNCYFPLQSYGFQPTNGVGYQPYRVVVLSFELLHAPATVCGPKKSTNLVKNKCVNFNFNGLTGTGVLTESNKKFLPFQQFGRDIADTTDAVRDPQTLEILDITPCSFGGVSVITPGTNTSNQVAVLYQGVNCTEVPVAIHADQLTPTWRVYSTGSNVFQTRAGCLIGAEHVNNSYECDIPIGAGICASYQTQTNSPRRARSVASQSIIAYTMSLGAENSVAYSNNSIAIPTNFTISVTTEILPVSMTKTSVDCTMYICGDSTECSNLLLQYGSFCTQLNRALTGIALEQDKNTQEVFAQVKQIYKTPPIKDFGGFNFSQILPDPSKPSKRSFIEDLLFNKVTLADAGFIKQYGDCLGDIAARDLICAQKFNGLTVLPPLLTDEMIAQYTSALLAGTITSGWTFGAGAALQIPFAMQMAYRFNGIGVTQNVLYENQKLIANQFNSAIGKIQDSLSSTASALGKLQDVVNQNAQALNTLVKQLSSNFGAISSVLNDILSRLDPPEAEVQIDRLITGRLQSLQTYVTQQLIRAAEIRASANLAATKMSECVLGQSKRVDFCGKGYHLMSFPQSAPHGVVFLHVTYVFAQEKNFTTAPAICHDGKAHFPREGVFVSNGTHWFVTQRNFYEPQIITTDNTFVSGNCDVVIGIVNNTVYDPLQPELDSFKEELDKYFKNHTSPDVDLGDISGINASVVNIQKEIDRLNEVAKNLNESLIDLQELGKYEQYIKGGGGSDIIKLLNEQVNKEMQSSNLYMSMSSWCYTHSLDGAGLFLFDHAAEEYEHAKKLIIFLNENNVPVQLTSISAPEHKFEGLTQIFQKAYEHEQHISESINNIVDHAIKSKDHATFNFLQWYVAEQHEEEVLFKDILDKIELIGNENHGLYLADQYVKGIAKSRKS

SEQ ID NO: 4864 - protein, 1379 aa, Artificial Sequence
  SARS-CoV-2/USA/WA-UW31/2020__EPI_ISL_414618 spike protein (1-1211)(K986P_V987P_P1069F) Ferritin construct
MFVFLVLLPLVSSQCVNLTTRTQLPPAYTNSFTRGVYYPDKVFRSSVLHSTQDLFLPFFSNVTWFHAIHVSGTNGTKRFDNPVLPFNDGVYFASTEKSNIIRGWIFGTTLDSKTQSLLIVNNATNVVIKVCEFQFCNDPFLGVYYHKNNKSWMESEFRVYSSANNCTFEYVSQPFLMDLEGKQGNFKNLREFVFKNIDGYFKIYSKHTPINLVRDLPQGFSALEPLVDLPIGINITRFQTLLALHRSYLTPGDSSSGWTAGAAAYYVGYLQPRTFLLKYNENGTITDAVDCALDPLSETKCTLKSFTVEKGIYQTSNFRVQPTESIVRFPNITNLCPFGEVFNATRFASVYAWNRKRISNCVADYSVLYNSASFSTFKCYGVSPTKLNDLCFTNVYADSFVIRGDEVRQIAPGQTGKIADYNYKLPDDFTGCVIAWNSNNLDSKVGGNYNYLYRLFRKSNLKPFERDISTEIYQAGSTPCNGAEGFNCYFPLQSYGFQPTNGVGYQPYRVVVLSFELLHAPATVCGPKKSTNLVKNKCVNFNFNGLTGTGVLTESNKKFLPFQQFGRDIADTTDAVRDPQTLEILDITPCSFGGVSVITPGTNTSNQVAVLYQDVNCTEVPVAIHADQLTPTWRVYSTGSNVFQTRAGCLIGAEHVNNSYECDIPIGAGICASYQTQTNSPRRARSVASQSIIAYTMSLGAENSVAYSNNSIAIPTNFTISVTTEILPVSMTKTSVDCTMYICGDSTECSNLLLQYGSFCTQLNRALTGIAVEQDKNTQEVFAQVKQIYKTPPIKDFGGFNFSQILPDPSKPSKRSFIEDLLFNKVTLADAGFIKQYGDCLGDIAARDLICAQKFNGLTVLPPLLTDEMIAQYTSALLAGTITSGWTFGAGAALQIPFAMQMAYRFNGIGVTQNVLYENQKLIANQFNSAIGKIQDSLSSTASALGKLQDVVNQNAQALNTLVKQLSSNFGAISSVLNDILSRLDPPEAEVQIDRLITGRLQSLQTYVTQQLIRAAEIRASANLAATKMSECVLGQSKRVDFCGKGYHLMSFPQSAPHGVVFLHVTYVFAQEKNFTTAPAICHDGKAHFPREGVFVSNGTHWFVTQRNFYEPQIITTDNTFVSGNCDVVIGIVNNTVYDPLQPELDSFKEELDKYFKNHTSPDVDLGDISGINASVVNIQKEIDRLNEVAKNLNESLIDLQELGKYEQYIKGGGGSDIIKLLNEQVNKEMQSSNLYMSMSSWCYTHSLDGAGLFLFDHAAEEYEHAKKLIIFLNENNVPVQLTSISAPEHKFEGLTQIFQKAYEHEQHISESINNIVDHAIKSKDHATFNFLQWYVAEQHEEEVLFKDILDKIELIGNENHGLYLADQYVKGIAKSRKS

SEQ ID NO: 4865 - protein, 1379 aa, Artificial Sequence
  SARS-CoV-2/South Korea/SNU01/2020__EPI_ISL_411929 spike protein (1-1211)(K986P_V987P_P1069F) Ferritin construct
MFVFLVLLPLVSSQCVNLTTRTQLPPAYTNSFTRGVYYPDKVFRSSVLHSTQDLFLPFFSNVTWFHAIHVSGTNGTKRFDNPVLPFNDGVYFASTEKSNIIRGWIFGTTLDSKTQSLLIVNNATNVVIKVCEFQFCNDPFLGVYYHKNNKSWMESEFRVYSSANNCTFEYVSQPFLMDLEGKQGNFKNLREFVFKNIDGYFKIYSKHTPINLVRDLPQGFWALEPLVDLPIGINITRFQTLLALHRSYLTPGDSSSGWTAGAAAYYVGYLQPRTFLLKYNENGTITDAVDCALDPLSETKCTLKSFTVEKGIYQTSNFRVQPTESIVRFPNITNLCPFGEVFNATRFASVYAWNRKRISNCVADYSVLYNSASFSTFKCYGVSPTKLNDLCFTNVYADSFVIRGDEVRQIAPGQTGKIADYNYKLPDDFTGCVIAWNSNNLDSKVGGNYNYLYRLFRKSNLKPFERDISTEIYQAGSTPCNGVEGFNCYFPLQSYGFQPTNGVGYQPYRVVVLSFELLHAPATVCGPKKSTNLVKNKCVNFNFNGLTGTGVLTESNKKFLPFQQFGRDIADTTDAVRDPQTLEILDITPCSFGGVSVITPGTNTSNQVAVLYQDVNCTEVPVAIHADQLTPTWRVYSTGSNVFQTRAGCLIGAEHVNNSYECDIPIGAGICASYQTQTNSPRRARSVASQSIIAYTMSLGAENSVAYSNNSIAIPTNFTISVTTEILPVSMTKTSVDCTMYICGDSTECSNLLLQYGSFCTQLNRALTGIAVEQDKNTQEVFAQVKQIYKTPPIKDFGGFNFSQILPDPSKPSKRSFIEDLLFNKVTLADAGFIKQYGDCLGDIAARDLICAQKFNGLTVLPPLLTDEMIAQYTSALLAGTITSGWTFGAGAALQIPFAMQMAYRFNGIGVTQNVLYENQKLIANQFNSAIGKIQDSLSSTASALGKLQDVVNQNAQALNTLVKQLSSNFGAISSVLNDILSRLDPPEAEVQIDRLITGRLQSLQTYVTQQLIRAAEIRASANLAATKMSECVLGQSKRVDFCGKGYHLMSFPQSAPHGVVFLHVTYVFAQEKNFTTAPAICHDGKAHFPREGVFVSNGTHWFVTQRNFYEPQIITTDNTFVSGNCDVVIGIVNNTVYDPLQPELDSFKEELDKYFKNHTSPDVDLGDISGINASVVNIQKEIDRLNEVAKNLNESLIDLQELGKYEQYIKGGGGSDIIKLLNEQVNKEMQSSNLYMSMSSWCYTHSLDGAGLFLFDHAAEEYEHAKKLIIFLNENNVPVQLTSISAPEHKFEGLTQIFQKAYEHEQHISESINNIVDHAIKSKDHATFNFLQWYVAEQHEEEVLFKDILDKIELIGNENHGLYLADQYVKGIAKSRKS

SEQ ID NO: 4866 - protein, 1379 aa, Artificial Sequence
  SARS-CoV-2/China/WF0004/2020__EPI_ISL_413694 spike protein (1-1211)(K986P_V987P_P1069F) Ferritin construct
MFVFLVLLPLVSSQCVNLTTRTQLPPAYTNSFTRGVYYPDKVFRSSVLHSTQDLFLPFFSNVTWFHAIHVSGTNGTKRFDNPVLPFNDGVYFASTEKSNIIRGWIFGTTLDSKTQSLLIVNNATNVVIKVCEFQFCNDPFLGVYYHKNNKSWTESEFRVYSSANNCTFEYVSQPFLMDLEGKQGNFKNLREFVFKNIDGYFKIYSKHTPINLVRDLPQGFSALEPLVDLPIGINITRFQTLLALHRSYLTPGDSSSGWTAGAAAYYVGYLQPRTFLLKYNENGTITDAVDCALDPLSETKCTLKSFTVEKGIYQTSNFRVQPTESIVRFPNITNLCPFGEVFNATRFASVYAWNRKRISNCVADYSVLYNSASFSTFKCYGVSPTKLNDLCFTNVYADSFVIRGDEVRQIAPGQTGKIADYNYKLPDDFTGCVIAWNSNNLDSKVGGNYNYLYRLFRKSNLKPFERDISTEIYQAGSTPCNGVEGFNCYFPLQSYGFQPTNGVGYQPYRVVVLSFELLHAPATVCGPKKSTNLVKNKCVNFNFNGLTGTGVLTESNKKFLPFQQFGRDIADTTDAVRDPQTLEILDITPCSFGGVSVITPGTNTSNQVAVLYQDVNCTEVPVAIHADQLTPTWRVYSTGSNVFQTRAGCLIGAEHVNNSYECDIPIGAGICASYQTQTNSPRRARSVASQSIIAYTMSLGAENSVAYSNNSIAIPTNFTISVTTEILPVSMTKTSVDCTMYICGDSTECSNLLLQYGSFCTQLNRALTGIAVEQDKNTQEVFAQVKQIYKTPPIKDFGGFNFSQILPDPSKPSKRSFIEDLLFNKVTLADAGFIKQYGDCLGDIAARDLICAQKFNGLTVLPPLLTDEMIAQYTSALLAGTITSGWTFGAGAALQIPFAMQMAYRFNGIGVTQNVLYENQKLIANQFNSAIGKIQDSLSSTASALGKLQDVVNQNAQALNTLVKQLSSNFGAISSVLNDILSRLDPPEAEVQIDRLITGRLQSLQTYVTQQLIRAAEIRASANLAATKMSECVLGQSKRFDFCGKGYHLMSFPQSAPHGVVFLHVTYVFAQEKNFTTAPAICHDGKAHFPREGVFVSNGTHWFVTQRNFYEPQIITTDNTFVSGNCDVVIGIVNNTVYDPLQPELDSFKEELDKYFKNHTSPDVDLGDISGINASVVNIQKEIDRLNEVAKNLNESLIDLQELGKYEQYIKGGGGSDIIKLLNEQVNKEMQSSNLYMSMSSWCYTHSLDGAGLFLFDHAAEEYEHAKKLIIFLNENNVPVQLTSISAPEHKFEGLTQIFQKAYEHEQHISESINNIVDHAIKSKDHATFNFLQWYVAEQHEEEVLFKDILDKIELIGNENHGLYLADQYVKGIAKSRKS

SEQ ID NO: 4867 - protein, 1379 aa, Artificial Sequence
  SARS-CoV-2/China/WF0028/2020__EPI_ISL_413791 spike protein (1-1211)(K986P_V987P_P1069F) Ferritin construct
MFVFLVLLPLVSSQCVNLTTRTQLPPAYTNSFTRGVYYPDKVFRSSVLHSTQDLFLPFFSNVTWFHAIHVSGTNGTKRFDNPVLPFNDGVYFASTEKSNIIRGWIFGTTLDSKTQSLLIVNNATNVVIKVCEFQFCNDPFLGVYYHKNNKSWMESEFRVYSSANNCTFEYVSQPFLMDLEGKQGNFKNLREFVFKNIDGYFKIYSKHTPINLVRDLPQGFSALEPLVDLPIGINITRFQTLLALHRSYLTPGDSSSGWTAGAAAYYVGYLQPRTFLLKYNENGTITDAVDCALDPLSETKCTLKSFTVEKGIYQTSNFRVQPTESIVRFPNITNLCPFGEVFNATRFASVYAWNRKRISNCVADYSVLYNSASFSTFKCYGVSPTKLNDLCFTNVYADSFVIRGDEVRQIAPGQTGKIADYNYKLPDDFTGCVIAWNSNNLDSKVGGNYNYLYRLFRKSNLKPFERDISTEIYQAGSTPCNGVEGFNCYFPLQSYGFQPTNGVGYQPYRVVVLSFELLHAPATVCGPKKSTNLVKNKCVNFNFNGLTGTGVLTESNKKFLPFQQFGRDIADTTDAVRDPQTLEILDITPCSFGGVSVITPGTNTSNQVAVLYQDVNCTEVPVAIHADQLTPTWRVYSTGSNVFQTRAGCLIGAEHVNNSYECDIPIGAGICASYQTQTNSPRRARSVASQSIIAYTMSLGAENSVAYSNNSIAIPTNFTISVTTEILPVSMTKTSVDCTMYICGDSTECSNLLLQYGSFCTQLNRALTGIAVEQDKNTQEVFAQVKQIYKTPPIKDFGGFNFSQILPDPSKPSKRSFIEDLLFNKVTLADAGFIKQYGDCLGDIAARDLICAQKFNGLTVLPPLLTDEMIAQYTSALLAGTITSGWTFGAGAALQIPFAMQMAYRFNGIGVTQNVLYENQKLIANQFNSAIGKIQDSLSSTASALGKLQDVVNQNAQALNTLVKQLSSNFGAISSVLNDILSRLDPPEAEVQIDRLITGRLQSLQTYVTQQLIRAAEIRASANLAATKMSECVLGQSKRVDFCGKGYHLMSFPQSAPHGVVFLHVTYVFAQEKNFTTAPAICHDGKAHFPREGVFVSNGTHWFVTQRNFYEPQIITTDNTFVSGNCDVVIGIVNNTVYDPLQPELESFKEELDKYFKNHTSPDVDLGDISGINASVVNIQKEIDRLNEVAKNLNESLIDLQELGKYEQYIKGGGGSDIIKLLNEQVNKEMQSSNLYMSMSSWCYTHSLDGAGLFLFDHAAEEYEHAKKLIIFLNENNVPVQLTSISAPEHKFEGLTQIFQKAYEHEQHISESINNIVDHAIKSKDHATFNFLQWYVAEQHEEEVLFKDILDKIELIGNENHGLYLADQYVKGIAKSRKS

SEQ ID NO: 4868 - protein, 1379 aa, Artificial Sequence
  SARS-CoV-2/2019-nCoV/USA-CruiseA-18/2020__MT159716.1 spike protein (1-1211)(K986P_V987P_P1069F) Ferritin construct
MFVFLVLLPLVSSQCVNLTTRTQLPPAYTNSFTRGVYYPDKVFRSSVLHSTQDLFLPFFSNVTWFHAIHVSGTNGTKRFDNPVLPFNDGVYFASTEKSNIIRGWIFGTTLDSKTQSLLIVNNATNVVIKVCEFQFCNDPFLGVYYHKNNKSWMESELRVYSSANNCTFEYVSQPFLMDLEGKQGNFKNLREFVFKNIDGYFKIYSKHTPINLVRDLPQGFSALEPLVDLPIGINITRFQTLLALHRSYLTPGDSSSGWTAGAAAYYVGYLQPRTFLLKYNENGTITDAVDCALDPLSETKCTLKSFTVEKGIYQTSNFRVQPTESIVRFPNITNLCPFGEVFNATRFASVYAWNRKRISNCVADYSVLYNSASFSTFKCYGVSPTKLNDLCFTNVYADSFVIRGDEVRQIAPGQTGKIADYNYKLPDDFTGCVIAWNSNNLDSKVGGNYNYLYRLFRKSNLKPFERDISTEIYQAGSTPCNGVEGFNCYFPLQSYGFQPTNGVGYQPYRVVVLSFELLHAPATVCGPKKSTNLVKNKCVNFNFNGLTGTGVLTESNKKFLPFQQFGRDIADTTDAVRDPQTLEILDITPCSFGGVSVITPGTNTSNQVAVLYQDVNCTEVPVAIHADQLTPTWRVYSTGSNVFQTRAGCLIGAEHVNNSYECDIPIGAGICASYQTQTNSPRRARSVASQSIIAYTMSLGAENSVAYSNNSIAIPTNFTISVTTEILPVSMTKTSVDCTMYICGDSTECSNLLLQYGSFCTQLNRALTGIAVEQDKNTQEVFAQVKQIYKTPPIKDFGGFNFSQILPDPSKPSKRSFIEDLLFNKVTLADAGFIKQYGDCLGDIAARDLICAQKFNGLTVLPPLLTDEMIAQYTSALLAGTITSGWTFGAGAALQIPFAMQMAYRFNGIGVTQNVLYENQKLIANQFNSAIGKIQDSLSSTASALGKLQDVVNQNAQALNTLVKQLSSNFGAISSVLNDILSRLDPPEAEVQIDRLITGRLQSLQTYVTQQLIRAAEIRASANLAATKMSECVLGQSKRVDFCGKGYHLMSFPQSAPHGVVFLHVTYVFAQEKNFTTAPAICHDGKAHFPREGVFVSNGTHWFVTQRNFYEPQIITTDNTFVSGNCDVVIGIVNNTVYDPLQPELDSFKEELDKYFKNHTSPDVDLGDISGINASVVNIQKEIDRLNEVAKNLNESLIDLQELGKYEQYIKGGGGSDIIKLLNEQVNKEMQSSNLYMSMSSWCYTHSLDGAGLFLFDHAAEEYEHAKKLIIFLNENNVPVQLTSISAPEHKFEGLTQIFQKAYEHEQHISESINNIVDHAIKSKDHATFNFLQWYVAEQHEEEVLFKDILDKIELIGNENHGLYLADQYVKGIAKSRKS

SEQ ID NO: 4869 - protein, 1379 aa, Artificial Sequence
  SARS-CoV-2/SARS-CoV-2/Yunnan-01/human/2020/CHN__MT049951.1 spike protein (1-1211)(K986P_V987P_P1069F) Ferritin construct
MFVFLVLLPLVSSQCVNLTTRTQLPPANTNSFTRGVYYPDKVFRSSVLHSTQDLFLPFFSNVTWFHAIHVSGTNGTKRFDNPVLPFNDGVYFASTEKSNIIRGWIFGTTLDSKTQSLLIVNNATNVVIKVCEFQFCNDPFLGVYYHKNNKSWMESEFRVYSSANNCTFEYVSQPFLMDLEGKQGNFKNLREFVFKNIDGYFKIYSKHTPINLVRDLPQGFSALEPLVDLPIGINITRFQTLLALHRSYLTPGDSSSGWTAGAAAYYVGYLQPRTFLLKYNENGTITDAVDCALDPLSETKCTLKSFTVEKGIYQTSNFRVQPTESIVRFPNITNLCPFGEVFNATRFASVYAWNRKRISNCVADYSVLYNSASFSTFKCYGVSPTKLNDLCFTNVYADSFVIRGDEVRQIAPGQTGKIADYNYKLPDDFTGCVIAWNSNNLDSKVGGNYNYLYRLFRKSNLKPFERDISTEIYQAGSTPCNGVEGFNCYFPLQSYGFQPTNGVGYQPYRVVVLSFELLHAPATVCGPKKSTNLVKNKCVNFNFNGLTGTGVLTESNKKFLPFQQFGRDIADTTDAVRDPQTLEILDITPCSFGGVSVITPGTNTSNQVAVLYQDVNCTEVPVAIHADQLTPTWRVYSTGSNVFQTRAGCLIGAEHVNNSYECDIPIGAGICASYQTQTNSPRRARSVASQSIIAYTMSLGAENSVAYSNNSIAIPTNFTISVTTEILPVSMTKTSVDCTMYICGDSTECSNLLLQYGSFCTQLNRALTGIAVEQDKNTQEVFAQVKQIYKTPPIKDFGGFNFSQILPDPSKPSKRSFIEDLLFNKVTLADAGFIKQYGDCLGDIAARDLICAQKFNGLTVLPPLLTDEMIAQYTSALLAGTITSGWTFGAGAALQIPFAMQMAYRFNGIGVTQNVLYENQKLIANQFNSAIGKIQDSLSSTASALGKLQDVVNQNAQALNTLVKQLSSNFGAISSVLNDILSRLDPPEAEVQIDRLITGRLQSLQTYVTQQLIRAAEIRASANLAATKMSECVLGQSKRVDFCGKGYHLMSFPQSAPHGVVFLHVTYVFAQEKNFTTAPAICHDGKAHFPREGVFVSNGTHWFVTQRNFYEPQIITTDNTFVSGNCDVVIGIVNNTVYDPLQPELDSFKEELDKYFKNHTSPDVDLGDISGINASVVNIQKEIDRLNEVAKNLNESLIDLQELGKYEQYIKGGGGSDIIKLLNEQVNKEMQSSNLYMSMSSWCYTHSLDGAGLFLFDHAAEEYEHAKKLIIFLNENNVPVQLTSISAPEHKFEGLTQIFQKAYEHEQHISESINNIVDHAIKSKDHATFNFLQWYVAEQHEEEVLFKDILDKIELIGNENHGLYLADQYVKGIAKSRKS

SEQ ID NO: 4870 - protein, 1379 aa, Artificial Sequence
  SARS-CoV-2/USA/WA-UW292/2020__EPI_ISL_418077 spike protein (1-1211)(K986P_V987P_P1069F) Ferritin construct
MFVFLVLLPLVSSQCVNLTTRTQLPPAYTNSFTRGVYYPDKVFRSSVLHSTQDLFLPFFSNVTWFHAIHVSGTNGTKRFDNPVLPFNDGVYFASTEKSNIIRGWIFGTTLDSKTQSLLIVNNATNVVIKVCEFQFCNDPFLGVYYHKNNKSWMESEFRVYSSANNCTFEYVSQPFLMDLEGKQGNFKNLREFVFKNIDGYFKIYSKHTPINLVRDLPQGFSALEPLVDLPIGINITRFQTLLALHRSYLTPGDSSSGWTAGAAAYYVGYLQPRTFLLKYNENGTITDAVDCALDPLSETKCTLKSFTVEKGIYQTSNFRVQPTESIVRFPNITNLCPFGEVFNATRFASVYAWNRKRISNCVADYSVLYNSASFSTFKCYGVSPTKLNDLCFTNVYADSFVIRGDEVRQIAPGQTGKIADYNYKLPDDFTGCVIAWNSNNLDSKVGGNYNYLYRLFRKSNLKPFERDISTEIYQASSTPCNGVEGFNCYFPLQSYGFQPTNGVGYQPYRVVVLSFELLHAPATVCGPKKSTNLVKNKCVNFNFNGLTGTGVLTESNKKFLPFQQFGRDIADTTDAVRDPQTLEILDITPCSFGGVSVITPGTNTSNQVAVLYQDVNCTEVPVAIHADQLTPTWRVYSTGSNVFQTRAGCLIGAEHVNNSYECDIPIGAGICASYQTQTNSPRRARSVASQSIIAYTMSLGAENSVAYSNNSIAIPTNFTISVTTEILPVSMTKTSVDCTMYICGDSTECSNLLLQYGSFCTQLNRALTGIAVEQDKNTQEVFAQVKQIYKTPPIKDFGGFNFSQILPDPSKPSKRSFIEDLLFNKVTLADAGFIKQYGDCLGDIAARDLICAQKFNGLTVLPPLLTDEMIAQYTSALLAGTITSGWTFGAGAALQIPFAMQMAYRFNGIGVTQNVLYENQKLIANQFNSAIGKIQDSLSSTASALGKLQDVVNQNAQALNTLVKQLSSNFGAISSVLNDILSRLDPPEAEVQIDRLITGRLQSLQTYVTQQLIRAAEIRASANLAATKMSECVLGQSKRVDFCGKGYHLMSFPQSAPHGVVFLHVTYVFAQEKNFTTAPAICHDGKAHFPREGVFVSNGTHWFVTQRNFYEPQIITTDNTFVSGNCDVVIGIVNNTVYDPLQPELDSFKEELDKYFKNHTSPDVDLGDISGINASVVNIQKEIDRLNEVAKNLNESLIDLQELGKYEQYIKGGGGSDIIKLLNEQVNKEMQSSNLYMSMSSWCYTHSLDGAGLFLFDHAAEEYEHAKKLIIFLNENNVPVQLTSISAPEHKFEGLTQIFQKAYEHEQHISESINNIVDHAIKSKDHATFNFLQWYVAEQHEEEVLFKDILDKIELIGNENHGLYLADQYVKGIAKSRKS

SEQ ID NO: 4871 - protein, 1379 aa, Artificial Sequence
  SARS-CoV-2/Iceland/192/2020__EPI_ISL_417819 spike protein (1-1211)(K986P_V987P_P1069F) Ferritin construct
MFVFFVLLPLVSSQCVNLTTRTQLPPAYTNSFTRGVYYPDKVFRSSVLHSTQDLFLPFFSNVTWFHAIHVSGTNGTKRFDNPVLPFNDGVYFASTEKSNIIRGWIFGTTLDSKTQSLLIVNNATNVVIKVCEFQFCNDPFLGVYYHKNNKSWMESEFRVYSSANNCTFEYVSQPFLMDLEGKQGNFKNLREFVFKNIDGYFKIYSKHTPINLVRDLPQGFSALEPLVDLPIGINITRFQTLLALHRSYLTPGDSSSGWTAGAAAYYVGYLQPRTFLLKYNENGTITDAVDCALDPLSETKCTLKSFTVEKGIYQTSNFRVQPTESIVRFPNITNLCPFGEVFNATRFASVYAWNRKRISNCVADYSVLYNSASFSTFKCYGVSPTKLNDLCFTNVYADSFVIRGDEVRQIAPGQTGKIADYNYKLPDDFTGCVIAWNSNNLDSKVGGNYNYLYRLFRKSNLKPFERDISTEIYQAGSTPCNGVEGFNCYFPLQSYGFQPTNGVGYQPYRVVVLSFELLHAPATVCGPKKSTNLVKNKCVNFNFNGLTGTGVLTESNKKFLPFQQFGRDIADTTDAVRDPQTLEILDITPCSFGGVSVITPGTNTSNQVAVLYQGVNCTEVPVAIHADQLTPTWRVYSTGSNVFQTRAGCLIGAEHVNNSYECDIPIGAGICASYQTQTNSPRRARSVASQSIIAYTMSLGAENSVAYSNNSIAIPTNFTISVTTEILPVSMTKTSVDCTMYICGDSTECSNLLLQYGSFCTQLNRALTGIAVEQDKNTQEVFAQVKQIYKTPPIKDFGGFNFSQILPDPSKPSKRSFIEDLLFNKVTLADAGFIKQYGDCLGDIAARDLICAQKFNGLTVLPPLLTDEMIAQYTSALLAGTITSGWTFGAGAALQIPFAMQMAYRFNGIGVTQNVLYENQKLIANQFNSAIGKIQDSLSSTASALGKLQDVVNQNAQALNTLVKQLSSNFGAISSVLNDILSRLDPPEAEVQIDRLITGRLQSLQTYVTQQLIRAAEIRASANLAATKMSECVLGQSKRVDFCGKGYHLMSFPQSAPHGVVFLHVTYVFAQEKNFTTAPAICHDGKAHFPREGVFVSNGTHWFVTQRNFYEPQIITTDNTFVSGNCDVVIGIVNNTVYDPLQPELDSFKEELDKYFKNHTSPDVDLGDISGINASVVNIQKEIDRLNEVAKNLNESLIDLQELGKYEQYIKGGGGSDIIKLLNEQVNKEMQSSNLYMSMSSWCYTHSLDGAGLFLFDHAAEEYEHAKKLIIFLNENNVPVQLTSISAPEHKFEGLTQIFQKAYEHEQHISESINNIVDHAIKSKDHATFNFLQWYVAEQHEEEVLFKDILDKIELIGNENHGLYLADQYVKGIAKSRKS

SEQ ID NO: 4872 - protein, 1379 aa, Artificial Sequence
  SARS-CoV-2/Belgium/ULG-6939/2020__EPI_ISL_417020 spike protein (1-1211)(K986P_V987P_P1069F) Ferritin construct
MFVFLVLLPLVSSQCVNLTTRTQLPPAYTNSFTRGVYYPDKVFRSSVLHSTQDLFLPFFSNVTWFHAIHVSGTNGTKRFDNPVLPFNDGVYFASTEKSNIIRGWIFGTTLDSKTQSLLIVNNATNVVIKVCEFQFCNDPFLGVYYHKNNKSWMESEFRVYSSANNCTFEYVSQPFLMDLEGKQGNFKNLREFVFKNIDGYFKIYSKHTPINLVRDLPQGFSALEPLVDLPIGINITRFQTLLALHRSYLTPGDSSSGWTAGAAAYYVGYLQPRTFLLKYNENGTITDAVDCALDPLSETKCTLKSFTVEKGIYQTSNFRVQPTESIVRFPNITNLCPFGEVFNATRFASVYAWNRKRISNCVADYSVLYNSASFSTFKCYGVSPTKLNDLCFTNVYADSFVIRGDEVRQIAPGQTGKIADYNYKLPDDFTGCVIAWNSNNLDSKVGGNYNYLYRLFRKSNLKPFERDISTEIYQAGSTPCNGVEGFNCYFPLQSYGFQPTNGVGYQPYRVVVLSFELLHAPATVCGPKKSTNLVKNKCVNFNFNGLTGTGVLTESNKKFLPFQQFGRDIADTTDAVRDPQTLEILDITPCSFGGVSVITPGTNTSNQVAVLYQGVNCTEVPVAIHADQLTPTWRVYSTGSNVFQTRAGCLIGAEHVNNSYECDIPIGAGICASYQTQTNSPRRARSVASQSIIAYTMSLGAENSVVYSNNSIAIPTNFTISVTTEILPVSMTKTSVDCTMYICGDSTECSNLLLQYGSFCTQLNRALTGIAVEQDKNTQEVFAQVKQIYKTPPIKDFGGFNFSQILPDPSKPSKRSFIEDLLFNKVTLADAGFIKQYGDCLGDIAARDLICAQKFNGLTVLPPLLTDEMIAQYTSALLAGTITSGWTFGAGAALQIPFAMQMAYRFNGIGVTQNVLYENQKLIANQFNSAIGKIQDSLSSTASALGKLQDVVNQNAQALNTLVKQLSSNFGAISSVLNDILSRLDPPEAEVQIDRLITGRLQSLQTYVTQQLIRAAEIRASANLAATKMSECVLGQSKRVDFCGKGYHLMSFPQSAPHGVVFLHVTYVFAQEKNFTTAPAICHDGKAHFPREGVFVSNGTHWFVTQRNFYEPQIITTDNTFVSGNCDVVIGIVNNTVYDPLQPELDSFKEELDKYFKNHTSPDVDLGDISGINASVVNIQKEIDRLNEVAKNLNESLIDLQELGKYEQYIKGGGGSDIIKLLNEQVNKEMQSSNLYMSMSSWCYTHSLDGAGLFLFDHAAEEYEHAKKLIIFLNENNVPVQLTSISAPEHKFEGLTQIFQKAYEHEQHISESINNIVDHAIKSKDHATFNFLQWYVAEQHEEEVLFKDILDKIELIGNENHGLYLADQYVKGIAKSRKS

SEQ ID NO: 4873 - protein, 1379 aa, Artificial Sequence
  SARS-CoV-2/France/HF2496/2020__EPI_ISL_418231 spike protein (1-1211)(K986P_V987P_P1069F) Ferritin construct
MFVFLVLLPLVSSQCVNLTTRTQLPPAYTNSFTRGVYYPDKVFRSSVLHSTQDLFLPFFSNVTWFHAIHVSGTNGTKRFDNPVLPFNDGVYFASTEKSNIIRGWIFGTTLDSKTQSLLIVNNATNVVIKVCEFQFCNDPFLGVYYHKNNKSWMESEFRVYSSANNCTFEYVSQPFLMDLEGKQGNFKNLREFVFKNIDGYFKIYSKHTPINLVRDLPQGFSALEPLVDLPIGINITRFQTLLALHRSYLTPGDSSSGWTAGAAAYYVGYLQPRTFLLKYNENGTITDAVDCALDPLSETKCTLKSFTVEKGIYQTSNFRVQPTESIVRFPNITNLCPFGEVFNATRFASVYAWNRKRISNCVADYSVLYNSASFSTFKCYGVSPTKLNDLCFTNVYADSFVIRGDEVRQIAPGQTGKIADYNYKLPDDFTGCVIAWNSNNLDSKVGGNYNYLYRLFRKSNLKPFERDISTEIYQAGSTPCNGVEGFNCYFPLQSYGFQPTNGVGYQPYRVVVLSFELLHAPATVCGPKKSTNLVKNKCVNFNFNGLTGTGVLTESNKKFLPFQQFGRDIADTTDAVRDPQTLEILDITPCSFGGVSVITPGTNTSNQVAVLYQGVNCTEVPVAIHADQLTPTWRVYSTGSNVFQTRAGCLIGAEHVNNSYECDIPIGAGICASYQTQTNSPRRARSVASQSIIAYTMSLGAENSVAYSNNSIAIPTNFTISVTTEILPVSMTKTSVDCTMYICGDSTECSNLLLQYGSFCTQLNRALTGIAVEQDKNTQEVFAQVKQIYKTPPIKDFGGFNFSQILPDPSKPSKRSFIEDLLFNKVTLADAGFIKQYGDCLGDIVARDLICAQKFNGLTVLPPLLTDEMIAQYTSALLAGTITSGWTFGAGAALQIPFAMQMAYRFNGIGVTQNVLYENQKLIANQFNSAIGKIQDSLSSTASALGKLQDVVNQNAQALNTLVKQLSSNFGAISSVLNDILSRLDPPEAEVQIDRLITGRLQSLQTYVTQQLIRAAEIRASANLAATKMSECVLGQSKRVDFCGKGYHLMSFPQSAPHGVVFLHVTYVFAQEKNFTTAPAICHDGKAHFPREGVFVSNGTHWFVTQRNFYEPQIITTDNTFVSGNCDVVIGIVNNTVYDPLQPELDSFKEELDKYFKNHTSPDVDLGDISGINASVVNIQKEIDRLNEVAKNLNESLIDLQELGKYEQYIKGGGGSDIIKLLNEQVNKEMQSSNLYMSMSSWCYTHSLDGAGLFLFDHAAEEYEHAKKLIIFLNENNVPVQLTSISAPEHKFEGLTQIFQKAYEHEQHISESINNIVDHAIKSKDHATFNFLQWYVAEQHEEEVLFKDILDKIELIGNENHGLYLADQYVKGIAKSRKS

SEQ ID NO: 4874 - protein, 1379 aa, Artificial Sequence
  SARS-CoV-2/USA/WA-UW291/2020__EPI_ISL_418076 spike protein (1-1211)(K986P_V987P_P1069F) Ferritin construct
MFVFLVLLPLVSSQCVNLTTRTQLPPAYTNSFTRGVYYPDKVFRSSVLHSTQDLFLPFFSNVTWFHAIHVSGTNGTKRFDNPVLPFNDGVYFASTEKSNIIRGWIFGTTLDSKTQSLLIVNNATNVVIKVCEFQFCNDPFLGVYYHKNNKSWMESEFRVYSSANNCTFEYVSQPFLMDLEGKQGNFKNLREFVFKNIDGYFKIYSKHTPINLVRDLPQGFSALEPLVDLPIGINITRFQTLLALHRSYLTPGDSSSGWTAGAAAYYVGYLQPRTFLLKYNENGTITDAVDCALDPLSETKCTLKSFTVEKGIYQTSNFRVQPTESIVRFPNITNLCPFGEVFNATRFASVYAWNRKRISNCVADYSVLYNSASFSTFKCYGVSPTKLNDLCFTNVYADSFVIRGDEVRQIAPGQTGKIADYNYKLPDDFTGCVIAWNSNNLDSKVGGNYNYLYRLFRKSNLKPFERDISTEIYQAGSTPCNGVEGFNCYFPLQSYGFQPTNGVGYQPYRVVVLSFELLHAPATVCGPKKSTNLVKNKCVNFNFNGLTGTGVLTESNKKFLPFQQFGRDIADTTDAVRDPQTLEILDITPCSFGGVSVITPGTNTSNQVAVLYQGVNCTEVPVAIHADQLTPTWRVYSTGSNVFQTRAGCLIGAEHVNNSYECDIPIGAGICASYQTQTNSPRRARSVASQSIIAYTMSLGAENSVAYSNNSIAIPTNFTISVTTEILPVSMTKTSVDCTMYICGDSTECSNLLLQYGSFCTQLNRALTGIAVEQDKNTQEVFAQVKQIYKTPPIKDFGGFNFSQILPDPSKPSKRSFIEDLLFNKVTLADAGFIKQYGDCLGDIAARDLICAQKFNGLTVLPPLLTDEMIAQYTSALLAGTITSGWTFGAGAALQIPFAMQMAYRFNGIGVTQNVLYENQKLIANQFNSAIGKIQYSLSSTASALGKLQDVVNQNAQALNTLVKQLSSNFGAISSVLNDILSRLDPPEAEVQIDRLITGRLQSLQTYVTQQLIRAAEIRASANLAATKMSECVLGQSKRVDFCGKGYHLMSFPQSAPHGVVFLHVTYVFAQEKNFTTAPAICHDGKAHFPREGVFVSNGTHWFVTQRNFYEPQIITTDNTFVSGNCDVVIGIVNNTVYDPLQPELDSFKEELDKYFKNHTSPDVDLGDISGINASVVNIQKEIDRLNEVAKNLNESLIDLQELGKYEQYIKGGGGSDIIKLLNEQVNKEMQSSNLYMSMSSWCYTHSLDGAGLFLFDHAAEEYEHAKKLIIFLNENNVPVQLTSISAPEHKFEGLTQIFQKAYEHEQHISESINNIVDHAIKSKDHATFNFLQWYVAEQHEEEVLFKDILDKIELIGNENHGLYLADQYVKGIAKSRKS

SEQ ID NO: 4875 - protein, 1379 aa, Artificial Sequence; identical to SEQ ID NO: 4838
  SARS-CoV-2/Portugal/PT0034/2020__EPI_ISL_418019 spike protein (1-1211)(K986P_V987P_P1069F) Ferritin construct

SEQ ID NO: 4876 - protein, 1379 aa, Artificial Sequence
  SARS-CoV-2/Iceland/202/2020__EPI_ISL_417750 spike protein (1-1211)(K986P_V987P_P1069F) Ferritin construct
MFVFLVLLPLVSSQCVNLTTRTQLPPAYTNSFTRGVYYPDKVFRSSVLHSTQDLFLPFFSNVTWFHAIHVSGTNGTKRFDNPVLPFNDGVYFASTEKSNIIRGWIFGTTLDSKTQSLLIVNNATNVVIKVCEFQFCNDPFLGVYYHKNNKSWMESEFRVYSSANNCTFEYVSQPFLMDLEGKQGNFKNLREFVFKNIDGYFKIYSKHTPINLVRDLPQGFSALEPLVDLPIGINITRFQTLLALHRSYLTPGDSSSGWTAGAAAYYVGYLQPRTFLLKYNENGTITDAVDCALDPLSETKCTLKSFTVEKGIYQTSNFRVQPTESIVRFPNITNLCPFGEVFNATRFASVYAWNRKRISNCVADYSVLYNSASFSTFKCYGVSPTKLNDLCFTNVYADSFVIRGDEVRQIAPGQTGKIADYNYKLPDDFTGCVIAWNSNNLDSKVGGNYNYLYRLFRKSNLKPFERDISTEIYQAGSTPCNGVEGFNCYFPLQSYGFQPTNGVGYQPYRVVVLSFELLHAPATVCGPKKSTNLVKNKCVNFNFNGLTGTGVLTESNKKFLPFQQFGRDIADTTDAVRDPQTLEILDITPCSFGGVSVITPGTNTSNQVAVLYQDVNCTEVPVAIHADQLTPTWRVYSTGSNVFQTRAGCLIGAEHVNNSYECDIPIGAGICASYQTQTNSPRRARSVASQSIIAYTMSLGAENSVAYSNNSIAIPTNFTISVTTEILPVSMTKTSVDCTMYICGDSTECSNLLLQYGSFCTQLNRALTGIAVEQDKNTQEVFAQVKQIYKTPPIKDFGGFNFSQILPDPSKPSKRSFIEDLLFNKVTLADAGFIKQYGDCLGDIAARDLICAQKFNGLTVLPPLLTDEMIAQYTSALLAGTITSGWTFGAGAALQIPFAMQMAYRFNGIGVTQNVLYENQKLIANQFNSAIGKIQDSLSSTASALGKLQDVVNQNAQALNTLVKQLSSNFGAISSVLNDILSRLDPPEAEVQIDRLITGRLQSLQTYVTQQLIRAAEIRASANLAATKMSECVLGQSKRVDFCGKGYHLMSFPQSAPHGVVFLHVTYVFAQEKNFTTAPAICHDGKAHFPREGVFVSNGTHWFVTQRNFYEPQIITTDNTFVSGNCDVVIGIVNNTVYDPLQPELDSFKEELDKYFKNHTSPDVDLGDIPGINASVVNIQKEIDRLNEVAKNLNESLIDLQELGKYEQYIKGGGGSDIIKLLNEQVNKEMQSSNLYMSMSSWCYTHSLDGAGLFLFDHAAEEYEHAKKLIIFLNENNVPVQLTSISAPEHKFEGLTQIFQKAYEHEQHISESINNIVDHAIKSKDHATFNFLQWYVAEQHEEEVLFKDILDKIELIGNENHGLYLADQYVKGIAKSRKS

SEQ ID NO: 4877 - protein, 1379 aa, Artificial Sequence
  SARS-CoV-2/USA/WA-UW261/2020__EPI_ISL_418046 spike protein (1-1211)(K986P_V987P_P1069F) Ferritin construct
MFVFLVLLPLVSSQCVNLTTRTQLPPAYTNSFTRGVYYPDKVFRSSVLHSTQDLFLPFFSNVTWFHAIHVSGTNGTKRFDNPVLPFNDGVYFASTEKSNIIRGWIFGTTLDSKTQSLLIVNNATNVVIKVCEFQFCNDPFLGVYYHKNNKSWMESEFRVYSSANNCTFEYVSQPFLMDLEGKQGNFKNLREFVFKNIDGYFKIYSKHTPINLVRDLPQGFSALEPLVDLPIGINITRFQTLLALHRSYLTPGDSSSGWTAGAAAYYVGYLQPRTFLLKYNENGTITDAVDCALDPLSETKCTLKSFTVEKGIYQTSNFRVQPTESIVRFPNITNLCPFGEVFNATRFTSVYAWNRKRISNCVADYSVLYNSASFSTFKCYGVSPTKLNDLCFTNVYADSFVIRGDEVRQIAPGQTGKIADYNYKLPDDFTGCVIAWNSNNLDSKVGGNYNYLYRLFRKSNLKPFERDISTEIYQAGSTPCNGVEGFNCYFPLQSYGFQPTNGVGYQPYRVVVLSFELLHAPATVCGPKKSTNLVKNKCVNFNFNGLTGTGVLTESNKKFLPFQQFGRDIADTTDAVRDPQTLEILDITPCSFGGVSVITPGTNTSNQVAVLYQDVNCTEVPVAIHADQLTPTWRVYSTGSNVFQTRAGCLIGAEHVNNSYECDIPIGAGICASYQTQTNSPRRARSVASQSIIAYTMSLGAENSVAYSNNSIAIPTNFTISVTTEILPVSMTKTSVDCTMYICGDSTECSNLLLQYGSFCTQLNRALTGIAVEQDKNTQEVFAQVKQIYKTPPIKDFGGFNFSQILPDPSKPSKRSFIEDLLFNKVTLADAGFIKQYGDCLGDIAARDLICAQKFNGLTVLPPLLTDEMIAQYTSALLAGTITSGWTFGAGAALQIPFAMQMAYRFNGIGVTQNVLYENQKLIANQFNSAIGKIQDSLSSTASALGKLQDVVNQNAQALNTLVKQLSSNFGAISSVLNDILSRLDPPEAEVQIDRLITGRLQSLQTYVTQQLIRAAEIRASANLAATKMSECVLGQSKRVDFCGKGYHLMSFPQSAPHGVVFLHVTYVFAQEKNFTTAPAICHDGKAHFPREGVFVSNGTHWFVTQRNFYEPQIITTDNTFVSGNCDVVIGIVNNTVYDPLQPELDSFKEELDKYFKNHTSPDVDLGDISGINASVVNIQKEIDRLNEVAKNLNESLIDLQELGKYEQYIKGGGGSDIIKLLNEQVNKEMQSSNLYMSMSSWCYTHSLDGAGLFLFDHAAEEYEHAKKLIIFLNENNVPVQLTSISAPEHKFEGLTQIFQKAYEHEQHISESINNIVDHAIKSKDHATFNFLQWYVAEQHEEEVLFKDILDKIELIGNENHGLYLADQYVKGIAKSRKS

SEQ ID NO: 4878 - protein, 1379 aa, Artificial Sequence
  SARS-CoV-2/Portugal/PT0035/2020__EPI_ISL_418020 spike protein (1-1211)(K986P_V987P_P1069F) Ferritin construct
MFVFLVLLPLVSSQCVNLTTRTQLPPAYTNSFTRGVYYPDKVFRSSVLHSTQDLFLPFFSNVTWFHAIHVSGTNGTKRFDNPVLPFNDGVYFASTEKSNIIRGWIFGTTLDSKTQSLLIVNNATNVVIKVCEFQFCNDPFLGVYYHKNNKSWMESEFRVYSSANNCTFEYVSQPFLMDLEGKQGNFKNLREFVFKNIDGYFKIYSKHTPINLVRDLPQGFSALEPLVDLPIGINITRFQTLLALHRSYLTPGDSSSGWTAGAAAYYVGYLQPRTFLLKYNENGTITDAVDCALDPLSETKCTLKSFTVEKGIYQTSNFRVQPTESIVRFPNITNLCPFGEVFNATRFASVYAWNRKRISNCVADYSVLYNSASFSTFKCYGVSPTKLNDLCFTNVYADSFVIRGDEVRQIAPGQTGKIADYNYKLPDDFTGCVIAWNSNNLDSKVGGNYNYLYRLFRKSNLKPFERDISTEIYQAGSTPCNGVEGFNCYFPLQSYGFQPTNGVGYQPYRVVVLSFELLHAPATVCGPKKSTNLVKNKCVNFNFNGLTGTGVLTESNKKFLPFQQFGRDIADTTDAVRDPQTLEILDITPCSFGGVSVITPGTNTSNQVAVLYQDVNCTEVPVAIHADQLTPTWRVYSTGSNVFQTRAGCLIGAEHVNNSYECDIPIGAGICASYQTQTNSPRRARSVASQSIIAYTMSLGAENSVAYSNNSIAIPTNFTISVTTEILPVSMTKTSVDCTMYICGDSTECSNLLLQYGSFCTQLNRALTGIAVEQDKNTQEVFAQVKQIYKTPPIKDFGGFNFSQILPDPSKPSKRSFIEDLLFNKVTLADAGFIKQYGDCLGDISARDLICAQKFNGLTVLPPLLTDEMIAQYTSALLAGTITSGWTFGAGAALQIPFAMQMAYRFNGIGVTQNVLYENQKLIANQFNSAIGKIQDSLSSTASALGKLQDVVNQNAQALNTLVKQLSSNFGAISSVLNDILSRLDPPEAEVQIDRLITGRLQSLQTYVTQQLIRAAEIRASANLAATKMSECVLGQSKRVDFCGKGYHLMSFPQSAPHGVVFLHVTYVFAQEKNFTTAPAICHDGKAHFPREGVFVSNGTHWFVTQRNFYEPQIITTDNTFVSGNCDVVIGIVNNTVYDPLQPELDSFKEELDKYFKNHTSPDVDLGDISGINASVVNIQKEIDRLNEVAKNLNESLIDLQELGKYEQYIKGGGGSDIIKLLNEQVNKEMQSSNLYMSMSSWCYTHSLDGAGLFLFDHAAEEYEHAKKLIIFLNENNVPVQLTSISAPEHKFEGLTQIFQKAYEHEQHISESINNIVDHAIKSKDHATFNFLQWYVAEQHEEEVLFKDILDKIELIGNENHGLYLADQYVKGIAKSRKS

SEQ ID NO: 4879 - protein, 1379 aa, Artificial Sequence
  SARS-CoV-2/USA/NY-NYUMC7/2020__EPI_ISL_418192 spike protein (1-1211)(K986P_V987P_P1069F) Ferritin construct
MFVFLVLLPLVSSQCVNLTTRTQLPPAYTNSFTRGVYYPDKVFRSSVLHSTQDLFLPFFSNVTWFHAIHVSGTNGTKRFDNPVLPFNDGVYFASTEKSNIIRGWIFGTTLDSKTQSLLIVNNATNVVIKVCEFQFCNDPFLGVYHHKNNKSWMESEFRVYSSANNCTFEYVSQPFLMDLEGKQGNFKNLREFVFKNIDGYFKIYSKHTPINLVRDLPQGFSALEPLVDLPIGINITRFQTLLALHRSYLTPGDSSSGWTAGAAAYYVGYLQPRTFLLKYNENGTITDAVDCALDPLSETKCTLKSFTVEKGIYQTSNFRVQPTESIVRFPNITNLCPFGEVFNATRFASVYAWNRKRISNCVADYSVLYNSASFSTFKCYGVSPTKLNDLCFTNVYADSFVIRGDEVRQIAPGQTGKIADYNYKLPDDFTGCVIAWNSNNLDSKVGGNYNYLYRLFRKSNLKPFERDISTEIYQAGSTPCNGVEGFNCYFPLQSYGFQPTNGVGYQPYRVVVLSFELLHAPATVCGPKKSTNLVKNKCVNFNFNGLTGTGVLTESNKKFLPFQQFGRDIADTTDAVRDPQTLEILDITPCSFGGVSVITPGTNTSNQVAVLYQGVNCTEVPVAIHADQLTPTWRVYSTGSNVFQTRAGCLIGAEHVNNSYECDIPIGAGICASYQTQTNSPRRARSVASQSIIAYTMSLGAENSVAYSNNSIAIPTNFTISVTTEILPVSMTKTSVDCTMYICGDSTECSNLLLQYGSFCTQLNRALTGIAVEQDKNTQEVFAQVKQIYKTPPIKDFGGFNFSQILPDPSKPSKRSFIEDLLFNKVTLADAGFIKQYGDCLGDIAARDLICAQKFNGLTVLPPLLTDEMIAQYTSALLAGTITSGWTFGAGAALQIPFAMQMAYRFNGIGVTQNVLYENQKLIANQFNSAIGKIQDSLSSTASALGKLQDVVNQNAQALNTLVKQLSSNFGAISSVLNDILSRLDPPEAEVQIDRLITGRLQSLQTYVTQQLIRAAEIRASANLAATKMSECVLGQSKRVDFCGKGYHLMSFPQSAPHGVVFLHVTYVFAQEKNFTTAPAICHDGKAHFPREGVFVSNGTHWFVTQRNFYEPQIITTDNTFVSGNCDVVIGIVNNTVYDPLQPELDSFKEELDKYFKNHTSPDVDLGDISGINASVVNIQKEIDRLNEVAKNLNESLIDLQELGKYEQYIKGGGGSDIIKLLNEQVNKEMQSSNLYMSMSSWCYTHSLDGAGLFLFDHAAEEYEHAKKLIIFLNENNVPVQLTSISAPEHKFEGLTQIFQKAYEHEQHISESINNIVDHAIKSKDHATFNFLQWYVAEQHEEEVLFKDILDKIELIGNENHGLYLADQYVKGIAKSRKS

SEQ ID NO: 4880 - protein, 1379 aa, Artificial Sequence
  SARS-CoV-2/Iceland/189/2020__EPI_ISL_417709 spike protein (1-1211)(K986P_V987P_P1069F) Ferritin construct
MFVFLVLLPLVSSQCVNLTTRTQLPPAYTNSFTRGVYYPDKVFRSSVLHSTQDLFLPFFSNVTWFHAIHVSGTNGTKRFDNPVLPFNDGVYFASTEKSNIIRGWIFGTTLDSKTQSLLIVNNATNVVIKVCEFQFCNDPFLGVYYHKNNKSWMESEFRVYSSANNCTFEYVSQPFLMDLEGKQGNFKNLREFVFKNIDGYFKIYSKHTPINLVRDLPQGFSALEPLVDLPIGINITRFQTLLALHRSYLTPGDSSSGWTAGAAAYYVGYLQPRTFLLKYNENGTITDAVDCALDPLSETKCTLKSFTVEKGIYQTSNFRVQPTESIVRFPNITNLCPFGEVFNATRFASVYAWNRKRISNCVADYSVLYNSASFSTFKCYGVSPTKLNDLCFTNVYADSFVIRGDEVRQIAPGQTGKIADYNYKLPDDFTGCVIAWNSNNLDSKVGGNYNYLYRLFRKSNLKPFERDISTEIYQAGSTPCNGVEGFNCYFPLQSYGFQPTNGVGYQPYRVVVLSFELLHAPATVCGPKKSTNLVKNKCVNFNFNGLTGTGVLTESNKKFLPFQQFGRDIADTTDAVRDPQTLEILDITPCSFGGVSVITPGTNTSNQVAVLYQGVNCTEVPVAIHADQLTPTWRVYSTGSNVFQTRAGCLIGAEHVNNSYECDIPIGAGICASYQTQTNSPRRARSVASQSIIAYTMSLGAENSVAYSNNSIAIPTNFTISVTTEILPVSMTKTSVDCTMYICGDSTECSNLLLQYGSFCTQLNRALTGIAVEQDKNTQEVFAQVKQIYKTPPIKDFGGFNFSQILPDPSKPSKRSFIEDLLFNKVTLADAGFTKQYGDCLGDIAARDLICAQKFNGLTVLPPLLTDEMIAQYTSALLAGTITSGWTFGAGAALQIPFAMQMAYRFNGIGVTQNVLYENQKLIANQFNSAIGKIQDSLSSTASALGKLQDVVNQNAQALNTLVKQLSSNFGAISSVLNDILSRLDPPEAEVQIDRLITGRLQSLQTYVTQQLIRAAEIRASANLAATKMSECVLGQSKRVDFCGKGYHLMSFPQSAPHGVVFLHVTYVFAQEKNFTTAPAICHDGKAHFPREGVFVSNGTHWFVTQRNFYEPQIITTDNTFVSGNCDVVIGIVNNTVYDPLQPELDSFKEELDKYFKNHTSPDVDLGDISGINASVVNIQKEIDRLNEVAKNLNESLIDLQELGKYEQYIKGGGGSDIIKLLNEQVNKEMQSSNLYMSMSSWCYTHSLDGAGLFLFDHAAEEYEHAKKLIIFLNENNVPVQLTSISAPEHKFEGLTQIFQKAYEHEQHISESINNIVDHAIKSKDHATFNFLQWYVAEQHEEEVLFKDILDKIELIGNENHGLYLADQYVKGIAKSRKS

SEQ ID NO: 4881 - protein, 1379 aa, Artificial Sequence
  SARS-CoV-2/Australia/NSW56/2020__EPI_ISL_417408 spike protein (1-1211)(K986P_V987P_P1069F) Ferritin construct
MFVFLVLLPLVSSQCVNLTTRTQLPPAYTNSFTRGVYYPDKVFRSSVLHSTQDLFLPFFSNVTWFHAIHVSGTNGTKRFDNPVLPFNDGVYFASTEKSNIIRGWIFGTTLDSKTQSLLIVNNATNVVIKVCEFQFCNDPFLGVYYHKNNKSWMESEFRVYSSANNCTFEYVSQPFLMDLEGKQGNFKNLREFVFKNIDGYFKIYSKHTPINLVRDLPQGFSALEPLVDLPIGINITRFQTLLALHRSYLTPGDSSSGWTAGAAAYYVGYLQPRTFLLKYNENGTITDAVDCALDPLSETKCTLKSFTVEKGIYQTSNFRVQPTESIVRFPNITNLCPFGEVFNATRFASVYAWNRKRISNCVADYSVLYNSASFSTFKCYGVSPTKLNDLCFTNVYADSFVIRGDEVRQIAPGQTGKIADYNYKLPDDFTGCVIAWNSNNLDSKVGGNYNYLYRLFRKSNLKPFERDISTEIYQAGSTPCNGVEGFNCYFPLQSYGFQPTNGVGYQPYRVVVLSFELLHAPATVCGPKKSTNLVKNKCVNFNFNGLTGTGVLTESNKKFLPFQQFGRDIADTTDAVRDPQTLEILDITPCSFGGVSVITPGTNTSNQVAVLYQDVNCTEVPVAIHADQLTPTWRVYSTGSNVFQTRAGCLIGAEHVNNSYECDIPIGAGICASYQTQTNSPRRARSVASQSIIAYTMSLGAENSVAYSNNSIAIPTNFTISVTTEILPVSMTKTSVDCTMYICGDSTECSNLLLQYGSFCTQLNRALTGIAVEQDKNTQEVFAQVKQIYKTPPIKDFGGFNFSQILPDSSKPSKRSFIEDLLFNKVTLADAGFIKQYGDCLGDIAARDLICAQKFNGLTVLPPLLTDEMIAQYTSALLAGTITSGWTFGAGAALQIPFAMQMAYRFNGIGVTQNVLYENQKLIANQFNSAIGKIQDSLSSTASALGKLQDVVNQNAQALNTLVKQLSSNFGAISSVLNDILSRLDPPEAEVQIDRLITGRLQSLQTYVTQQLIRAAEIRASANLAATKMSECVLGQSKRVDFCGKGYHLMSFPQSAPHGVVFLHVTYVFAQEKNFTTAPAICHDGKAHFPREGVFVSNGTHWFVTQRNFYEPQIITTDNTFVSGNCDVVIGIVNNTVYDPLQPELDSFKEELDKYFKNHTSPDVDLGDISGINASVVNIQKEIDRLNEVAKNLNESLIDLQELGKYEQYIKGGGGSDIIKLLNEQVNKEMQSSNLYMSMSSWCYTHSLDGAGLFLFDHAAEEYEHAKKLIIFLNENNVPVQLTSISAPEHKFEGLTQIFQKAYEHEQHISESINNIVDHAIKSKDHATFNFLQWYVAEQHEEEVLFKDILDKIELIGNENHGLYLADQYVKGIAKSRKS

SEQ ID NO: 4882 - protein, 1379 aa, Artificial Sequence
  SARS-CoV-2/Iceland/280/2020__EPI_ISL_417608 spike protein (1-1211)(K986P_V987P_P1069F) Ferritin construct
MFVFLVLLPLVSSQCVNLTTRTQLPPAYTNSFTRGVYYPDKVFRSSVLHSTQDLFLPFFSNVTWFHAIHVSGTNGTKRFDNPVLPFNDGVYFASTEKSNIIRGWIFGTTLDSKTQSLLIVNNATNVVIKVCEFQFCNDPFLGVYYHKNNKSWMESEFRVYSSANNCTFEYVSQPFLMDLEGKQGNFKNLREFVFKNIDGYFKIYSKHTPINLVRDLPQGFSALEPLVDLPIGINITRFQTLLALHRSYLTPGDSSSGWTAGAAAYYVGYLQPRTFLLKYNENGTITDAVDCALDPLSETKCTLKSFTVEKGIYQTSNFRVQPTESIVRFPNITNLCPFGEVFNATRFASVYAWNRKRISNCVADYSVLYNSASFSTFKCYGVSPTKLNDLCFTNVYADSFVIRGDEVRQIAPGQTGKIADYNYKLPDDFTGCVIAWNSNNLDSKVGGNYNYLYRLFRKSNLKPFERDISTEIYQAGSTPCNGVEGFNCYFPLQSYGFQPTNGVGYQPYRVVVLSFELLHAPATVCGPKKSTNLVKNKCVNFNFNGLTGTGVLTESNKKFLPFQQFGRDIADTTDAVRDPQTLEILDITPCSFGGVSVITPGTNTSNQVAVLYQGVNCTEVPVAIHADQLTPTWRVYSTGSNVFQTRAGCLIGAEHVNNSYECDIPIGAGICASYHTQTNSPRRARSVASQSIIAYTMSLGAENSVAYSNNSIAIPTNFTISVTTEILPVSMTKTSVDCTMYICGDSTECSNLLLQYGSFCTQLNRALTGIAVEQDKNTQEVFAQVKQIYKTPPIKDFGGFNFSQILPDPSKPSKRSFIEDLLFNKVTLADAGFIKQYGDCLGDIAARDLICAQKFNGLTVLPPLLTDEMIAQYTSALLAGTITSGWTFGAGAALQIPFAMQMAYRFNGIGVTQNVLYENQKLIANQFNSAIGKIQDSLSSTASALGKLQDVVNQNAQALNTLVKQLSSNFGAISSVLNDILSRLDPPEAEVQIDRLITGRLQSLQTYVTQQLIRAAEIRASANLAATKMSECVLGQSKRVDFCGKGYHLMSFPQSAPHGVVFLHVTYVFAQEKNFTTAPAICHDGKAHFPREGVFVSNGTHWFVTQRNFYEPQIITTDNTFVSGNCDVVIGIVNNTVYDPLQPELDSFKEELDKYFKNHTSPDVDLGDISGINASVVNIQKEIDRLNEVAKNLNESLIDLQELGKYEQYIKGGGGSDIIKLLNEQVNKEMQSSNLYMSMSSWCYTHSLDGAGLFLFDHAAEEYEHAKKLIIFLNENNVPVQLTSISAPEHKFEGLTQIFQKAYEHEQHISESINNIVDHAIKSKDHATFNFLQWYVAEQHEEEVLFKDILDKIELIGNENHGLYLADQYVKGIAKSRKS

SEQ ID NO: 4883 - protein, 1379 aa, Artificial Sequence; identical to SEQ ID NO: 4838
  SARS-CoV-2/Iceland/247/2020__EPI_ISL_417575 spike protein (1-1211)(K986P_V987P_P1069F) Ferritin construct

SEQ ID NO: 4884 - protein, 1379 aa, Artificial Sequence
  SARS-CoV-2/Iceland/238/2020__EPI_ISL_417566 spike protein (1-1211)(K986P_V987P_P1069F) Ferritin construct
MFVFLVLLPLVSSQCVNLTTRTQLPPAYTNSFTRGVYYPDKVFRSSVLHSTQDLFLPFFSNVTWFHAIHVSGTNGTKRFDNPVLPFNDGVYFASTEKSNIIRGWIFGTTLDSKTQSLLIVNNATNVVIKVCEFQFCNDPFLGVYYHKNNKSWMESEFRVYSSANNCTFEYVSQPFLMDLEGKQGNFKNLREFVFKNIDGYFKIYSKHTPINLVRDLPQGFSALEPLVDLPIGINITRFQTLLALHRSYLTPGDSSSGWTAGAAAYYVGYLQPRTFLLKYNENGTITDAVDCALDPLSETKCTLKSFTVEKGIYQTSNFRVQPTESIVRFPNITNLCPFGEVFNATRFASVYAWNRKRISNCVADYSVLYNSASFSTFKCYGVSPTKLNDLCFTNVYADSFVIRGDEVRQIAPGQTGKIADYNYKLPDDFTGCVIAWNSNNLDSKVGGNYNYLYRLFRKSNLKPFERDISTEIYQAGSTPCNGVEGFNCYFPLQSYGFQPTNGVGYQPYRVVVLSFELLHAPATVCGPKKSTNLVKNKCVNFNFNGLTGTGVLTESNKKFLPFQQFGRDIADTTDAVRDPQTLEILDITPCSFGGVSVITPGTNTSNQVAVLYQGVNCTEVPVAIHADQLTPTWRVYSTGSNVFQTRAGCLIGAEHVNNSYECDIPIGAGICASYQTQTNSPRRARSVASQSIIAYTMSLGAENSVAYSNNSIAIPTNFTISVTTEILPVSMTKTSVDCTMYICGDSTECSNLLLQYGSFCTQLNRALTGIAVEQDKNTQEVFAQVKQIYKTPPIKDFGGFNFSQILPDPSKPSKRSFIEDLLFNKVTLADVGFIKQYGDCLGDIAARDLICAQKFNGLTVLPPLLTDEMIAQYTSALLAGTITSGWTFGAGAALQIPFAMQMAYRFNGIGVTQNVLYENQKLIANQFNSAIGKIQDSLSSTASALGKLQDVVNQNAQALNTLVKQLSSNFGAISSVLNDILSRLDPPEAEVQIDRLITGRLQSLQTYVTQQLIRAAEIRASANLAATKMSECVLGQSKRVDFCGKGYHLMSFPQSAPHGVVFLHVTYVFAQEKNFTTAPAICHDGKAHFPREGVFVSNGTHWFVTQRNFYEPQIITTDNTFVSGNCDVVIGIVNNTVYDPLQPELDSFKEELDKYFKNHTSPDVDLGDISGINASVVNIQKEIDRLNEVAKNLNESLIDLQELGKYEQYIKGGGGSDIIKLLNEQVNKEMQSSNLYMSMSSWCYTHSLDGAGLFLFDHAAEEYEHAKKLIIFLNENNVPVQLTSISAPEHKFEGLTQIFQKAYEHEQHISESINNIVDHAIKSKDHATFNFLQWYVAEQHEEEVLFKDILDKIELIGNENHGLYLADQYVKGIAKSRKS

SEQ ID NO: 4885 - protein, 1379 aa, Artificial Sequence
  SARS-CoV-2/Greece/16/2020__EPI_ISL_418265 spike protein (1-1211)(K986P_V987P_P1069F) Ferritin construct
MFVFLVLLPLVSSQCVNLTTRTQLPPAYTNSFTRGVYYPDKVFRSSVLHSTQDLFLPFFSNVTWFHAIHVSGTNGTKRFDNPVLPFNDGVYFASTEKSNIIRGWIFGTTLDSKTQSLLIVNNATNVVIKVCEFQFCNDPFLGVYYHKNNKSWMESEFRVYSSANNCTFEYVSQPFLMDLEGKQGNFKNLREFVFKNVDGYFKIYSKHTPINLVRDLPQGFSALEPLVDLPIGINITRFQTLLALHRSYLTPGDSSSGWTAGAAAYYVGYLQPRTFLLKYNENGTITDAVDCALDPLSETKCTLKSFTVEKGIYQTSNFRVQPTESIVRFPNITNLCPFGEVFNATRFASVYAWNRKRISNCVADYSVLYNSASFSTFKCYGVSPTKLNDLCFTNVYADSFVIRGDEVRQIAPGQTGKIADYNYKLPDDFTGCVIAWNSNNLDSKVGGNYNYLYRLFRKSNLKPFERDISTEIYQAGSTPCNGVEGFNCYFPLQSYGFQPTNGVGYQPYRVVVLSFELLHAPATVCGPKKSTNLVKNKCVNFNFNGLTGTGVLTESNKKFLPFQQFGRDIADTTDAVRDPQTLEILDITPCSFGGVSVITPGTNTSNQVAVLYQDVNCTEVPVAIHADQLTPTWRVYSTGSNVFQTRAGCLIGAEHVNNSYECDIPIGAGICASYQTQTNSPRRARSVASQSIIAYTMSLGAENSVAYSNNSIAIPTNFTISVTTEILPVSMTKTSVDCTMYICGDSTECSNLLLQYGSFCTQLNRALTGIAVEQDKNTQEVFAQVKQIYKTPPIKDFGGFNFSQILPDPSKPSKRSFIEDLLFNKVTLADAGFIKQYGDCLGDIAARDLICAQKFNGLTVLPPLLTDEMIAQYTSALLAGTITSGWTFGAGAALQIPFAMQMAYRFNGIGVTQNVLYENQKLIANQFNSAIGKIQDSLSSTASALGKLQDVVNQNAQALNTLVKQLSSNFGAISSVLNDILSRLDPPEAEVQIDRLITGRLQSLQTYVTQQLIRAAEIRASANLAATKMSECVLGQSKRVDFCGKGYHLMSFPQSAPHGVVFLHVTYVFAQEKNFTTAPAICHDGKAHFPREGVFVSNGTHWFVTQRNFYEPQIITTDNTFVSGNCDVVIGIVNNTVYDPLQPELDSFKEELDKYFKNHTSPDVDLGDISGINASVVNIQKEIDRLNEVAKNLNESLIDLQELGKYEQYIKGGGGSDIIKLLNEQVNKEMQSSNLYMSMSSWCYTHSLDGAGLFLFDHAAEEYEHAKKLIIFLNENNVPVQLTSISAPEHKFEGLTQIFQKAYEHEQHISESINNIVDHAIKSKDHATFNFLQWYVAEQHEEEVLFKDILDKIELIGNENHGLYLADQYVKGIAKSRKS

SEQ ID NO: 4886 - protein, 1379 aa, Artificial Sequence
  SARS-CoV-2/Iceland/319/2020__EPI_ISL_417648 spike protein (1-1211)(K986P_V987P_P1069F) Ferritin construct
MFVFLVLLPLVSSQCVNLTTRTQLPPAYTNSFTRGVYYPDKVFRSSVLHSTQDLFLPFFSNVTWFHAIHVSGTNGTKRFDNPVLPFNDGVYFASTEKSNIIRGWIFGTTLDSKTQSLLIVNNATNVVIKVCEFQFCNDPFLGVYYHKNNKSWMESEFRVYSSANNCTFEYVSQPFLIDLEGKQGNFKNLREFVFKNIDGYFKIYSKHTPINLVRDLPQGFSALEPLVDLPIGINITRFQTLLALHRSYLTPGDSSSGWTAGAAAYYVGYLQPRTFLLKYNENGTITDAVDCALDPLSETKCTLKSFTVEKGIYQTSNFRVQPTESIVRFPNITNLCPFGEVFNATRFASVYAWNRKRISNCVADYSVLYNSASFSTFKCYGVSPTKLNDLCFTNVYADSFVIRGDEVRQIAPGQTGKIADYNYKLPDDFTGCVIAWNSNNLDSKVGGNYNYLYRLFRKSNLKPFERDISTEIYQAGSTPCNGVEGFNCYFPLQSYGFQPTNGVGYQPYRVVVLSFELLHAPATVCGPKKSTNLVKNKCVNFNFNGLTGTGVLTESNKKFLPFQQFGRDIADTTDAVRDPQTLEILDITPCSFGGVSVITPGTNTSNQVAVLYQGVNCTEVPVAIHADQLTPTWRVYSTGSNVFQTRAGCLIGAEHVNNSYECDIPIGAGICASYQTQTNSPRRARSVASQSIIAYTMSLGAENSVAYSNNSIAIPTNFTISVTTEILPVSMTKTSVDCTMYICGDSTECSNLLLQYGSFCTQLNRALTGIAVEQDKNTQEVFAQVKQIYKTPPIKDFGGFNFSQILPDPSKPSKRSFIEDLLFNKVTLADAGFIKQYGDCLGDIAARDLICAQKFNGLTVLPPLLTDEMIAQYTSALLAGTITSGWTFGAGAALQIPFAMQMAYRFNGIGVTQNVLYENQKLIANQFNSAIGKIQDSLSSTASALGKLQDVVNQNAQALNTLVKQLSSNFGAISSVLNDILSRLDPPEAEVQIDRLITGRLQSLQTYVTQQLIRAAEIRASANLAATKMSECVLGQSKRVDFCGKGYHLMSFPQSAPHGVVFLHVTYVFAQEKNFTTAPAICHDGKAHFPREGVFVSNGTHWFVTQRNFYEPQIITTDNTFVSGNCDVVIGIVNNTVYDPLQPELDSFKEELDKYFKNHTSPDVDLGDISGINASVVNIQKEIDRLNEVAKNLNESLIDLQELGKYEQYIKGGGGSDIIKLLNEQVNKEMQSSNLYMSMSSWCYTHSLDGAGLFLFDHAAEEYEHAKKLIIFLNENNVPVQLTSISAPEHKFEGLTQIFQKAYEHEQHISESINNIVDHAIKSKDHATFNFLQWYVAEQHEEEVLFKDILDKIELIGNENHGLYLADQYVKGIAKSRKS

SEQ ID NO: 4887 - protein, 1379 aa, Artificial Sequence
  SARS-CoV-2/Congo/94/2020__EPI_ISL_417947 spike protein (1-1211)(K986P_V987P_P1069F) Ferritin construct
MFVFLVLLPLVSSQCVNLTTRTQLPPAYTNSFTRGVYYPDKVFRSSVLHSTQDLFLPFFSNVTWFHAIHVSGTNGTKRFDNPVLPFNDGVYFASTEKSNIIRGWIFGTTLDSKTQSLLIVNNATNVVIKVCEFQFCNDPFLGVYYHKNNKSWMESEFRVYSSANNCTFEYVSQPFLMDLEGKQGNFKNLREFVFKNIDGYFKIYSKHTPINLVRDLPQGFSALEPLVDLPIGINITRFQTLLALHRSYLTPGDSSSGWTAGAAAYYVGYLQPRTFLLKYNENGTITDAVDCALDPLSETKCTLKSFTVEKGIYQTSNFRVQPTESIVRFPNITNLCPFGEVFNATRFASVYAWNRKRISNCVADYSVLYNSASFSTFKCYGVSPTKLNDLCFTNVYADSFVIRGDEVRQIAPGQTGKIADYNYKLPDDFTGCVIAWNSNNLDSKVGGNYNYLYRLFRKSNLKPFERDISTEIYQAGSTPCNGVEGFNCYFPLQSYGFQPTNGVGYQPYRVVVLSFELLHAPATVCGPKKSTNLVKNKCVNFNFNGLTGTGVLTESNKKFLPFQQFGRDIADTTDAVRDPQTLEILDITPCSFGGVSVITPGTNTSNQVAVLYQGVNCTEVPVAIHADQLTPTWRVYSTGSNVFQTRAGCLIGAEHVNNSYECDIPIGAGICASYQTQTNSPRRARSVASQSIIAYTMSLGAENSVAYSNNSIAIPTNFTISVTTEILPVSMTKTSVDCTMYICGDSTECSNLLLQYGSFCTQLNRALTGIAVEQDKNTQEVFAQVKQIYKTPPIKDFGGFNFSQILPDPSKPSKRSFIEDILFNKVTLADAGFIKQYGDCLGDIAARDLICAQKFNGLTVLPPLLTDEMIAQYTSALLAGTITSGWTFGAGAALQIPFAMQMAYRFNGIGVTQNVLYENQKLIANQFNSAIGKIQDSLSSTASALGKLQDVVNQNAQALNTLVKQLSSNFGAISSVLNDILSRLDPPEAEVQIDRLITGRLQSLQTYVTQQLIRAAEIRASANLAATKMSECVLGQSKRVDFCGKGYHLMSFPQSAPHGVVFLHVTYVFAQEKNFTTAPAICHDGKAHFPREGVFVSNGTHWFVTQRNFYEPQIITTDNTFVSGNCDVVIGIVNNTVYDPLQPELDSFKEELDKYFKNHTSPDVDLGDISGINASVVNIQKEIDRLNEVAKNLNESLIDLQELGKYEQYIKGGGGSDIIKLLNEQVNKEMQSSNLYMSMSSWCYTHSLDGAGLFLFDHAAEEYEHAKKLIIFLNENNVPVQLTSISAPEHKFEGLTQIFQKAYEHEQHISESINNIVDHAIKSKDHATFNFLQWYVAEQHEEEVLFKDILDKIELIGNENHGLYLADQYVKGIAKSRKS

SEQ ID NO: 4888 - protein, 1379 aa, Artificial Sequence
  SARS-CoV-2/Congo/158/2020__EPI_ISL_417950 spike protein (1-1211)(K986P_V987P_P1069F) Ferritin construct
MFVFLVLLPLVSSQCVNLTTRTQLPPAYTNSFTRGVYYPDKVFRSSVLHSTQDLFLPFFSNVTWFHAIHVSGTNGTKRFDNPVLPFNDGVYFASTEKSNIIRGWIFGTTLDSKTQSLLIVNNATNVVIKVCEFQFCNDPFLGVYYHKNNKSWMESEFRVYSSANNCTFEYVSQPFLMDLEGKQGNFKNLREFVFKNIDGYFKIYSKHTPINLVRDLPQGFSALEPLVDLPIGINITRFQTLLALHRSYLTPGDSSSGWTAGAAAYYVGYLQPRTFLLKYNENGTITDAVDCALDPLSETKCTLKSFTVEKGIYQTSNFRVQPTESIVRFPNITNLCPFGEVFNATRFASVYAWNRKRISNCVADYSVLYNSASFSTFKCYGVSPTKLNDLCFTNVYADSFVIRGDEVRQIAPGQTGKIADYNYKLPDDFTGCVIAWNSNNLDSKVGGNYNYLYRLFRKSNLKPFERDISTEIYQAGSTPCNGVEGFNCYFPLQSYGFQPTNGVGYQPYRVVVLSFELLHAPATVCGPKKSTNLVKNKCVNFNFNGLTGTGVLTESNKKFLPFQQFGRDIADTTDAVRDPQTLEILDITPCSFGGVSVITPGTNTSNQVAVLYQDVNCTEVPVAIHADQLTPTWRVYSTGSNVFQTRAGCLIGAEHVNNSYECDIPIGAGICASYQTQTNSPRRARSVASQSIIAYTMSLGAENSVAYSNNSIAIPTNFTISVTTEILPVSMTKTSVDCTMYICGDSTECSNLLLQYGSFCTQLNRALTGIAVEQDKNTQEVFAQVKQIYKTPPIKDFGGFNFSQILPDPSKPSKRSFIEDLLFNKVTLADAGFIKQYGDCLGDIAARDLICAQKFNGLTVLPPLLTDEMIAQYTSALLAGTITSGWTFGAGAALQIPFAMQMAYRFNGIGVTQNVLYENQKLIANQFNSAIGKIQDSLSSTASALGKLQDVVNQNAQALNTLVKQLSSNFGAISSVLNDILSRLDPPEAEVQIDRLITGRLQSLQTYVTQQLIRAAEIRASANLAATKMSECVLGQSKRVDFCGKGYHLMSFPQSAPHGVVFLHVTYVFAQEKNFTTAPAICHDGKAHFPREGVFVSNGTHWFVTQRNFYEPQIITTDNTFLSGNCDVVIGIVNNTVYDPLQPELDSFKEELDKYFKNHTSPDVDLGDISGINASVVNIQKEIDRLNEVAKNLNESLIDLQELGKYEQYIKGGGGSDIIKLLNEQVNKEMQSSNLYMSMSSWCYTHSLDGAGLFLFDHAAEEYEHAKKLIIFLNENNVPVQLTSISAPEHKFEGLTQIFQKAYEHEQHISESINNIVDHAIKSKDHATFNFLQWYVAEQHEEEVLFKDILDKIELIGNENHGLYLADQYVKGIAKSRKS

SEQ ID NO: 4889 - protein, 1379 aa, Artificial Sequence
  SARS-CoV-2/USA/UT-00034/2020__EPI_ISL_417977 spike protein (1-1211)(K986P_V987P_P1069F) Ferritin construct
MFVFLVLLPLVSSQCVNLTTRTQLPPAYTNSFTRGVYYPDKVFRSSVLHSTQDLFLPFFSNVTWFHAIHVSGTNGTKRFDNPVLPFNDGVYFASTEKSNIIRGWIFGTTLDSKTQSLLIVNNATNVVIKVCEFQFCNDPFLGVYYYKNNKSWMESEFRVYSSANNCTFEYVSQPFLMDLEGKQGNFKNLREFVFKNIDGYFKIYSKHTPINLVRDLPQGFSALEPLVDLPIGINITRFQTLLALHRSYLTPGDSSSGWTAGAAAYYVGYLQPRTFLLKYNENGTITDAVDCALDPLSETKCTLKSFTVEKGIYQTSNFRVQPTESIVRFPNITNLCPFGEVFNATRFASVYAWNRKRISNCVADYSVLYNSASFSTFKCYGVSPTKLNDLCFTNVYADSFVIRGDEVRQIAPGQTGKIADYNYKLPDDFTGCVIAWNSNNLDSKVGGNYNYLYRLFRKSNLKPFERDISTEIYQAGSTPCNGVEGFNCYFPLQSYGFQPTNGVGYQPYRVVVLSFELLHAPATVCGPKKSTNLVKNKCVNFNFNGLTGTGVLTESNKKFLPFQQFGRDIADTTDAVRDPQTLEILDITPCSFGGVSVITPGTNTSNQVAVLYQGVNCTEVPVAIHADQLTPTWRVYSTGSNVFQTRAGCLIGAEHVNNSYECDIPIGAGICASYQTQTNSPRRARSVASQSIIAYTMSLGAENSVAYSNNSIAIPTNFTISVTTEILPVSMTKTSVDCTMYICGDSTECSNLLLQYGSFCTQLNRALTGIAVEQDKNTQEVFAQVKQIYKTPPIKDFGGFNFSQILPDPSKPSKRSFIEDLLFNKVTLADAGFIKQYGDCLGDIAARDLICAQKFNGLTVLPPLLTDEMIAQYTSALLAGTITSGWTFGAGAALQIPFAMQMAYRFNGIGVTQNVLYENQKLIANQFNSAIGKIQDSLSSTASALGKLQDVVNQNAQALNTLVKQLSSNFGAISSVLNDILSRLDPPEAEVQIDRLITGRLQSLQTYVTQQLIRAAEIRASANLAATKMSECVLGQSKRVDFCGKGYHLMSFPQSAPHGVVFLHVTYVFAQEKNFTTAPAICHDGKAHFPREGVFVSNGTHWFVTQRNFYEPQIITTDNTFVSGNCDVVIGIVNNTVYDPLQPELDSFKEELDKYFKNHTSPDVDLGDISGINASVVNIQKEIDRLNEVAKNLNESLIDLQELGKYEQYIKGGGGSDIIKLLNEQVNKEMQSSNLYMSMSSWCYTHSLDGAGLFLFDHAAEEYEHAKKLIIFLNENNVPVQLTSISAPEHKFEGLTQIFQKAYEHEQHISESINNIVDHAIKSKDHATFNFLQWYVAEQHEEEVLFKDILDKIELIGNENHGLYLADQYVKGIAKSRKS

SEQ ID NO: 4890 - protein, 1379 aa, Artificial Sequence
  SARS-CoV-2/USA/UT-00033/2020__EPI_ISL_417976 spike protein (1-1211)(K986P_V987P_P1069F) Ferritin construct
MFVFLVLLPLVSSQCVNLTTRTQLPPAYTNSFTRGVYYPDKVFRSSVLHSTQDLFLPFFSNVTWFHAIHVSGTNGTKRFDNPVLPFNDGVYFASTEKSNIIRGWIFGTTLDSKTQSLLIVNNATNVVIKVCEFQFCNDPFLGVYYHKNNKSWMESEFRVYSSANNCTFEYVSQPFLMDLEGKQGNFKNLREFVFKNIDGYFKIYSKHTPINLVRDLPQGFSALEPLVDLPIGINITRFQTLLALHRSYLTPGDSSSGLTAGAAAYYVGYLQPRTFLLKYNENGTITDAVDCALDPLSETKCTLKSFTVEKGIYQTSNFRVQPTESIVRFPNITNLCPFGEVFNATRFASVYAWNRKRISNCVADYSVLYNSASFSTFKCYGVSPTKLNDLCFTNVYADSFVIRGDEVRQIAPGQTGKIADYNYKLPDDFTGCVIAWNSNNLDSKVGGNYNYLYRLFRKSNLKPFERDISTEIYQAGSTPCNGVEGFNCYFPLQSYGFQPTNGVGYQPYRVVVLSFELLHAPATVCGPKKSTNLVKNKCVNFNFNGLTGTGVLTESNKKFLPFQQFGRDIADTTDAVRDPQTLEILDITPCSFGGVSVITPGTNTSNQVAVLYQGVNCTEVPVAIHADQLTPTWRVYSTGSNVFQTRAGCLIGAEHVNNSYECDIPIGAGICASYQTQTNSPRRARSVASQSIIAYTMSLGAENSVAYSNNSIAIPTNFTISVTTEILPVSMTKTSVDCTMYICGDSTECSNLLLQYGSFCTQLNRALTGIAVEQDKNTQEVFAQVKQIYKTPPIKDFGGFNFSQILPDPSKPSKRSFIEDLLFNKVTLADAGFIKQYGDCLGDIAARDLICAQKFNGLTVLPPLLTDEMIAQYTSALLAGTITSGWTFGAGAALQIPFAMQMAYRFNGIGVTQNVLYENQKLIANQFNSAIGKIQDSLSSTASALGKLQDVVNQNAQALNTLVKQLSSNFGAISSVLNDILSRLDPPEAEVQIDRLITGRLQSLQTYVTQQLIRAAEIRASANLAATKMSECVLGQSKRVDFCGKGYHLMSFPQSAPHGVVFLHVTYVFAQEKNFTTAPAICHDGKAHFPREGVFVSNGTHWFVTQRNFYEPQIITTDNTFVSGNCDVVIGIVNNTVYDPLQPELDSFKEELDKYFKNHTSPDVDLGDISGINASVVNIQKEIDRLNEVAKNLNESLIDLQELGKYEQYIKGGGGSDIIKLLNEQVNKEMQSSNLYMSMSSWCYTHSLDGAGLFLFDHAAEEYEHAKKLIIFLNENNVPVQLTSISAPEHKFEGLTQIFQKAYEHEQHISESINNIVDHAIKSKDHATFNFLQWYVAEQHEEEVLFKDILDKIELIGNENHGLYLADQYVKGIAKSRKS

SEQ ID NO: 4891 - protein, 1379 aa, Artificial Sequence
  SARS-CoV-2/USA/WI-13/2020__EPI_ISL_417516 spike protein (1-1211)(K986P_V987P_P1069F) Ferritin construct
MFVFLVLLPLVSSQCVNLTTRTQLPPAYTNSFTRGVYYPDKVFRSSVLHSTQDLFLPFFSNVTWFHAIHVSGTNGTKRFDNPVLPFNDGVYFASTEKSNIIRGWIFGTTLDSKTQSLLIVNNATNVVIKVCEFQFCNDPFLGVYYHKNNKSWMESEFRVYSSANNCTFEYVSQPFLMDLEGKQGNFKNLREFVFKNIDGYFKIYSKHTPINLVRDLPQGFSALEPLVDLPIGINITRFQTLLALHRSYLTPGDSSSGWTAGAAAYYVGYLQPRTFLLKYNENGTITDAVDCALDPLSETKCTLKSFTVEKGIYQTSNFRVLPTESIVRFPNITNLCPFGEVFNATRFASVYAWNRKRISNCVADYSVLYNSASFSTFKCYGVSPTKLNDLCFTNVYADSFVIRGDEVRQIAPGQTGKIADYNYKLPDDFTGCVIAWNSNNLDSKVGGNYNYLYRLFRKSNLKPFERDISTEIYQAGSTPCNGVEGFNCYFPLQSYGFQPTNGVGYQPYRVVVLSFELLHAPATVCGPKKSTNLVKNKCVNFNFNGLTGTGVLTESNKKFLPFQQFGRDIADTTDAVRDPQTLEILDITPCSFGGVSVITPGTNTSNQVAVLYQGVNCTEVPVAIHADQLTPTWRVYSTGSNVFQTRAGCLIGAEHVNNSYECDIPIGAGICASYQTQTNSPRRARSVASQSIIAYTMSLGAENSVAYSNNSIAIPTNFTISVTTEILPVSMTKTSVDCTMYICGDSTECSNLLLQYGSFCTQLNRALTGIAVEQDKNTQEVFAQVKQIYKTPPIKDFGGFNFSQILPDPSKPSKRSFIEDLLFNKVTLADAGFIKQYGDCLGDIAARDLICAQKFNGLTVLPPLLTDEMIAQYTSALLAGTITSGWTFGAGAALQIPFAMQMAYRFNGIGVTQNVLYENQKLIANQFNSAIGKIQDSLSSTASALGKLQDVVNQNAQALNTLVKQLSSNFGAISSVLNDILSRLDPPEAEVQIDRLITGRLQSLQTYVTQQLIRAAEIRASANLAATKMSECVLGQSKRVDFCGKGYHLMSFPQSAPHGVVFLHVTYVFAQEKNFTTAPAICHDGKAHFPREGVFVSNGTHWFVTQRNFYEPQIITTDNTFVSGNCDVVIGIVNNTVYDPLQPELDSFKEELDKYFKNHTSPDVDLGDISGINASVVNIQKEIDRLNEVAKNLNESLIDLQELGKYEQYIKGGGGSDIIKLLNEQVNKEMQSSNLYMSMSSWCYTHSLDGAGLFLFDHAAEEYEHAKKLIIFLNENNVPVQLTSISAPEHKFEGLTQIFQKAYEHEQHISESINNIVDHAIKSKDHATFNFLQWYVAEQHEEEVLFKDILDKIELIGNENHGLYLADQYVKGIAKSRKS

SEQ ID NO: 4892 - protein, 1378 aa, Artificial Sequence
  SARS-CoV-2/India/1-27/2020__EPI_ISL_413522 spike protein (1-1210)(K985P_V986P_P1068F) Ferritin construct
MFVFLVLLPLVSSQCVNLTTRTQLPPAYTNSFTRGVYYPDKVFRSSVLHSTQDLFLPFFSNVTWFHAIHVSGTNGTKRFDNPVLPFNDGVYFASTEKSNIIRGWIFGTTLDSKTQSLLIVNNATNVVIKVCEFQFCNDPFLGVYHKNNKSWMESEFRVYSSANNCTFEYVSQPFLMDLEGKQGNFKNLREFVFKNIDGYFKIYSKHTPINLVRDLPQGFSALEPLVDLPIGINITRFQTLLALHRSYLTPGDSSSGWTAGAAAYYVGYLQPRTFLLKYNENGTITDAVDCALDPLSETKCTLKSFTVEKGIYQTSNFRVQPTESIVRFPNITNLCPFGEVFNATRFASVYAWNRKRISNCVADYSVLYNSASFSTFKCYGVSPTKLNDLCFTNVYADSFVIRGDEVIQIAPGQTGKIADYNYKLPDDFTGCVIAWNSNNLDSKVGGNYNYLYRLFRKSNLKPFERDISTEIYQAGSTPCNGVEGFNCYFPLQSYGFQPTNGVGYQPYRVVVLSFELLHAPATVCGPKKSTNLVKNKCVNFNFNGLTGTGVLTESNKKFLPFQQFGRDIADTTDAVRDPQTLEILDITPCSFGGVSVITPGTNTSNQVAVLYQDVNCTEVPVAIHADQLTPTWRVYSTGSNVFQTRAGCLIGAEHVNNSYECDIPIGAGICASYQTQTNSPRRARSVASQSIIAYTMSLGAENSVAYSNNSIAIPTNFTISVTTEILPVSMTKTSVDCTMYICGDSTECSNLLLQYGSFCTQLNRALTGIAVEQDKNTQEVFAQVKQIYKTPPIKDFGGFNFSQILPDPSKPSKRSFIEDLLFNKVTLADAGFIKQYGDCLGDIAARDLICAQKFNGLTVLPPLLTDEMIAQYTSALLAGTITSGWTFGAGAALQIPFAMQMAYRFNGIGVTQNVLYENQKLIANQFNSAIGKIQDSLSSTASALGKLQDVVNQNAQALNTLVKQLSSNFGAISSVLNDILSRLDPPEAEVQIDRLITGRLQSLQTYVTQQLIRAAEIRASANLAATKMSECVLGQSKRVDFCGKGYHLMSFPQSAPHGVVFLHVTYVFAQEKNFTTAPAICHDGKAHFPREGVFVSNGTHWFVTQRNFYEPQIITTDNTFVSGNCDVVIGIVNNTVYDPLQPELDSFKEELDKYFKNHTSPDVDLGDISGINASVVNIQKEIDRLNEVAKNLNESLIDLQELGKYEQYIKGGGGSDIIKLLNEQVNKEMQSSNLYMSMSSWCYTHSLDGAGLFLFDHAAEEYEHAKKLIIFLNENNVPVQLTSISAPEHKFEGLTQIFQKAYEHEQHISESINNIVDHAIKSKDHATFNFLQWYVAEQHEEEVLFKDILDKIELIGNENHGLYLADQYVKGIAKSRKS

SEQ ID NO: 4893 - protein, 1373 aa, Artificial Sequence
  SARS-CoV-2/pangolin/Guangxi/P4L/2017__EPI_ISL_410538 spike protein (1-1205)(K980P_V981P_P1063F) Ferritin construct
MFVFLFVLPLVSSQCVNLTTRTGIPPGYTNSSTRGVYYPDKVFRSSILHLTQDLFLPFFSNVTWFNTINYQGGFKKFDNPVLPFNDGVYFASTEKSNIIRGWIFGTTLDARTQSLLIVNNATNVVIKVCEFQFCTDPFLGVYYHNNNKTWVENEFRVYSSANNCTFEYISQPFLMDLEGKQGNFKNLREFVFKNVDGYFKIYSKHTPIDLVRDLPRGFAALEPLVDLPIGINITRFQTLLALHRSYLTPGNLESGWTTGAAAYYVGYLQQRTFLLSYNQNGTITDAVDCSLDPLSETKCTLKSLTVEKGIYQTSNFRVQPTISIVRFPNITNLCPFGEVFNASKFASVYAWNRKRISNCVADYSVLYNSTSFSTFKCYGVSPTKLNDLCFTNVYADSFVVKGDEVRQIAPGQTGVIADYNYKLPDDFTGCVIAWNSVKQDALTGGNYGYLYRLFRKSKLKPFERDISTEIYQAGSTPCNGQVGLNCYYPLERYGFHPTTGVNYQPFRVVVLSFELLNGPATVCGPKLSTTLVKDKCVNFNFNGLTGTGVLTTSKKQFLPFQQFGRDISDTTDAVRDPQTLEILDITPCSFGGVSVITPGTNTSNQVAVLYQDVNCTEVPMAIHAEQLTPAWRVYSAGANVFQTRAGCLVGAEHVNNSYECDIPVGAGICASYHSMSSLRSVNQRSIIAYTMSLGAENSVAYSNNSIAIPTNFTISVTTEILPVSMTKTSVDCTMYICGDSIECSNLLLQYGSFCTQLNRALTGIAVEQDKNTQEVFAQVKQIYKTPPIKDFGGFNFSQILPDPSKPSKRSFIEDLLFNKVTLADAGFIKQYGDCLGDIAARDLICAQKFNGLTVLPPLLTDEMIAQYTSALLAGTITSGWTFGAGAALQIPFAMQMAYRFNGIGVTQNVLYENQKLIANQFNSAIGKIQDSLSSTASALGKLQDVVNQNAQALNTLVKQLSSNFGAISSVLNDILSRLDPPEAEVQIDRLITGRLQSLQTYVTQQLIRAAEIRASANLAATKMSECVLGQSKRVDFCGKGYHLMSFPQSAPHGVVFLHVTYVFAQEKNFTTAPAICHEGKAHFPREGVFVSNGTHWFITQRNFYEPQIITTDNTFVSGSCDVVIGIVNNTVYDPLQPELDSFKEELDKYFKNHTSPDVDLGDISGINASVVNIQKEIDRLNEVAKNLNESPIDLQELGKYEQYIKGGGGSDIIKLLNEQVNKEMQSSNLYMSMSSWCYTHSLDGAGLFLFDHAAEEYEHAKKLIIFLNENNVPVQLTSISAPEHKFEGLTQIFQKAYEHEQHISESINNIVDHAIKSKDHATFNFLQWYVAEQHEEEVLFKDILDKIELIGNENHGLYLADQYVKGIAKSRKS

SEQ ID NO: 4894 - protein, 1373 aa, Artificial Sequence
  SARS-CoV-2/pangolin/Guangxi/P5L/2017__EPI_ISL_410540 spike protein (1-1205)(K980P_V981P_P1063F) Ferritin construct
MFVFLFVLPLVSSQCVNLTTRTGIPPGYTNSSTRGVYYPDKVFRSSILHLTQDLFLPFFSNVTWFNTINYQGGFKKFDNPVLPFNDGVYFASTEKSNIIRGWIFGTTLDARTQSLLIVNNATNVVIKVCEFQFCTDPFLGVYYHNNNKTWVENEFRVYSSANNCTFEYISQPFLMDLEGKQGNFKNLREFVFKNVDGYFKIYSKHTPIDLVRDLPRGFAALEPLVDLPIGINITRFQTLLALHRSYLTPGKLESGWTTGAAAYYVGYLQQRTFLLSYNQNGTITDAVDCSLDPLSETKCTLKSLTVEKGIYQTSNFRVQPTISIVRFPNITNLCPFGEVFNASKFASVYAWNRKRISNCVADYSVLYNSTSFSTFKCYGVSPTKLNDLCFTNVYADSFVVKGDEVRQIAPGQTGVIADYNYKLPDDFTGCVIAWNSVKQDALTGGNYGYLYRLFRKSKLKPFERDISTEIYQAGSTPCNGQVGLNCYYPLERYGFHPTTGVNYQPFRVVVLSFELLNGPATVCGPKLSTTLVKDKCVNFNFNGLTGTGVLTTSKKQFLPFQQFGRDISDTTDAVRDPQTLEILDITPCSFGGVSVITPGTNTSNQVAVLYQDVNCTEVPMAIHAEQLTPAWRVYSAGANVFQTRAGCLVGAEHVNNSYECDIPVGAGICASYHSMSSFRSVNQRSIIAYTMSLGAENSVAYSNNSIAIPTNFTISVTTEILPVSMTKTSVDCTMYICGDSIECSNLLLQYGSFCTQLNRALTGIAVEQDKNTQEVFAQVKQIYKTPPIKDFGGFNFSQILPDPSKPSKRSFIEDLLFNKVTLADAGFIKQYGDCLGDIAARDLICAQKFNGLTVLPPLLTDEMIAQYTSALLAGTITSGWTFGAGAALQIPFAMQMAYRFNGIGVTQNVLYENQKLIANQFNSAIGKIQDSLSSTASALGKLQDVVNQNAQALNTLVKQLSSNFGAISSVLNDILSRLDPPEAEVQIDRLITGRLQSLQTYVTQQLIRAAEIRASANLAATKMSECVLGQSKRVDFCGKGYHLMSFPQSAPHGVVFLHVTYVFAQEKNFTTAPAICHEGKAHFPREGVFVSNGTHWFITQRNFYEPQIITTDNTFVSGSCDVVIGIVNNTVYDPLQPELDSFKEELDKYFKNHTSPDVDLGDISGINASVVNIQKEIDRLNEVAKNLNESLIDLQELGKYEQYIKGGGGSDIIKLLNEQVNKEMQSSNLYMSMSSWCYTHSLDGAGLFLFDHAAEEYEHAKKLIIFLNENNVPVQLTSISAPEHKFEGLTQIFQKAYEHEQHISESINNIVDHAIKSKDHATFNFLQWYVAEQHEEEVLFKDILDKIELIGNENHGLYLADQYVKGIAKSRKS

SEQ ID NO: 4895 - protein, 1373 aa, Artificial Sequence
  SARS-CoV-2/pangolin/Guangxi/P5E/2017__EPI_ISL_410541 spike protein (1-1205)(K980P_V981P_P1063F) Ferritin construct
MFVFLFVLPLVSSQCVNLTTRTGIPPGYTNSSTRGVYYPDKVFRSSILHLTQDLFLPFFSNVTWFNTITYQGGSKKFDNPVLPFNDGVYFASTEKSNIIRGWIFGTTLDARTQSLLIVNNATNVVIKVCEFQFCTDPFLGVYYHNNNKTWVENEFRVYSSANNCTFEYISQPFLMDLEGKQGNFKNLREFVFKNVDGYFKIYSKHTPIDLVRDLPRGFAALEPLVDLPIGINITRFQTLLALHRSYLTPGKLESGWTTGAAAYYVGYLQQRTFLLSYNQNGTITDAVDCSLDPLSETKCTLKSLTVEKGIYQTSNFRVQPTISIVRFPNITNLCPFGEVFNASKFASVYAWNRKRISNCVADYSVLYNSTSFSTFKCYGVSPTKLNDLCFTNVYADSFVVKGDEVRQIAPGQTGVIADYNYKLPDDFTGCVIAWNSVKQDALTGDNYGYLYRLFRKSKLKPFERDISTEIYQAGSTPCNGQVGLNCYYPLERYGFHPTTGVNYQPFRVVVLSFELLNGPATVCGPKLSTTLVKDKCVNFNFNGLTGTGVLTTSKKQFLPFQQFGRDISDTTDAVRDPQTLEILDITPCSFGGVSVITPGTNTSNQVAVLYQDVNCTEVPMAIHAEQLTPAWRVYSAGANVFQTRAGCLVGAEHVNNSYECDIPVGAGICASYHSMSSFRSVNQRSIIAYTMSLGAENSVAYSNNSIAIPTNFTISVTTEILPVSMTKTSVDCTMYICGDSIECSNLLLQYGSFCTQLNRALTGIAVEQDKNTQEVFAQVKQIYKTPPIKDFGGFNFSQILPDPSKPSKRSFIEDLLFNKVTLADAGFIKQYGDCLGDIAARDLICAQKFNGLTVLPPLLTDEMIAQYTSALLAGTITSGWTFGAGAALQIPFAMQMAYRFNGIGVTQNVLYENQKLIANQFNSAIGKIQDSLSSTASALGKLQDVVNQNAQALNTLVKQLSSNFGAISSVLNDILSRLDPPEAEVQIDRLITGRLQSLQTYVTQQLIRAAEIRASANLAATKMSECVLGQSKRVDFCGKGYHLMSFPQSAPHGVVFLHVTYVFAQEKNFTTAPAICHEGKAHFPREGVFVSNGTHWFITQRNFYEPQIITTDNTFVSGSCDVVIGIVNNTVYDPLQPELDSFKEELDKYFKNHTSPDVDLGDISGINASVVNIQKEIDRLNEVAKNLNESLIDLQELGKYEQYIKGGGGSDIIKLLNEQVNKEMQSSNLYMSMSSWCYTHSLDGAGLFLFDHAAEEYEHAKKLIIFLNENNVPVQLTSISAPEHKFEGLTQIFQKAYEHEQHISESINNIVDHAIKSKDHATFNFLQWYVAEQHEEEVLFKDILDKIELIGNENHGLYLADQYVKGIAKSRKS

SEQ ID NO: 4896 - protein, 1371 aa, Artificial Sequence
  SARS-CoV-2/pangolin/Guangxi/P1E/2017__EPI_ISL_410539 spike protein (1-1203)(K978P_V979P_P1061F) Ferritin construct
MFVFLFVLPLVSSQCVNLTTRTGIQPGYTNSSTRGVYYPDKVFRSSILHLTQDLFLPFFSNVTWFNTINYQGGFKKFDNPVLPFNDGVYFASTEKSNIIRGWIFGTTLDARTQSLLIVNNATNVVIKVCEFQFCTDPFLGVYYHNNNKTWVENEFRVYSSANNCTFEYISQPFLMDLEGKQGNFKNLREFVFKNVDGYFKIYSKHTPIDLVRDLPRGFAALEPLVDLPIGINITRFQTLLALHRSYLTPGKLESGWTTGAAAYYVGYLQQRTFLLSYNQNGTITDAVDCSLDPLSETKCTLKSLTVEKGIYQTSNFRVQPTISIVRFPNITNLCPFGEVFNASKFASVYAWNRKRISNCVADYSVLYNSTSFSTFKCYGVSPTKLNDLCFTNVYADSFVVKGDEVRQIAPGQTGVIADYNYKLPDDFTGCVIAWNSVKQDALTGGNYLYRLFRKSKLKPFERDISTEIYQAGSTPCNGQVGLNCYYPLERYGFHPTTGVNYQPFRVVVLSFELLNGPATVCGPKLSTTLVKDKCVNFNFNGLTGTGVLTTSKKQFLPFQQFGRDISDTTDAVRDPQTLEILDITPCSFGGVSVITPGTNTSNQVAVLYQDVNCTEVPMAIHAEQLTPAWRVYSAGANVFQTRAGCLVGAEHVNNSYECDIPVGAGICASYHSMSSLRSVNQRSIIAYTMSLGAENSVAYSNNSIAIPTNFTISVTTEILPVSMTKTSVDCTMYICGDSIECSNLLLQYGSFCTQLNRALTGIAVEQDKNTQEVFAQVKQIYKTPPIKDFGGFNFSQILPDPSKPSKRSFIEDLLFNKVTLADAGFIKQYGDCLGDIAARDLICAQKFNGLTVLPPLLTDEMIAQYTSALLAGTITSGWTFGAGAALQIPFAMQMAYRFNGIGVTQNVLYENQKLIANQFNSAIGKIQDSLSSTASALGKLQDVVNQNAQALNTLVKQLSSNFGAISSVLNDILSRLDPPEAEVQIDRLITGRLQSLQTYVTQQLIRAAEIRASANLAATKMSECVLGQSKRVDFCGKGYHLMSFPQSAPHGVVFLHVTYVFAQEKNFTTAPAICHEGKAHFPREGVFVSNGTHWFITQRNFYEPQIITTDNTFVSGSCDVVIGIVNNTVYDPLQPELDSFKEELDKYFKNHTSPDVDLGDISGINASVVNIQKEIDRLNEVAKNLNESLIDLQELGKYEQYIKGGGGSDIIKLLNEQVNKEMQSSNLYMSMSSWCYTHSLDGAGLFLFDHAAEEYEHAKKLIIFLNENNVPVQLTSISAPEHKFEGLTQIFQKAYEHEQHISESINNIVDHAIKSKDHATFNFLQWYVAEQHEEEVLFKDILDKIELIGNENHGLYLADQYVKGIAKSRKS

SEQ ID NO: 4897 - protein, 1379 aa, Artificial Sequence
  SARS-CoV-2/Wuhan/WIV05/2019__EPI_ISL_402128 spike protein (1-1211)(K986P_V987P_ H1048Q_H1064N_ H1083N_H1101N) Ferritin construct
MFVFLVLLPLVSSQCVNLTTRTQLPPAYTNSFTRGVYYPDKVFRSSVLHSTQDLFLPFFSNVTWFHAIHVSGTNGTKRFDNPVLPFNDGVYFASTEKSNIIRGWIFGTTLDSKTQSLLIVNNATNVVIKVCEFQFCNDPFLGVYYHKNNKSWMESEFRVYSSANNCTFEYVSQPFLMDLEGKQGNFKNLREFVFKNIDGYFKIYSKHTPINLVRDLPQGFSALEPLVDLPIGINITRFQTLLALHRSYLTPGDSSSGWTAGAAAYYVGYLQPRTFLLKYNENGTITDAVDCALDPLSETKCTLKSFTVEKGIYQTSNFRVQPTESIVRFPNITNLCPFGEVFNATRFASVYAWNRKRISNCVADYSVLYNSASFSTFKCYGVSPTKLNDLCFTNVYADSFVIRGDEVRQIAPGQTGKIADYNYKLPDDFTGCVIAWNSNNLDSKVGGNYNYLYRLFRKSNLKPFERDISTEIYQAGSTPCNGVEGFNCYFPLQSYGFQPTNGVGYQPYRVVVLSFELLHAPATVCGPKKSTNLVKNKCVNFNFNGLTGTGVLTESNKKFLPFQQFGRDIADTTDAVRDPQTLEILDITPCSFGGVSVITPGTNTSNQVAVLYQDVNCTEVPVAIHADQLTPTWRVYSTGSNVFQTRAGCLIGAEHVNNSYECDIPIGAGICASYQTQTNSPRRARSVASQSIIAYTMSLGAENSVAYSNNSIAIPTNFTISVTTEILPVSMTKTSVDCTMYICGDSTECSNLLLQYGSFCTQLNRALTGIAVEQDKNTQEVFAQVKQIYKTPPIKDFGGFNFSQILPDPSKPSKRSFIEDLLFNKVTLADAGFIKQYGDCLGDIAARDLICAQKFNGLTVLPPLLTDEMIAQYTSALLAGTITSGWTFGAGAALQIPFAMQMAYRFNGIGVTQNVLYENQKLIANQFNSAIGKIQDSLSSTASALGKLQDVVNQNAQALNTLVKQLSSNFGAISSVLNDILSRLDPPEAEVQIDRLITGRLQSLQTYVTQQLIRAAEIRASANLAATKMSECVLGQSKRVDFCGKGYQLMSFPQSAPHGVVFLNVTYVPAQEKNFTTAPAICNDGKAHFPREGVFVSNGTNWFVTQRNFYEPQIITTDNTFVSGNCDVVIGIVNNTVYDPLQPELDSFKEELDKYFKNHTSPDVDLGDISGINASVVNIQKEIDRLNEVAKNLNESLIDLQELGKYEQYIKGGGGSDIIKLLNEQVNKEMQSSNLYMSMSSWCYTHSLDGAGLFLFDHAAEEYEHAKKLIIFLNENNVPVQLTSISAPEHKFEGLTQIFQKAYEHEQHISESINNIVDHAIKSKDHATFNFLQWYVAEQHEEEVLFKDILDKIELIGNENHGLYLADQYVKGIAKSRKS

SEQ ID NO: 4898 - protein, 1375 aa, Artificial Sequence
  SARS-CoV-2/bat/Yunnan/RaTG13/2013__EPI_ISL_402131 spike protein (1-1207)(K982P_V983P_ H1044Q_H1060N_ H1079N_H1097N) Ferritin construct
MFVFLVLLPLVSSQCVNLTTRTQLPPAYTNSSTRGVYYPDKVFRSSVLHLTQDLFLPFFSNVTWFHAIHVSGTNGIKRFDNPVLPFNDGVYFASTEKSNIIRGWIFGTTLDSKTQSLLIVNNATNVVIKVCEFQFCNDPFLGVYYHKNNKSWMESEFRVYSSANNCTFEYVSQPFLMDLEGKQGNFKNLREFVFKNIDGYFKIYSKHTPINLVRDLPPGFSALEPLVDLPIGINITRFQTLLALHRSYLTPGDSSSGWTAGAAAYYVGYLQPRTFLLKYNENGTITDAVDCALDPLSETKCTLKSFTVEKGIYQTSNFRVQPTDSIVRFPNITNLCPFGEVFNATTFASVYAWNRKRISNCVADYSVLYNSTSFSTFKCYGVSPTKLNDLCFTNVYADSFVITGDEVRQIAPGQTGKIADYNYKLPDDFTGCVIAWNSKHIDAKEGGNFNYLYRLFRKANLKPFERDISTEIYQAGSKPCNGQTGLNCYYPLYRYGFYPTDGVGHQPYRVVVLSFELLNAPATVCGPKKSTNLVKNKCVNFNFNGLTGTGVLTESNKKFLPFQQFGRDIADTTDAVRDPQTLEILDITPCSFGGVSVITPGTNASNQVAVLYQDVNCTEVPVAIHADQLTPTWRVYSTGSNVFQTRAGCLIGAEHVNNSYECDIPIGAGICASYQTQTNSRSVASQSIIAYTMSLGAENSVAYSNNSIAIPTNFTISVTTEILPVSMTKTSVDCTMYICGDSTECSNLLLQYGSFCTQLNRALTGIAVEQDKNTQEVFAQVKQIYKTPPIKDFGGFNFSQILPDPSKPSKRSFIEDLLFNKVTLADAGFIKQYGDCLGDIAARDLICAQKFNGLTVLPPLLTDEMIAQYTSALLAGTITSGWTFGAGAALQIPFAMQMAYRFNGIGVTQNVLYENQKLIANQFNSAIGKIQDSLSSTASALGKLQDVVNQNAQALNTLVKQLSSNFGAISSVLNDILSRLDPPEAEVQIDRLITGRLQSLQTYVTQQLIRAAEIRASANLAATKMSECVLGQSKRVDFCGKGYQLMSFPQSAPHGVVFLNVTYVPAQEKNFTTAPAICNDGKAHFPREGVFVSNGTNWFVTQRNFYEPQIITTDNTFVSGSCDVVIGIVNNTVYDPLQPELDSFKEELDKYFKNHTSPDVDLGDISGINASVVNIQKEIDRLNEVAKNLNESLIDLQELGKYEQYIKGGGGSDIIKLLNEQVNKEMQSSNLYMSMSSWCYTHSLDGAGLFLFDHAAEEYEHAKKLIIFLNENNVPVQLTSISAPEHKFEGLTQIFQKAYEHEQHISESINNIVDHAIKSKDHATFNFLQWYVAEQHEEEVLFKDILDKIELIGNENHGLYLADQYVKGIAKSRKS

SEQ ID NO: 4899 - protein, 1379 aa, Artificial Sequence
  SARS-CoV-2/Wuhan/HBCDC-HB-01/2019__EPI_ISL_402132 spike protein (1-1211)(K986P_V987P_ H1048Q_H1064N_ H1083N_H1101N) Ferritin construct
MFVFLVLLPLVSSQCVNLTTRTQLPPAYTNSITRGVYYPDKVFRSSVLHSTQDLFLPFFSNVTWFHAIHVSGTNGTKRFDNPVLPFNDGVYFASTEKSNIIRGWIFGTTLDSKTQSLLIVNNATNVVIKVCEFQFCNDPFLGVYYHKNNKSWMESEFRVYSSANNCTFEYVSQPFLMDLEGKQGNFKNLREFVFKNIDGYFKIYSKHTPINLVRDLPQGFSALEPLVDLPIGINITRFQTLLALHRSYLTPGDSSSGWTAGAAAYYVGYLQPRTFLLKYNENGTITDAVDCALDPLSETKCTLKSFTVEKGIYQTSNFRVQPTESIVRFPNITNLCPFGEVFNATRFASVYAWNRKRISNCVADYSVLYNSASFSTFKCYGVSPTKLNDLCFTNVYADSFVIRGDEVRQIAPGQTGKIADYNYKLPDDFTGCVIAWNSNNLDSKVGGNYNYLYRLFRKSNLKPFERDISTEIYQAGSTPCNGVEGFNCYFPLQSYGFQPTNGVGYQPYRVVVLSFELLHAPATVCGPKKSTNLVKNKCVNFNFNGLTGTGVLTESNKKFLPFQQFGRDIADTTDAVRDPQTLEILDITPCSFGGVSVITPGTNTSNQVAVLYQDVNCTEVPVAIHADQLTPTWRVYSTGSNVFQTRAGCLIGAEHVNNSYECDIPIGAGICASYQTQTNSPRRARSVASQSIIAYTMSLGAENSVAYSNNSIAIPTNFTISVTTEILPVSMTKTSVDCTMYICGDSTECSNLLLQYGSFCTQLNRALTGIAVEQDKNTQEVFAQVKQIYKTPPIKDFGGFNFSQILPDPSKPSKRSFIEDLLFNKVTLADAGFIKQYGDCLGDIAARDLICAQKFNGLTVLPPLLTDEMIAQYTSALLAGTITSGWTFGAGAALQIPFAMQMAYRFNGIGVTQNVLYENQKLIANQFNSAIGKIQDSLSSTASALGKLQDVVNQNAQALNTLVKQLSSNFGAISSVLNDILSRLDPPEAEVQIDRLITGRLQSLQTYVTQQLIRAAEIRASANLAATKMSECVLGQSKRVDFCGKGYQLMSFPQSAPHGVVFLNVTYVPAQEKNFTTAPAICNDGKAHFPREGVFVSNGTNWFVTQRNFYEPQIITTDNTFVSGNCDVVIGIVNNTVYDPLQPELDSFKEELDKYFKNHTSPDVDLGDISGINASVVNIQKEIDRLNEVAKNLNESLIDLQELGKYEQYIKGGGGSDIIKLLNEQVNKEMQSSNLYMSMSSWCYTHSLDGAGLFLFDHAAEEYEHAKKLIIFLNENNVPVQLTSISAPEHKFEGLTQIFQKAYEHEQHISESINNIVDHAIKSKDHATFNFLQWYVAEQHEEEVLFKDILDKIELIGNENHGLYLADQYVKGIAKSRKS

SEQ ID NO: 4900 - protein, 1379 aa, Artificial Sequence
  SARS-CoV-2/Guangdong/20SF028/2020__EPI_ISL_403936 spike protein (1-1211)(K986P_V987P_ H1048Q_H1064N_ H1083N_H1101N) Ferritin construct
MFVFLVLLPLVSSQCVNLTTRTQLPPAYTNSFTRGVYYPDKVFRSSVLYSTQDLFLPFFSNVTWFHAIHVSGTNGTKRFDNPVLPFNDGVYFASTEKSNIIRGWIFGTTLDSKTQSLLIVNNATNVVIKVCEFQFCNDPFLGVYYHKNNKSWMESEFRVYSSANNCTFEYVSQPFLMDLEGKQGNFKNLREFVFKNIDGYFKIYSKHTPINLVRDLPQGFSALEPLVDLPIGINITRFQTLLALHRSYLTPGDSSSGWTAGAAAYYVGYLQPRTFLLKYNENGTITDAVDCALDPLSETKCTLKSFTVEKGIYQTSNFRVQPTESIVRFPNITNLCPFGEVFNATRFASVYAWNRKRISNCVADYSVLYNSASFSTFKCYGVSPTKLNDLCFTNVYADSFVIRGDEVRQIAPGQTGKIADYNYKLPDDFTGCVIAWNSNNLDSKVGGNYNYLYRLFRKSNLKPFERDISTEIYQAGSTPCNGVEGFNCYFPLQSYGFQPTNGVGYQPYRVVVLSFELLHAPATVCGPKKSTNLVKNKCVNFNFNGLTGTGVLTESNKKFLPFQQFGRDIADTTDAVRDPQTLEILDITPCSFGGVSVITPGTNTSNQVAVLYQDVNCTEVPVAIHADQLTPTWRVYSTGSNVFQTRAGCLIGAEHVNNSYECDIPIGAGICASYQTQTNSPRRARSVASQSIIAYTMSLGAENSVAYSNNSIAIPTNFTISVTTEILPVSMTKTSVDCTMYICGDSTECSNLLLQYGSFCTQLNRALTGIAVEQDKNTQEVFAQVKQIYKTPPIKDFGGFNFSQILPDPSKPSKRSFIEDLLFNKVTLADAGFIKQYGDCLGDIAARDLICAQKFNGLTVLPPLLTDEMIAQYTSALLAGTITSGWTFGAGAALQIPFAMQMAYRFNGIGVTQNVLYENQKLIANQFNSAIGKIQDSLSSTASALGKLQDVVNQNAQALNTLVKQLSSNFGAISSVLNDILSRLDPPEAEVQIDRLITGRLQSLQTYVTQQLIRAAEIRASANLAATKMSECVLGQSKRVDFCGKGYQLMSFPQSAPHGVVFLNVTYVPAQEKNFTTAPAICNDGKAHFPREGVFVSNGTNWFVTQRNFYEPQIITTDNTFVSGNCDVVIGIVNNTVYDPLQPELDSFKEELDKYFKNHTSPDVDLGDISGINASVVNIQKEIDRLNEVAKNLNESLIDLQELGKYEQYIKGGGGSDIIKLLNEQVNKEMQSSNLYMSMSSWCYTHSLDGAGLFLFDHAAEEYEHAKKLIIFLNENNVPVQLTSISAPEHKFEGLTQIFQKAYEHEQHISESINNIVDHAIKSKDHATFNFLQWYVAEQHEEEVLFKDILDKIELIGNENHGLYLADQYVKGIAKSRKS

SEQ ID NO: 4901 - protein, 1379 aa, Artificial Sequence
  SARS-CoV-2/Shenzhen/SZTH-001/2020__EPI_ISL_406592 spike protein (1-1211)(K986P_V987P_ H1048Q_H1064N_ H1083N_H1101N) Ferritin construct
MFVFLVLLPLVSSQCVNLTTRTQLPPAYTNSFTRGVYYPDKVFRSSVLHSTQDLFLPFFSNVTWFHAIHVSGTNGTKRFDNPVLPFNDGVYFASTEKSNIIRGWIFGTTLDSKTQSLLIVNNATNVVIKVCEFQFCNDPFLGVYYHKNNKSWMESEFRVYSSANNCTFEYVSQPFLMDLEGKQGNFKNLREFVFKNIDGYFKIYSKHTPINLVRDLPQGFSALEPLVDLPIGINITRFQTLLALHRSYLTPGDSSSGWTAGAAAYYVGYLQPRTFLLKYNENGTITDAVDCALDPLSETKCTLKSFTVEKGIYQTSNFRVQPTESIVRFPNITNLCPFGEVFNATRFASVYAWNRKRISNCVADYSVLYNSASFSTFKCYGVSPTKLNDLCFTNVYADSFVIRGDEVRQIAPGQTGKIADYNYKLPDDFTGCVIAWNSNNLDSKVGGNYNYLYRLFRKSNLKPFERDISTEIYQAGSTPCNGVEGFNCYFPLQSYGFQPTNGVGYQPYRVVVLSFELLHAPATVCGPKKSTNLVKNKCVNFNFNGLTGTGVLTESNKKFLPFQQFGRDIADTTDAVRDPQTLEILDITPCSFGGVSVITPGTNTSNQVAVLYQDVNCTEVPVAIHADQLTPTWRVYSTGSNVFQTRAGCLIGAEHVNNSYECDIPIGAGICASYQTQTNSPRRARSVASQSIIAYTMSLGAENSVAYSNNSIAIPTNFTISVTTEILPVSMTKTSVDCTMYICGDSTECSNLLLQYGSFCTQLNRALTGIAVEQDKNTQEVFAQVKQIYKTPPIKDFGGFNFSQILPDPSKPSKRSFIEDLLFNKVTLADAGFIKQYGDCLGDIAARDLICAQKFNGLTVLPPLLTDEMIAQYTSALLAGTITSGWTFGAGAALQIPFAMQMAYRFNGIGVTQNVLYENQKLIANQFNSAIGKIQDSLSSTASALGKLQDVVNQNAQALNTLVKQLSSNFGAISSVLNDILSRLDPPEAEVQIDRLITGRLQSLQTYVTQQLIRAAEIRASANLAATKMSECVLGQSKRVDFCGKGYQLMSFPQSAPHGVVFLNVTYVPAQEKNFTTAPAICNDGKAHFPREGVFVSNGTNWFVTQRNFYEPQIITTDNTFVSGNCDVLIGIVNNTVYDPLQPELDSFKEELDKYFKNHTSPDVDLGDISGINASVVNIQKEIDRLNEVAKNLNESLIDLQELGKYEQYIKGGGGSDIIKLLNEQVNKEMQSSNLYMSMSSWCYTHSLDGAGLFLFDHAAEEYEHAKKLIIFLNENNVPVQLTSISAPEHKFEGLTQIFQKAYEHEQHISESINNIVDHAIKSKDHATFNFLQWYVAEQHEEEVLFKDILDKIELIGNENHGLYLADQYVKGIAKSRKS

SEQ ID NO: 4902 - protein, 1379 aa, Artificial Sequence
  SARS-CoV-2/Shenzhen/SZTH-004/2020__EPI_ISL_406595 spike protein (1-1211)(K986P_V987P_ H1048Q_H1064N_ H1083N_H1101N) Ferritin construct
MFVFLVLLPLVSSQCVNLTTRTQLPPAYTNSFTRGVYYPDKVFRSSVLHSTQDLFLPFFSNVTWFHAIHVSGTNGTKRFDNPVLPFNDGVYFASTEKSNIIRGWIFGTTLDSKTQSLLIVNNATNVVIKVCEFQFCNDPFLGVYYHKNNKSWMESEFRVYSSANNCTFEYVSQPFLMDLEGKQGNFKNLREFVFKNIDGYFKIYSKHTPINLVRDLPQGFSALEPLVDLPIGINITRFQTLLALHRSYLTPGDSSSGWTAGAAAYYVGYLQPRTFLLKYNENGTITDAVDCALDPLSETKCTLKSFTVEKGIYQTSNFRVQPTESIVRFPNITNLCPFGEVFNATRFASVYAWDRKRISNCVAYYSVLYNSASFSTFKCYGVSPTKLNDLCFTNVYADSFVIRGDEVRQIAPGQTGKIADYNYKLPDDFTGCVIAWNSNNLDSKVGGNYNYLYRLFRKSNLKPFERDISTEIYQAGSTPCNGVEGFNCYFPLQSYGFQPTNGVGYQPYRVVVLSFELLHAPATVCGPKKSTNLVKNKCVNFNFNGLTGTGVLTESNKKFLPFQQFGRDIADTTDAVRDPQTLEILDITPCSFGGVSVITPGTNTSNQVAVLYQDVNCTEVPVAIHADQLTPTWRVYSTGSNVFQTRAGCLIGAEHVNNSYECDIPIGAGICASYQTQTNSPRRARSVASQSIIAYTMSLGAENSVAYSNNSIAIPTNFTISVTTEILPVSMTKTSVDCTMYICGDSTECSNLLLQYGSFCTQLNRALTGIAVEQDKNTQEVFAQVKQIYKTPPIKDFGGFNFSQILPDPSKPSKRSFIEDLLFNKVTLADAGFIKQYGDCLGDIAARDLICAQKFNGLTVLPPLLTDEMIAQYTSALLAGTITSGWTFGAGAALQIPFAMQMAYRFNGIGVTQNVLYENQKLIANQFNSAIGKIQDSLSSTASALGKLQDVVNQNAQALNTLVKQLSSNFGAISSVLNDILSRLDPPEAEVQIDRLITGRLQSLQTYVTQQLIRAAEIRASANLAATKMSECVLGQSKRVDFCGKGYQLMSFPQSAPHGVVFLNVTYVPAQEKNFTTAPAICNDGKAHFPREGVFVSNGTNWFVTQRNFYEPQIITTDNTFVSGNCDVVIGIVNNTVYDPLQPELDSFKEELDKYFKNHTSPDVDLGDISGINASVVNIQKEIDRLNEVAKNLNESLIDLQELGKYEQYIKGGGGSDIIKLLNEQVNKEMQSSNLYMSMSSWCYTHSLDGAGLFLFDHAAEEYEHAKKLIIFLNENNVPVQLTSISAPEHKFEGLTQIFQKAYEHEQHISESINNIVDHAIKSKDHATFNFLQWYVAEQHEEEVLFKDILDKIELIGNENHGLYLADQYVKGIAKSRKS

SEQ ID NO: 4903 - protein, 1379 aa, Artificial Sequence
  SARS-CoV-2/France/IDF0372/2020__EPI_ISL_406596 spike protein (1-1211)(K986P_V987P_ H1048Q_H1064N_ H1083N_H1101N) Ferritin construct
MFVFLVLLPLVSSQCVNLTTRTQLPPAYTNSFTRGVYYPDKVFRSSVLHSTQDLFLPFFSNVTWFHAIHVSGTNGTKRFDNPVLPFNDGVYFASTEKSNIIRGWIFGTTLDSKTQSLLIVNNATNVVIKVCEFQFCNDPFLGVYYHKNNKSWMESEFRVYSSANNCTFEYVSQPFLMDLEGKQGNFKNLREFVFKNIDGYFKIYSKHTPINLVRDLPQGFSALEPLVDLPIGINITRFQTLLALHRSYLTPGDSSSGWTAGAAAYYVGYLQPRTFLLKYNENGTITDAVDCALDPLSETKCTLKSFTVEKGIYQTSNFRVQPTESIVRFPNITNLCPFGEVFNATRFASVYAWNRKRISNCVADYSFLYNSASFSTFKCYGVSPTKLNDLCFTNVYADSFVIRGDEVRQIAPGQTGKIADYNYKLPDDFTGCVIAWNSNNLDSKVGGNYNYLYRLFRKSNLKPFERDISTEIYQAGSTPCNGVEGFNCYFPLQSYGFQPTNGVGYQPYRVVVLSFELLHAPATVCGPKKSTNLVKNKCVNFNFNGLTGTGVLTESNKKFLPFQQFGRDIADTTDAVRDPQTLEILDITPCSFGGVSVITPGTNTSNQVAVLYQDVNCTEVPVAIHADQLTPTWRVYSTGSNVFQTRAGCLIGAEHVNNSYECDIPIGAGICASYQTQTNSPRRARSVASQSIIAYTMSLGAENSVAYSNNSIAIPTNFTISVTTEILPVSMTKTSVDCTMYICGDSTECSNLLLQYGSFCTQLNRALTGIAVEQDKNTQEVFAQVKQIYKTPPIKDFGGFNFSQILPDPSKPSKRSFIEDLLFNKVTLADAGFIKQYGDCLGDIAARDLICAQKFNGLTVLPPLLTDEMIAQYTSALLAGTITSGWTFGAGAALQIPFAMQMAYRFNGIGVTQNVLYENQKLIANQFNSAIGKIQDSLSSTASALGKLQDVVNQNAQALNTLVKQLSSNFGAISSVLNDILSRLDPPEAEVQIDRLITGRLQSLQTYVTQQLIRAAEIRASANLAATKMSECVLGQSKRVDFCGKGYQLMSFPQSAPHGVVFLNVTYVPAQEKNFTTAPAICNDGKAHFPREGVFVSNGTNWFVTQRNFYEPQIITTDNTFVSGNCDVVIGIVNNTVYDPLQPELDSFKEELDKYFKNHTSPDVDLGDISGINASVVNIQKEIDRLNEVAKNLNESLIDLQELGKYEQYIKGGGGSDIIKLLNEQVNKEMQSSNLYMSMSSWCYTHSLDGAGLFLFDHAAEEYEHAKKLIIFLNENNVPVQLTSISAPEHKFEGLTQIFQKAYEHEQHISESINNIVDHAIKSKDHATFNFLQWYVAEQHEEEVLFKDILDKIELIGNENHGLYLADQYVKGIAKSRKS

SEQ ID NO: 4904 - protein, 1379 aa, Artificial Sequence
  SARS-CoV-2/Australia/VIC01/2020__EPI_ISL_406844 spike protein (1-1211)(K986P_V987P_ H1048Q_H1064N_ H1083N_H1101N) Ferritin construct
MFVFLVLLPLVSSQCVNLTTRTQLPPAYTNSFTRGVYYPDKVFRSSVLHSTQDLFLPFFSNVTWFHAIHVSGTNGTKRFDNPVLPFNDGVYFASTEKSNIIRGWIFGTTLDSKTQSLLIVNNATNVVIKVCEFQFCNDPFLGVYYHKNNKSWMESEFRVYSSANNCTFEYVSQPFLMDLEGKQGNFKNLREFVFKNIDGYFKIYSKHTPINLVRDLPQGFSALEPLVDLPIGINITRFQTLLALHRRYLTPGDSSSGWTAGAAAYYVGYLQPRTFLLKYNENGTITDAVDCALDPLSETKCTLKSFTVEKGIYQTSNFRVQPTESIVRFPNITNLCPFGEVFNATRFASVYAWNRKRISNCVADYSVLYNSASFSTFKCYGVSPTKLNDLCFTNVYADSFVIRGDEVRQIAPGQTGKIADYNYKLPDDFTGCVIAWNSNNLDSKVGGNYNYLYRLFRKSNLKPFERDISTEIYQAGSTPCNGVEGFNCYFPLQSYGFQPTNGVGYQPYRVVVLSFELLHAPATVCGPKKSTNLVKNKCVNFNFNGLTGTGVLTESNKKFLPFQQFGRDIADTTDAVRDPQTLEILDITPCSFGGVSVITPGTNTSNQVAVLYQDVNCTEVPVAIHADQLTPTWRVYSTGSNVFQTRAGCLIGAEHVNNSYECDIPIGAGICASYQTQTNSPRRARSVASQSIIAYTMSLGAENSVAYSNNSIAIPTNFTISVTTEILPVSMTKTSVDCTMYICGDSTECSNLLLQYGSFCTQLNRALTGIAVEQDKNTQEVFAQVKQIYKTPPIKDFGGFNFSQILPDPSKPSKRSFIEDLLFNKVTLADAGFIKQYGDCLGDIAARDLICAQKFNGLTVLPPLLTDEMIAQYTSALLAGTITSGWTFGAGAALQIPFAMQMAYRFNGIGVTQNVLYENQKLIANQFNSAIGKIQDSLSSTASALGKLQDVVNQNAQALNTLVKQLSSNFGAISSVLNDILSRLDPPEAEVQIDRLITGRLQSLQTYVTQQLIRAAEIRASANLAATKMSECVLGQSKRVDFCGKGYQLMSFPQSAPHGVVFLNVTYVPAQEKNFTTAPAICNDGKAHFPREGVFVSNGTNWFVTQRNFYEPQIITTDNTFVSGNCDVVIGIVNNTVYDPLQPELDSFKEELDKYFKNHTSPDVDLGDISGINASVVNIQKEIDRLNEVAKNLNESLIDLQELGKYEQYIKGGGGSDIIKLLNEQVNKEMQSSNLYMSMSSWCYTHSLDGAGLFLFDHAAEEYEHAKKLIIFLNENNVPVQLTSISAPEHKFEGLTQIFQKAYEHEQHISESINNIVDHAIKSKDHATFNFLQWYVAEQHEEEVLFKDILDKIELIGNENHGLYLADQYVKGIAKSRKS

SEQ ID NO: 4905 - protein, 1379 aa, Artificial Sequence
  SARS-CoV-2/Germany/BavPat1/2020__EPI_ISL_406862 spike protein (1-1211)(K986P_V987P_ H1048Q_H1064N_ H1083N_H1101N) Ferritin construct
MFVFLVLLPLVSSQCVNLTTRTQLPPAYTNSFTRGVYYPDKVFRSSVLHSTQDLFLPFFSNVTWFHAIHVSGTNGTKRFDNPVLPFNDGVYFASTEKSNIIRGWIFGTTLDSKTQSLLIVNNATNVVIKVCEFQFCNDPFLGVYYHKNNKSWMESEFRVYSSANNCTFEYVSQPFLMDLEGKQGNFKNLREFVFKNIDGYFKIYSKHTPINLVRDLPQGFSALEPLVDLPIGINITRFQTLLALHRSYLTPGDSSSGWTAGAAAYYVGYLQPRTFLLKYNENGTITDAVDCALDPLSETKCTLKSFTVEKGIYQTSNFRVQPTESIVRFPNITNLCPFGEVFNATRFASVYAWNRKRISNCVADYSVLYNSASFSTFKCYGVSPTKLNDLCFTNVYADSFVIRGDEVRQIAPGQTGKIADYNYKLPDDFTGCVIAWNSNNLDSKVGGNYNYLYRLFRKSNLKPFERDISTEIYQAGSTPCNGVEGFNCYFPLQSYGFQPTNGVGYQPYRVVVLSFELLHAPATVCGPKKSTNLVKNKCVNFNFNGLTGTGVLTESNKKFLPFQQFGRDIADTTDAVRDPQTLEILDITPCSFGGVSVITPGTNTSNQVAVLYQGVNCTEVPVAIHADQLTPTWRVYSTGSNVFQTRAGCLIGAEHVNNSYECDIPIGAGICASYQTQTNSPRRARSVASQSIIAYTMSLGAENSVAYSNNSIAIPTNFTISVTTEILPVSMTKTSVDCTMYICGDSTECSNLLLQYGSFCTQLNRALTGIAVEQDKNTQEVFAQVKQIYKTPPIKDFGGFNFSQILPDPSKPSKRSFIEDLLFNKVTLADAGFIKQYGDCLGDIAARDLICAQKFNGLTVLPPLLTDEMIAQYTSALLAGTITSGWTFGAGAALQIPFAMQMAYRFNGIGVTQNVLYENQKLIANQFNSAIGKIQDSLSSTASALGKLQDVVNQNAQALNTLVKQLSSNFGAISSVLNDILSRLDPPEAEVQIDRLITGRLQSLQTYVTQQLIRAAEIRASANLAATKMSECVLGQSKRVDFCGKGYQLMSFPQSAPHGVVFLNVTYVPAQEKNFTTAPAICNDGKAHFPREGVFVSNGTNWFVTQRNFYEPQIITTDNTFVSGNCDVVIGIVNNTVYDPLQPELDSFKEELDKYFKNHTSPDVDLGDISGINASVVNIQKEIDRLNEVAKNLNESLIDLQELGKYEQYIKGGGGSDIIKLLNEQVNKEMQSSNLYMSMSSWCYTHSLDGAGLFLFDHAAEEYEHAKKLIIFLNENNVPVQLTSISAPEHKFEGLTQIFQKAYEHEQHISESINNIVDHAIKSKDHATFNFLQWYVAEQHEEEVLFKDILDKIELIGNENHGLYLADQYVKGIAKSRKS

SEQ ID NO: 4906 - protein, 1379 aa, Artificial Sequence
  SARS-CoV-2/Wuhan/HBCDC-HB-02/2020__EPI_ISL_412978 spike protein (1-1211)(K986P_V987P_ H1048Q_H1064N_ H1083N_H1101N) Ferritin construct
MFVFLVLLPLVSSQCVNLTTRTQLPPAYTNSFTRGVYYPDKVFRSSVLHSTQDLFLPFFSNVTWFHAIHVSGTNGTKRFDNPVLPFNDGVYFASTEKSNIIRGWIFGTTLDSKTQSLLIVNNATNVVIKVCEFQFCNDPFLGVYYHKNNKSWMESEFRVYSSANNCTFEYVSQPFLMDLEGKQGNFKNLREFVFKNIDGYFKIYSKHTPINLVRDLPQGFSALEPLVDLPIGINITRFQTLLALHRSYLTPGDSSSGWTAGAAAYYVGYLQPRTFLLKYNENGTITDAVDCALDPLSETKCTLKSFTVEKGIYQTSNFRVQPTESIVRFPNITNLCPFGEVFNATRFASVYAWNRKRISNCVADYSVLYNSASFSTFKCYGVSPTKLNDLCFTNVYADSFVIRGDEVRQIAPGQTGKIADYNYKLPDDFTGCVIAWNSNNLDSKVGGNYNYLYRLFRKSNLKPFERDISTEIYQAGSTPCNGVEGFNCYFPLQSYGFQPTNGVGYQPYRVVVLSFELLHAPATVCGPKKSTNLVKNKCVNFNFNGLTGTGVLTESNKKFLPFQQFGRDIADTTDAVRDPQTLEILDITPCSFGGVSVITPGTNTSNQVAVLYQDVNCTEVPVAIHADQLTPTWRVYSTGSNVFQTRAGCLIGAEHVNNSYECDIPIGAGICASYQTQTNSPRRARSVASQSIIAYTMSLGAENSVAYSNNSIAIPTNFTISVTTEILPVSMTKTSVDCTMYICGDSTECSNFLLQYGSFCTQLNRALTGIAVEQDKNTQEVFAQVKQIYKTPPIKDFGGFNFSQILPDPSKPSKRSFIEDLLFNKVTLADAGFIKQYGDCLGDIAARDLICAQKFNGLTVLPPLLTDEMIAQYTSALLAGTITSGWTFGAGAALQIPFAMQMAYRFNGIGVTQNVLYENQKLIANQFNSAIGKIQDSLSSTASALGKLQDVVNQNAQALNTLVKQLSSNFGAISSVLNDILSRLDPPEAEVQIDRLITGRLQSLQTYVTQQLIRAAEIRASANLAATKMSECVLGQSKRVDFCGKGYQLMSFPQSAPHGVVFLNVTYVPAQEKNFTTAPAICNDGKAHFPREGVFVSNGTNWFVTQRNFYEPQIITTDNTFVSGNCDVVIGIVNNTVYDPLQPELDSFKEELDKYFKNHTSPDVDLGDISGINASVVNIQKEIDRLNEVAKNLNESLIDLQELGKYEQYIKGGGGSDIIKLLNEQVNKEMQSSNLYMSMSSWCYTHSLDGAGLFLFDHAAEEYEHAKKLIIFLNENNVPVQLTSISAPEHKFEGLTQIFQKAYEHEQHISESINNIVDHAIKSKDHATFNFLQWYVAEQHEEEVLFKDILDKIELIGNENHGLYLADQYVKGIAKSRKS

SEQ ID NO: 4907 - protein, 1379 aa, Artificial Sequence
  SARS-CoV-2/Australia/QLD02/2020__EPI_ISL_407896 spike protein (1-1211)(K986P_V987P_ H1048Q_H1064N_ H1083N_H1101N) Ferritin construct
MFVFLVLLPLVSSQCVNLTTRTQLPPAYTNSFTRGVYYPDKVFRSSVLHSTQDLFLPFFSNVTWFHAIHVSGTNGTKRFDNPVLPFNDGVYFASTEKSNIIRGWIFGTTLDSKTQSLLIVNNATNVVIKVCEFQFCNDPFLGVYYHKNNKSWMESEFRVYSSANNCTFEYVSQPFLMDLEGKQGNFKNLREFVFKNIDGYFKIYSKHTPINLVRDLPQGFSALEPLVDLPIGINITRFQTLLALHRSYLTPGDSSSGWTAGAAAYYVGYLQPRTFLLKYNENGTITDAVDCALDPLSETKCTLKSFTVEKGIYQTSNFRVQPTESIVRFPNITNLCPFGEVFNATRFASVYAWNRKRISNCVADYSVLYNSASFSTFKCYGVSPTKLNDLCFTNVYADSFVIRGDEVRQIAPGQTGKIADYNYKLPDDFTGCVIAWNSNNLDSKVGGNYNYLYRLFRKSNLKPFERDISTEIYQAGSTPCNGVEGFNCYFPLQSYGFQPTNGVGYQPYRVVVLSFELLHAPATVCGPKKSTNLVKNKCVNFNFNGLTGTGVLTESNKKFLPFQQFGRDIADTTDAVRDPQTLEILDITPCSFGGVSVITPGTNTSNQVAVLYQDVNCTEVPVAIHADQLTPTWRVYSTGSNVFQTRAGCLIGAEHVNNSYECDIPIGAGICASYQTQTNSPRRARSVASQSIIAYTMSLGAENSVAYSNNSIAIPTNFTISVTTEILPVSMTKTSVDCTMYICGDSTECSNLLLQYGSFCTQLNRALTGIAVEQDKNTQEVFAQVKQIYKTPPIKDFGGFNFSQILPDPSKPSKRSFIEDLLFNKVTLADAGFIKQYGDCLGDIAARDLICAQKFNGLTVLPPLLTDEMIAQYTSALLAGTITSGWTFGAGAALQIPFAMQMAYRFNGIGVTQNVLYENQKLIANQFNSAIGKIQDSLSSTASALGKLQDVVNQNAQALNTLVKQLSSNFGAISSVLNDILSRLDPPEAEVQIDRLITGRLQSLQTYVTQQLIRAAEIRASANLAATKMSECVLGQSKRVDFCGKGYQLMSFPQSAPHGVVFLNVTYVPAQEKNFTTAPAICNDGKAHFPREGVFVSNGTNWFVTQRNFYEPQIITTDNTFVSGNCDVVIGIVNNTVYDPLQLELDSFKEELDKYFKNHTSPDVDLGDISGINASVVNIQKEIDRLNEVAKNLNESLIDLQELGKYEQYIKGGGGSDIIKLLNEQVNKEMQSSNLYMSMSSWCYTHSLDGAGLFLFDHAAEEYEHAKKLIIFLNENNVPVQLTSISAPEHKFEGLTQIFQKAYEHEQHISESINNIVDHAIKSKDHATFNFLQWYVAEQHEEEVLFKDILDKIELIGNENHGLYLADQYVKGIAKSRKS

SEQ ID NO: 4908 - protein, 1379 aa, Artificial Sequence
  SARS-CoV-2/India/1-31/2020__EPI_ISL_413523 spike protein (1-1211)(K986P_V987P_ H1048Q_H1064N_ H1083N_H1101N) Ferritin construct
MFVFLVLLPLVSSQCVNLTTRTQLPPAYTNSFTRGVYYPDKVFRSSVLHSTQDLFLPFFSNVTWFHAIHVSGTNGTKRFDNPVLPFNDGVYFASTEKSNIIRGWIFGTTLDSKTQSLLIVNNATNVVIKVCEFQFCNDPFLGVYYHKNNKSWMESEFRVYSSANNCTFEYVSQPFLMDLEGKQGNFKNLREFVFKNIDGYFKIYSKHTPINLVRDLPQGFSALEPLVDLPIGINITRFQTLLALHRSYLTPGDSSSGWTAGAAAYYVGYLQPRTFLLKYNENGTITDAVDCALDPLSETKCTLKSFTVEKGIYQTSNFRVQPTESIVRFPNITNLCPFGEVFNATRFASVYAWNRKRISNCVADYSVLYNSASFSTFKCYGVSPTKLNDLCFTNVYADSFVIRGDEVRQIAPGQTGKIADYNYKLPDDFTGCVIAWNSNNLDSKVGGNYNYLYRLFRKSNLKPFERDISTEIYQAGSTPCNGVEGFNCYFPLQSYGFQPTNGVGYQPYRVVVLSFELLHAPATVCGPKKSTNLVKNKCVNFNFNGLTGTGVLTESNKKFLPFQQFGRDIADTTDAVRDPQTLEILDITPCSFGGVSVITPGTNTSNQVAVLYQDVNCTEVPVAIHADQLTPTWRVYSTGSNVFQTRAGCLIGAEHVNNSYECDIPIGAGICASYQTQTNSPRRARSVASQSIIAYTMSLGAENSVAYSNNSIAIPTNFTISVTTEILPVSMTKTSVDCTMYICGDSTECSNLLLQYGSFCTQLNRALTGIAVEQDKNTQEVFAQVKQIYKTPPIKDFGGFNFSQILPDPSKPSKRSFIEDLLFNKVTLADAGFIKQYGDCLGDIAARDLICAQKFNGLTVLPPLLTDEMIAQYTSALLAGTITSGWTFGAGAALQIPFAMQMAYRFNGIGVTQNVLYENQKLIANQFNSVIGKIQDSLSSTASALGKLQDVVNQNAQALNTLVKQLSSNFGAISSVLNDILSRLDPPEAEVQIDRLITGRLQSLQTYVTQQLIRAAEIRASANLAATKMSECVLGQSKRVDFCGKGYQLMSFPQSAPHGVVFLNVTYVPAQEKNFTTAPAICNDGKAHFPREGVFVSNGTNWFVTQRNFYEPQIITTDNTFVSGNCDVVIGIVNNTVYDPLQPELDSFKEELDKYFKNHTSPDVDLGDISGINASVVNIQKEIDRLNEVAKNLNESLIDLQELGKYEQYIKGGGGSDIIKLLNEQVNKEMQSSNLYMSMSSWCYTHSLDGAGLFLFDHAAEEYEHAKKLIIFLNENNVPVQLTSISAPEHKFEGLTQIFQKAYEHEQHISESINNIVDHAIKSKDHATFNFLQWYVAEQHEEEVLFKDILDKIELIGNENHGLYLADQYVKGIAKSRKS

SEQ ID NO: 4909 - protein, 1379 aa, Artificial Sequence
  SARS-CoV-2/Guangdong/GD2020087-P0008/2020__EPI_ISL_413863 spike protein (1-1211)(K986P_V987P_ H1048Q_H1064N_ H1083N_H1101N) Ferritin construct
MFVFLVLLPLVSSQCVNLTTRTQLPPAYTNSFTRGVYYPDKVFRSSVLHSTQDLFLPFFSNVTWFHAIHVSGTNGTKRFDNPVLPFNDGVYFASTEKSNIIRGWIFGTTLDSKTQSLLIVNNATNVVIKVCEFQFCNDPFLGVYYHKNNKSWMESEFRVYSSANNCTFEYVSQPFLMDLEGKQGNFKNLREFVFKNIDGYFKIYSKHTPINLVRDLPQGFSALEPLVDLPIGINITRFQTLLALHRSYLTPGDSSSGWTAGAAAYYVGYLQPRTFLLKYNENGTITDAVDCALDPLSETKCTLKSFTVEKGIYQTSNFRVQPTESIVRFPNITNLCPFGEVFNATRFASVYAWNRKRISNCVADYSVLYNSASFSTFKCYGVSPTKLNDLCFTNVYADSFVIRGDEVREIAPGQTGKIADYNYKLPDDFTGCVIAWNSNNLDSKVGGNYNYLYRLFRKSNLKPFERDISTEIYQAGSTPCNGVEGFNCYFPLQSYGFQPTNGVGYQPYRVVVLSFELLHAPATVCGPKKSTNLVKNKCVNFNFNGLTGTGVLTESNKKFLPFQQFGRDIADTTDAVRDPQTLEILDITPCSFGGVSVITPGTNTSNQVAVLYQDVNCTEVPVAIHADQLTPTWRVYSTGSNVFQTRAGCLIGAEHVNNSYECDIPIGAGICASYQTQTNSPRRARSVASQSIIAYTMSLGAENSVAYSNNSIAIPTNFTISVTTEILPVSMTKTSVDCTMYICGDSTECSNLLLQYGSFCTQLNRALTGIAVEQDKNTQEVFAQVKQIYKTPPIKDFGGFNFSQILPDPSKPSKRSFIEDLLFNKVTLADAGFIKQYGDCLGDIAARDLICAQKFNGLTVLPPLLTDEMIAQYTSALLAGTITSGWTFGAGAALQIPFAMQMAYRFNGIGVTQNVLYENQKLIANQFNSAIGKIQDSLSSTASALGKLQDVVNQNAQALNTLVKQLSSNFGAISSVLNDILSRLDPPEAEVQIDRLITGRLQSLQTYVTQQLIRAAEIRASANLAATKMSECVLGQSKRVDFCGKGYQLMSFPQSAPHGVVFLNVTYVPAQEKNFTTAPAICNDGKAHFPREGVFVSNGTNWFVTQRNFYEPQIITTDNTFVSGNCDVVIGIVNNTVYDPLQPELDSFKEELDKYFKNHTSPDVDLGDISGINASVVNIQKEIDRLNEVAKNLNESLIDLQELGKYEQYIKGGGGSDIIKLLNEQVNKEMQSSNLYMSMSSWCYTHSLDGAGLFLFDHAAEEYEHAKKLIIFLNENNVPVQLTSISAPEHKFEGLTQIFQKAYEHEQHISESINNIVDHAIKSKDHATFNFLQWYVAEQHEEEVLFKDILDKIELIGNENHGLYLADQYVKGIAKSRKS

SEQ ID NO: 4910 - protein, 1379 aa, Artificial Sequence
  SARS-CoV-2/Sweden/01/2020__EPI_ISL_411951 spike protein (1-1211)(K986P_V987P_ H1048Q_H1064N_ H1083N_H1101N) Ferritin construct
MFVFLVLLPLVSSQCVNLTTRTQLPPAYTNSFTRGVYYPDKVFRSSVLHSTQDLFLPFFSNVTWFHAIHVSGTNGTKRFDNPVLPFNDGVYFASTEKSNIIRGWIFGTTLDSKTQSLLIVNNATNVVIKVCEFQFCNDPFLGVYYHKNNKSWMESEFRVYSSANNCTFEYVSQPFLMDLEGKQGNFKNLREFVFKNIDGYFKIYSKHTPINLVRDLPQGFSALEPLVDLPIGINITRFQTLLALHRSYLTPGDSSSGWTAGAAAYYVGYLQPRTFLLKYNENGTITDAVDCALDPLSETKCTLKSFTVEKGIYQTSNFRVQPTESIVRFPNITNLCPFGEVFNATRFASVYAWNRKRISNCVADYSVLYNSASFSTFKCYGVSPTKLNDLCFTNVYADSFVIRGDEVRQIAPGQTGKIADYNYKLPDDFTGCVIAWNSNNLDSKVGGNYNYLYRLFRKSNLKPFERDISTEIYQAGSTPCNGVEGFNCYFPLQSYGFQPTNGVGYQPYRVVVLSFELLHAPATVCGPKKSTNLVKNKCVNFNFNGLTGTGVLTESNKKFLPFQQFGRDIADTTDAVRDPQTLEILDITPCSFGGVSVITPGTNTSNQVAVLYQDVNCTEVPVAIHADQLTPTWRVYSTGSNVFQTRAGCLIGAEHVNNSYECDIPIGAGICASYQTQTNSPRRARSVASQSIIAYTMSLGAENSVAYSNNSIAIPTNFTISVTTEILPVSMTKTSVDCTMYICGDSTECSNLLLQYGSFCTQLNRALTGIAVEQDKNTQEVFAQVKQIYKTPPIKDCGGFNFSQILPDPSKPSKRSFIEDLLFNKVTLADAGFIKQYGDCLGDIAARDLICAQKFNGLTVLPPLLTDEMIAQYTSALLAGTITSGWTFGAGAALQIPFAMQMAYRFNGIGVTQNVLYENQKLIANQFNSAIGKIQDSLSSTASALGKLQDVVNQNAQALNTLVKQLSSNFGAISSVLNDILSRLDPPEAEVQIDRLITGRLQSLQTYVTQQLIRAAEIRASANLAATKMSECVLGQSKRVDFCGKGYQLMSFPQSAPHGVVFLNVTYVPAQEKNFTTAPAICNDGKAHFPREGVFVSNGTNWFVTQRNFYEPQIITTDNTFVSGNCDVVIGIVNNTVYDPLQPELDSFKEELDKYFKNHTSPDVDLGDISGINASVVNIQKEIDRLNEVAKNLNESLIDLQELGKYEQYIKGGGGSDIIKLLNEQVNKEMQSSNLYMSMSSWCYTHSLDGAGLFLFDHAAEEYEHAKKLIIFLNENNVPVQLTSISAPEHKFEGLTQIFQKAYEHEQHISESINNIVDHAIKSKDHATFNFLQWYVAEQHEEEVLFKDILDKIELIGNENHGLYLADQYVKGIAKSRKS

SEQ ID NO: 4911 - protein, 1379 aa, Artificial Sequence
  SARS-CoV-2/Tianmen/HBCDC-HB-07/2020__EPI_ISL_412983 spike protein (1-1211)(K986P_V987P_ H1048Q_H1064N_ H1083N_H1101N) Ferritin construct
MFVFLVLLPLVSSQCVNLTTRTQLPPAYTNSFTRGVYYPDKVFRSSVLHSTQDLFLPFFSNVTWFHAIHVSGTNGTKRFDNPVLPFNDGVYFASTEKSNIIRGWIFGTTLDSKTQSLLIVNNATNVVIKVCEFQFCNDPFLGVYYHKNNKSWMESEFRVYSSANNCTFEYVSQPFLMDLEGKQGNFKNLREFVFKNIDGYFKIYSKHTPINLVRDLPQGFSALEPLVDLPIGINITRFQTLLALHRSYLTPGDSSSGWTAGAAAYYVGYLQPRTFLLKYNENGTITDAVDCALDPLSETKCTLKSFTVEKGIYQTSNFRVQPTESIVRFPNITNLCPFGEVFNATRFASVYAWNRKRISNCVADYSVLYNSASFSTFKCYGVSPTKLNDLCFTNVYADSFVIRGDEVRQIAPGQTGKIADYNYKLPDDFTGCVIAWNSNNLDSKVGGNYNYLYRLFRKSNLKPFERDISTEIYQAGSTPCNGVEGFNCYFPLQSYGFQPTNGVGYQPYRVVVLSFELLHAPATVCGPKKSTNLVKNKCVNFNFNGLTGTGVLTESNKKFLPFQQFGRDIADTTDAVRDPQTLEILDITPCSFGGVSVITPGTNTSNQVAVLYQDLNCTEVPVAIHADQLTPTWRVYSTGSNVFQTRAGCLIGAEHVNNSYECDIPIGAGICASYQTQTNSPRRARSVASQSIIAYTMSLGAENSVAYSNNSIAIPTNFTISVTTEILPVSMTKTSVDCTMYICGDSTECSNLLLQYGSFCTQLNRALTGIAVEQDKNTQEVFAQVKQIYKTPPIKDFGGFNFSQILPDPSKPSKRSFIEDLLFNKVTLADAGFIKQYGDCLGDIAARDLICAQKFNGLTVLPPLLTDEMIAQYTSALLAGTITSGWTFGAGAALQIPFAMQMAYRFNGIGVTQNVLYENQKLIANQFNSAIGKIQDSLSSTASALGKLQDVVNQNAQALNTLVKQLSSNFGAISSVLNDILSRLDPPEAEVQIDRLITGRLQSLQTYVTQQLIRAAEIRASANLAATKMSECVLGQSKRVDFCGKGYQLMSFPQSAPHGVVFLNVTYVPAQEKNFTTAPAICNDGKAHFPREGVFVSNGTNWFVTQRNFYEPQIITTDNTFVSGNCDVVIGIVNNTVYDPLQPELDSFKEELDKYFKNHTSPDVDLGDISGINASVVNIQKEIDRLNEVAKNLNESLIDLQELGKYEQYIKGGGGSDIIKLLNEQVNKEMQSSNLYMSMSSWCYTHSLDGAGLFLFDHAAEEYEHAKKLIIFLNENNVPVQLTSISAPEHKFEGLTQIFQKAYEHEQHISESINNIVDHAIKSKDHATFNFLQWYVAEQHEEEVLFKDILDKIELIGNENHGLYLADQYVKGIAKSRKS

SEQ ID NO: 4912 - protein, 1379 aa, Artificial Sequence
  SARS-CoV-2/Hong Kong/case42_VM20002493/2020__EPI_ISL_414527 spike protein (1-1211)(K986P_V987P_ H1048Q_H1064N_ H1083N_H1101N) Ferritin construct
MFVFLVLLPLVSSQCVNLTTRTQLPPAYTNSFTRGVYYPDKVFRSSVLHSTQDLFLPFFSNVTWFHAIHVSGTNGTKRFDNPVLPFNDGVYFASTEKSNIIRGWIFGTTLDSKTQSLLIVNNATNVVIKVCEFQFCNDPFLGVYYHKNNKSWMESEFRVYSSANNCTFEYVSQPFLMDLEGKQGNFKNLREFVFKNIDGYFKIYSKHTPINLVRDLPQGFSALEPLVDLPIGINITRFQTLLALHRSYLTPGDSSSGWTAGAAAYYVGYLQPRTFLLKYNENGTITDAVDCALDPLSETKCTLKSFTVEKGIYQTSNFRVQPTESIVRFPNITNLCPFGEVFNATRFASVYAWNRKRISNCVADYSVLYNSASFSTFKCYGVSPTKLNDLCFTNVYADSFVIRGDEVRQIAPGQTGKIADYNYKLPDDFTGCVIAWNSNNLDSKVGGNYNYLYRLFRKSNLKPFERDISTEIYQAGSTPCNGVEGFNCYFPLQSYGFQPTNGVGYQPYRVVVLSFELLHAPATVCGPKKSTNLVKNKCVNFNFNGLTGTGVLTESNKKFLPFQQFGRDIADTTDAVRDPQTLEILDITPCSFGGVSVITPGTNTSNQVAVLYQDVNCTEVPVAIHADQLTPTWRVYSTGSNVFQTRAGCLIGAEHVNNSYECDIPIGAGICASYQTQTNSPRRARSVASQSIIAYTMSLGAENSVAYSNNSIAIPTNFAISVTTEILPVSMTKTSVDCTMYICGDSTECSNLLLQYGSFCTQLNRALTGIAVEQDKNTQEVFAQVKQIYKTPPIKDFGGFNFSQILPDPSKPSKRSFIEDLLFNKVTLADAGFIKQYGDCLGDIAARDLICAQKFNGLTVLPPLLTDEMIAQYTSALLAGTITSGWTFGAGAALQIPFAMQMAYRFNGIGVTQNVLYENQKLIANQFNSAIGKIQDSLSSTASALGKLQDVVNQNAQALNTLVKQLSSNFGAISSVLNDILSRLDPPEAEVQIDRLITGRLQSLQTYVTQQLIRAAEIRASANLAATKMSECVLGQSKRVDFCGKGYQLMSFPQSAPHGVVFLNVTYVPAQEKNFTTAPAICNDGKAHFPREGVFVSNGTNWFVTQRNFYEPQIITTDNTFVSGNCDVVIGIVNNTVYDPLQPELDSFKEELDKYFKNHTSPDVDLGDISGINASVVNIQKEIDRLNEVAKNLNESLIDLQELGKYEQYIKGGGGSDIIKLLNEQVNKEMQSSNLYMSMSSWCYTHSLDGAGLFLFDHAAEEYEHAKKLIIFLNENNVPVQLTSISAPEHKFEGLTQIFQKAYEHEQHISESINNIVDHAIKSKDHATFNFLQWYVAEQHEEEVLFKDILDKIELIGNENHGLYLADQYVKGIAKSRKS

SEQ ID NO: 4913 - protein, 1379 aa, Artificial Sequence
  SARS-CoV-2/USA/CruiseA-23/2020__EPI_ISL_414482 spike protein (1-1211)(K986P_V987P_ H1048Q_H1064N_ H1083N_H1101N) Ferritin construct
MFVFLVLLPLVSSQCVNLTTRTQLPPAYTNSFTRGVYYPDKVFRSSVLHSTQDLFLPFFSNVTWFHAIHVSGTNGTKRFDNPVLPFNDGVYFASTEKSNIIRGWIFGTTLDSKTQSLLIVNNATNVVIKVCEFQFCNDPFLGVYYHKNNKSWMESEFRVYSSANNCTFEYVSQPFLMDLEVKQGNFKNLREFVFKNIDGYFKIYSKHTPINLVRDLPQGFSALEPLVDLPIGINITRFQTLLALHRSYLTPGDSSSGWTAGAAAYYVGYLQPRTFLLKYNENGTITDAVDCALDPLSETKCTLKSFTVEKGIYQTSNFRVQPTESIVRFPNITNLCPFGEVFNATRFASVYAWNRKRISNCVADYSVLYNSASFSTFKCYGVSPTKLNDLCFTNVYADSFVIRGDEVRQIAPGQTGKIADYNYKLPDDFTGCVIAWNSNNLDSKVGGNYNYLYRLFRKSNLKPFERDISTEIYQAGSTPCNGVEGFNCYFPLQSYGFQPTNGVGYQPYRVVVLSFELLHAPATVCGPKKSTNLVKNKCVNFNFNGLTGTGVLTESNKKFLPFQQFGRDIADTTDAVRDPQTLEILDITPCSFGGVSVITPGTNTSNQVAVLYQDVNCTEVPVAIHADQLTPTWRVYSTGSNVFQTRAGCLIGAEHVNNSYECDIPIGAGICASYQTQTNSPRRARSVASQSIIAYTMSLGAENSVAYSNNSIAIPTNFTISVTTEILPVSMTKTSVDCTMYICGDSTECSNLLLQYGSFCTQLNRALTGIAVEQDKNTQEVFAQVKQIYKTPPIKDFGGFNFSQILPDPSKPSKRSFIEDLLFNKVTLADAGFIKQYGDCLGDIAARDLICAQKFNGLTVLPPLLTDEMIAQYTSALLAGTITSGWTFGAGAALQIPFAMQMAYRFNGIGVTQNVLYENQKLIANQFNSAIGKIQDSLSSTASALGKLQDVVNQNAQALNTLVKQLSSNFGAISSVLNDILSRLDPPEAEVQIDRLITGRLQSLQTYVTQQLIRAAEIRASANLAATKMSECVLGQSKRVDFCGKGYQLMSFPQSAPHGVVFLNVTYVPAQEKNFTTAPAICNDGKAHFPREGVFVSNGTNWFVTQRNFYEPQIITTDNTFVSGNCDVVIGIVNNTVYDPLQPELDSFKEELDKYFKNHTSPDVDLGDISGINASVVNIQKEIDRLNEVAKNLNESLIDLQELGKYEQYIKGGGGSDIIKLLNEQVNKEMQSSNLYMSMSSWCYTHSLDGAGLFLFDHAAEEYEHAKKLIIFLNENNVPVQLTSISAPEHKFEGLTQIFQKAYEHEQHISESINNIVDHAIKSKDHATFNFLQWYVAEQHEEEVLFKDILDKIELIGNENHGLYLADQYVKGIAKSRKS

SEQ ID NO: 4914 - protein, 1379 aa, Artificial Sequence
  SARS-CoV-2/Hong Kong/case85_VM20002868/2020__EPI_ISL_414519 spike protein (1-1211)(K986P_V987P_ H1048Q_H1064N_ H1083N_H1101N) Ferritin construct
MFVFLVLVPLVSSQCVNLTTRTQLPPAYTNSFTRGVYYPDKVFRSSVLHSTQDLFLPFFSNVTWFHAIHVSGTNGTKRFDNPVLPFNDGVYFASTEKSNIIRGWIFGTTLDSKTQSLLIVNNATNVVIKVCEFQFCNDPFLGVYYHKNNKSWMESEFRVYSSANNCTFEYVSQPFLMDLEGKQGNFKNLREFVFKNIDGYFKIYSKHTPINLVRDLPQGFSALEPLVDLPIGINITRFQTLLALHRSYLTPGDSSSGWTAGAAAYYVGYLQPRTFLLKYNENGTITDAVDCALDPLSETKCTLKSFTVEKGIYQTSNFRVQPTESIVRFPNITNLCPFGEVFNATRFASVYAWNRKRISNCVADYSVLYNSASFSTFKCYGVSPTKLNDLCFTNVYADSFVIRGDEVRQIAPGQTGKIADYNYKLPDDFTGCVIAWNSNNLDSKVGGNYNYLYRLFRKSNLKPFERDISTEIYQAGSTPCNGVEGFNCYFPLQSYGFQPTNGVGYQPYRVVVLSFELLHAPATVCGPKKSTNLVKNKCVNFNFNGLTGTGVLTESNKKFLPFQQFGRDIADTTDAVRDPQTLEILDITPCSFGGVSVITPGTNTSNQVAVLYQDVNCTEVPVAIHADQLTPTWRVYSTGSNVFQTRAGCLIGAEHVNNSYECDIPIGAGICASYQTQTNSPRRARSVASQSIIAYTMSLGAENSVAYSNNSIAIPTNFTISVTTEILPVSMTKTSVDCTMYICGDSTECSNLLLQYGSFCTQLNRALTGIAVEQDKNTQEVFAQVKQIYKTPPIKDFGGFNFSQILPDPSKPSKRSFIEDLLFNKVTLADAGFIKQYGDCLGDIAARDLICAQKFNGLTVLPPLLTDEMIAQYTSALLAGTITSGWTFGAGAALQIPFAMQMAYRFNGIGVTQNVLYENQKLIANQFNSAIGKIQDSLSSTASALGKLQDVVNQNAQALNTLVKQLSSNFGAISSVLNDILSRLDPPEAEVQIDRLITGRLQSLQTYVTQQLIRAAEIRASANLAATKMSECVLGQSKRVDFCGKGYQLMSFPQSAPHGVVFLNVTYVPAQEKNFTTAPAICNDGKAHFPREGVFVSNGTNWFVTQRNFYEPQIITTDNTFVSGNCDVVIGIVNNTVYDPLQPELDSFKEELDKYFKNHTSPDVDLGDISGINASVVNIQKEIDRLNEVAKNLNESLIDLQELGKYEQYIKGGGGSDIIKLLNEQVNKEMQSSNLYMSMSSWCYTHSLDGAGLFLFDHAAEEYEHAKKLIIFLNENNVPVQLTSISAPEHKFEGLTQIFQKAYEHEQHISESINNIVDHAIKSKDHATFNFLQWYVAEQHEEEVLFKDILDKIELIGNENHGLYLADQYVKGIAKSRKS

SEQ ID NO: 4915 - protein, 1379 aa, Artificial Sequence; identical to SEQ ID NO: 4905
  SARS-CoV-2/England/200990660/2020__EPI_ISL_414523 spike protein (1-1211)(K986P_V987P_ H1048Q_H1064N_ H1083N_H1101N) Ferritin construct

SEQ ID NO: 4916 - protein, 1379 aa, Artificial Sequence
  SARS-CoV-2/Australia/NSW09/2020__EPI_ISL_413595 spike protein (1-1211)(K986P_V987P_ H1048Q_H1064N_ H1083N_H1101N) Ferritin construct
MFVFLVLLPLVSSQCVNLTTRTQLPPAYTNSFTRGVYYPDKVFRSSVLHSTQDLFLPFFSNVTWFHAIHVSGTNGTKRFDNPVLPFNDGVYFASTEKSNIIRGWIFGTTLDSKTQSLLIVNNATNVVIKVCEFQFCNDPFLGVYYHKNNKSWMESEFRVYSSANNCTFEYVSQPFLMDLEGKQGNFKNLREFVFKNIDGYFKIYSKHTPINLVRDLPQGFSALEPLVDLPIGINITRFQTLLALHRSYLTPGDSSSGWTAGAAAYYVGYLQPRTFLLKYNENGTITDAVDCALDPLSETKCTLKSFTVEKGIYQTSNFRVQPTESIVRFPNITNLCPFGEVFNATRFASVYAWNRKRISNCVADYSVLYNSASFSTFKCYGVSPTKLNDLCFTNVYADSFVIRGDEVRQIAPGQTGKIADYNYKLPDDFTGCVIAWNSNNLDSKVGGNYNYLYRLFRKSNLKPFERDISTEIYQAGSTPCNGVEGFNCYFPLQSYGFQPTNGVGYQPYRVVVLSFELLHAPATVCGPKKSTNLVKNKCVNFNFNGLTGTGVLTESNKKFLPFQQFGRDIADTTDAVRDPQTLEILDITPCSFGGVSVITPGTNTSNQVAVLYQDVNCTEVPVAIHADQLTPTWRVYSTGSNVFQTRAGCLIGAEHVNNSYECDIPIGAGICASYQTQTNSPRRARSVASQSIIAYTMSLGAENSVAYSNNSIAIPTNFTISVTTEILPVSMTKTSVDCTMYICGDSTECSNLLLQYGSFCTQLNRALTGIAVEQDKNTQEVFAQVKQIYKTPPIKDFGGFNFSQILPDPSKPSKRSFIEDLLFNKVTLADAGFIKQYGDCLGDIAARDLICAQKFNGLTVLPPLLTDEMIAQYTSALLAGTITSGWTFGAGAALQIPFAMQMAYRFNGIGVTQNVLYENQKLIANQFNSAIGKIQDSLSFTASALGKLQDVVNQNAQALNTLVKQLSSNFGAISSVLNDILSRLDPPEAEVQIDRLITGRLQSLQTYVTQQLIRAAEIRASANLAATKMSECVLGQSKRVDFCGKGYQLMSFPQSAPHGVVFLNVTYVPAQEKNFTTAPAICNDGKAHFPREGVFVSNGTNWFVTQRNFYEPQIITTDNTFVSGNCDVVIGIVNNTVYDPLQPELDSFKEELDKYFKNHTSPDVDLGDISGINASVVNIQKEIDRLNEVAKNLNESLIDLQELGKYEQYIKGGGGSDIIKLLNEQVNKEMQSSNLYMSMSSWCYTHSLDGAGLFLFDHAAEEYEHAKKLIIFLNENNVPVQLTSISAPEHKFEGLTQIFQKAYEHEQHISESINNIVDHAIKSKDHATFNFLQWYVAEQHEEEVLFKDILDKIELIGNENHGLYLADQYVKGIAKSRKS

SEQ ID NO: 4917 - protein, 1379 aa, Artificial Sequence; identical to SEQ ID NO: 4897
  SARS-CoV-2/Australia/NSW10/2020__EPI_ISL_413596 spike protein (1-1211)(K986P_V987P_ H1048Q_H1064N_ H1083N_H1101N) Ferritin construct

SEQ ID NO: 4918 - protein, 1379 aa, Artificial Sequence
  SARS-CoV-2/Switzerland/1000477797/2020__EPI_ISL_413023 spike protein (1-1211)(K986P_V987P_ H1048Q_H1064N_ H1083N_H1101N) Ferritin construct
MFVFLVLLPLVSSQCVNLTTRTQLPPAYTNSFTRGVYYPDKVFRSSVLHSTQDLFLPFFSNVTWFHAIHVSGTNGTKRFDNPVLPFNDGVYFASTEKSNIIRGWIFGTTLDSKTQSLLIVNNATNVVIKVCEFQFCNDPFLGVYYHKNNKSWMESEFRVYSSANNCTFEYVSQPFLMDLEGKQGNFKNLREFVFKNIDGYFNIYSKHTPINLVRDLPQGFSALEPLVDLPIGINITRFQTLLALHRSYLTPGDSSSGWTAGAAAYYVGYLQPRTFLLKYNENGTITDAVDCALDPLSETKCTLKSFTVEKGIYQTSNFRVQPTESIVRFPNITNLCPFGEVFNATRFASVYAWNRKRISNCVADYSVLYNSASFSTFKCYGVSPTKLNDLCFTNVYADSFVIRGDEVRQIAPGQTGKIADYNYKLPDDFTGCVIAWNSNNLDSKVGGNYNYLYRLFRKSNLKPFERDISTEIYQAGSTPCNGVEGFNCYFPLQSYGFQPTNGVGYQPYRVVVLSFELLHAPATVCGPKKSTNLVKNKCVNFNFNGLTGTGVLTESNKKFLPFQQFGRDIADTTDAVRDPQTLEILDITPCSFGGVSVITPGTNTSNQVAVLYQGVNCTEVPVAIHADQLTPTWRVYSTGSNVFQTRAGCLIGAEHVNNSYECDIPIGAGICASYQTQTNSPRRARSVASQSIIAYTMSLGAENSVAYSNNSIAIPTNFTISVTTEILPVSMTKTSVDCTMYICGDSTECSNLLLQYGSFCTQLNRALTGIAVEQDKNTQEVFAQVKQIYKTPPIKDFGGFNFSQILPDPSKPSKRSFIEDLLFNKVTLADAGFIKQYGDCLGDIAARDLICAQKFNGLTVLPPLLTDEMIAQYTSALLAGTITSGWTFGAGAALQIPFAMQMAYRFNGIGVTQNVLYENQKLIANQFNSAIGKIQDSLSSTASALGKLQDVVNQNAQALNTLVKQLSSNFGAISSVLNDILSRLDPPEAEVQIDRLITGRLQSLQTYVTQQLIRAAEIRASANLAATKMSECVLGQSKRVDFCGKGYQLMSFPQSAPHGVVFLNVTYVPAQEKNFTTAPAICNDGKAHFPREGVFVSNGTNWFVTQRNFYEPQIITTDNTFVSGNCDVVIGIVNNTVYDPLQPELDSFKEELDKYFKNHTSPDVDLGDISGINASVVNIQKEIDRLNEVAKNLNESLIDLQELGKYEQYIKGGGGSDIIKLLNEQVNKEMQSSNLYMSMSSWCYTHSLDGAGLFLFDHAAEEYEHAKKLIIFLNENNVPVQLTSISAPEHKFEGLTQIFQKAYEHEQHISESINNIVDHAIKSKDHATFNFLQWYVAEQHEEEVLFKDILDKIELIGNENHGLYLADQYVKGIAKSRKS

SEQ ID NO: 4919 - protein, 1379 aa, Artificial Sequence
  SARS-CoV-2/Belgium/BA-02291/2020__EPI_ISL_415159 spike protein (1-1211)(K986P_V987P_ H1048Q_H1064N_ H1083N_H1101N) Ferritin construct
MFVFLVLLPLVSSQCVNLTTRTQLPPAYTNSFTRGVYYPDKVFRSSVLHSTQDLFLPFFSNVTWFHAIHVSGTNGTKRFDNPVLPFNDGVYFASTEKSNIIRGWIFGTTLDSKTQSLLIVNNATNVVIKVCEFQFCNDPFLGVYYHKNNKSWMESEFRVYSSANNCTFEYVSQPFLMDLEGKQGNFKNLREFVFKNIDGYFKIYSKHTPINLVRDLPQGFSALEPLVDLPIGINITRFQTLLALHRSYLTPGDSSSGWTAGAAAYYVGYLQPRTFLLKYNENGTITDAVDCALDPLSETKCTLKSFTVEKGIYQTSNFRVQPTESIVRFPNITNLCPFGEVFNATRFASVYAWNRKRISNCVADYSVLYNSASFSTFKCYGVSPTKLNDLCFTNVYADSFVIRGDEVRQIAPGQTGKIADYNYKLPDDFTGCVIAWNSNNLDSKVGGNYNYLYRLFRRSNLKPFERDISTEIYQAGSTPCNGVEGFNCYFPLQSYGFQPTNGVGYQPYRVVVLSFELLPAPATVCGPKKSTNLVKNKCVNFNFNGLTGTGVLTESNKKFLPFQQFGRDIADTTDAVRDPQTLEILDITPCSFGGVSVITPGTNTSNQVAVLYQGVNCTEVPVAIHADQLTPTWRVYSTGSNVFQTRAGCLIGAEHVNNSYECDIPIGAGICASYQTQTNSPRRARSVASQSIIAYTMSLGAENSVAYSNNSIAIPTNFTISVTTEILPVSMTKTSVDCTMYICGDSTECSNLLLQYGSFCTQLNRALTGIAVEQDKNTQEVFAQVKQIYKTPPIKDFGGFNFSQILPDPSKPSKRSFIEDLLFNKVTLADAGFIKQYGDCLGDIAARDLICAQKFNGLTVLPPLLTDEMIAQYTSALLAGTITSGWTFGAGAALQIPFAMQMAYRFNGIGVTQNVLYENQKLIANQFNSAIGKIQDSLSSAAPALGKLQDVVNQNAQALNTLVKQLSSNFGAISSVLNDILSRLDPPEAEVQIDRLITGRLQSLQTYVTQQLIRAAEIRASANLAATKMSECVLGQSKRVDFCGKGYQLMSFPQSAPHGVVFLNVTYVPAQEKNFTTAPAICNDGKAHFPREGVFVSNGTNWFVTQRNFYEPQIITTDNTFVSGNCDVVIGIVNNTVYDPLQPELDSFKEELDKYFKNHTSPDVDLGDISGINASVVNIQKEIDRLNEVAKNLNESLIDLQELGKYEQYIKGGGGSDIIKLLNEQVNKEMQSSNLYMSMSSWCYTHSLDGAGLFLFDHAAEEYEHAKKLIIFLNENNVPVQLTSISAPEHKFEGLTQIFQKAYEHEQHISESINNIVDHAIKSKDHATFNFLQWYVAEQHEEEVLFKDILDKIELIGNENHGLYLADQYVKGIAKSRKS

SEQ ID NO: 4920 - protein, 1379 aa, Artificial Sequence
  SARS-CoV-2/USA/WA8-UW5/2020__EPI_ISL_413486 spike protein (1-1211)(K986P_V987P_ H1048Q_H1064N_ H1083N_H1101N) Ferritin construct
MFVFLVLLPLVSSQCVNLTTRTQLPPAYTNSFTRGVYYPDKVFRSSVLHSTQDLFLPFFSNVTWFHAIHVSGTNGTKRFDNPVLPFNDGVYFASTEKSNIIRGWIFGTTLDSKTQSLLIVNNATNVVIKVCEFQFCNDPFLGVYYHKNNKSWMESEFRVYSSANNCTFEYVSQPFLMDLEGKQGNFKNLREFVFKNIDGYFKIYSKHTPINLVRDLPQGFSALEPLVDLPIGINITRFQTLLALHRSYLTPGDSSSGWTAGAAAYYVGYLQPRTFLLKYNENGTITDAVDCALDPLSETKCTLKSFTVEKGIYQTSNFRVQPTESIVRFPNITNLCPFGEVFNATRFASVYAWNRKRISNCVADYSVLYNSASFSTFKCYGVSPTKLNDLCFTNVYADSFVIRGDEVRQIAPGQTGKIADYNYKLPDDFTGCVIAWNSNNLDSKVGGNYNYLYRLFRKSNLKPFERDISTEIYQAGSTPCNGVEGFNCYFPLQSYGFQPTNGVGYQPYRVVVLSFELLHAPATVCGPKKSTNLVKNKCVNFNFNGLTGTGVLTESNKKFLPFQQFGRDIADTTDAVRDPQTLEILDITPCSFGGVSVITPGTNTSNQVAVLYQDVNCTEVPVAIHADQLTPTWRVYSTGSNVFQTRAGCLIGAEYVNNSYECDIPIGAGICASYQTQTNSPRRARSVASQSIIAYTMSLGAENSVAYSNNSIAIPTNFTISVTTEILPVSMTKTSVDCTMYICGDSTECSNLLLQYGSFCTQLNRALTGIAVEQDKNTQEVFAQVKQIYKTPPIKDFGGFNFSQILPDPSKPSKRSFIEDLLFNKVTLADAGFIKQYGDCLGDIAARDLICAQKFNGLTVLPPLLTDEMIAQYTSALLAGTITSGWTFGAGAALQIPFAMQMAYRFNGIGVTQNVLYENQKLIANQFNSAIGKIQDSLSSTASALGKLQDVVNQNAQALNTLVKQLSSNFGAISSVLNDILSRLDPPEAEVQIDRLITGRLQSLQTYVTQQLIRAAEIRASANLAATKMSECVLGQSKRVDFCGKGYQLMSFPQSAPHGVVFLNVTYVPAQEKNFTTAPAICNDGKAHFPREGVFVSNGTNWFVTQRNFYEPQIITTDNTFVSGNCDVVIGIVNNTVYDPLQPELDSFKEELDKYFKNHTSPDVDLGDISGINASVVNIQKEIDRLNEVAKNLNESLIDLQELGKYEQYIKGGGGSDIIKLLNEQVNKEMQSSNLYMSMSSWCYTHSLDGAGLFLFDHAAEEYEHAKKLIIFLNENNVPVQLTSISAPEHKFEGLTQIFQKAYEHEQHISESINNIVDHAIKSKDHATFNFLQWYVAEQHEEEVLFKDILDKIELIGNENHGLYLADQYVKGIAKSRKS

SEQ ID NO: 4921 - protein, 1379 aa, Artificial Sequence
  SARS-CoV-2/England/20102000506/2020__EPI_ISL_415147 spike protein (1-1211)(K986P_V987P_ H1048Q_H1064N_ H1083N_H1101N) Ferritin construct
MFVFLVLLPLVSSQCVNLTTRTQLPPAYTNSFTRGVYYPDKVFRSSVLHSTQDLFLPFFSNVTWFHAIHVSGTNGTKRFDNPVLPFNDGVYFASTEKSNIIRGWIFGTTLDSKTQSLLIVNNATNVVIKVCEFQFCNDPFLGVYYHKNNKSWMESEFRVYSSANNCTFEYVSQPFLMDLEGKQGNFKNLREFVFKNIDGYFKIYSKHTPINLVRDLPQGFSALEPLVDLPIGINITRFQTLLALHRSYLTPGDSSSGWTAGAAAYYVGYLQPRTFLLKYNENGTITDAVDCALDPLSETKCTLKSFTVEKGIYQTSNFRVQPTESIVRFPNITNLCPFGEVFNATRFASVYAWNRKRISNCVADYSVLYNSASFSTFKCYGVSPTKLNDLCFTNVYADSFVIRGDEVRQIAPGQTGKIADYNYKLPDDFTGCVIAWNSNNLDSKVGGNYNYLYRLFRKSNLKPFERDISTEIYQAGSTPCNGVEGFNCYFPLQSYGFQPTNGVGYQPYRVVVLSFELLHAPATVCGPKKSTNLVKNKCVNFNFNGLTGTGVLTESNKKFLPFQQFGRDIADTTDAVRDPQTLEILDITPCSFGGVSVITPGTNTSNQVAVLYQGVNCTEVPVAIHADQLTPTWRVYSTGSNVFQTRAGCLIGAEHVNNSYECDIPIGAGICASYQTQTNSPRRARSVASQSIIAYTMSLGAENSVAYSNNSIAIPTNFTISVTTEILPVSMTKTSVDCTMYICGDSTECSNLLLQYGSFCTQLNRALTGIAVEQDKNTQEVFAQVKQIYKTPPIKDFGGFNFSQILPDPSKPSKRSFIEDLLFNKVTLADAGFIKQYGYCLGDIAARDLICAQKFNGLTVLPPLLTDEMIAQYTSALLAGTITSGWTFGAGAALQIPFAMQMAYRFNGIGVTQNVLYENQKLIANQFNSAIGKIQDSLSSTASALGKLQDVVNQNAQALNTLVKQLSSNFGAISSVLNDILSRLDPPEAEVQIDRLITGRLQSLQTYVTQQLIRAAEIRASANLAATKMSECVLGQSKRVDFCGKGYQLMSFPQSAPHGVVFLNVTYVPAQEKNFTTAPAICNDGKAHFPREGVFVSNGTNWFVTQRNFYEPQIITTDNTFVSGNCDVVIGIVNNTVYDPLQPELDSFKEELDKYFKNHTSPDVDLGDISGINASVVNIQKEIDRLNEVAKNLNESLIDLQELGKYEQYIKGGGGSDIIKLLNEQVNKEMQSSNLYMSMSSWCYTHSLDGAGLFLFDHAAEEYEHAKKLIIFLNENNVPVQLTSISAPEHKFEGLTQIFQKAYEHEQHISESINNIVDHAIKSKDHATFNFLQWYVAEQHEEEVLFKDILDKIELIGNENHGLYLADQYVKGIAKSRKS

SEQ ID NO: 4922 - protein, 1379 aa, Artificial Sequence
  SARS-CoV-2/Belgium/VAG-03013/2020__EPI_ISL_415155 spike protein (1-1211)(K986P_V987P_ H1048Q_H1064N_ H1083N_H1101N) Ferritin construct
MFVFLVLLPLVSSQCVNLTTRTQLPPAYTNSFTRGVYYPDKVFRSSVLHSTQDLFLPFFSNVTWFHAIHVSGTNGTKRFDNPVLPFNDGVYFASTEKSNIIRGWIFGTTLDSKTQSLLIVNNATNVVIKVCEFQFCNDPFLGVYYHKNNKSWMESEFRVYSSANNCTFEYVSQPFLMDLEGKQGNFKNLREFVFKNIDGYFKIYSKHTPINLVRDLPQGFSALEPLVDLPIGINITRFQTLLALHRSYLTPGDSSSGWTAGAAAYYVGYLQPRTFLLKYNENGTITDAVDCALDPLSETKCTLKSFTVEKGIYQTSNFRVQPTESIVRFPNITNLCPFGEVFNATRFASVYAWNRKRISNCVADYSVLYNSASFSTFKCYGVSPTKLNDLCFTNVYADSFVIRGDEVRQIAPGQTGKIADYNYKLPDDFTGCVIAWNSNNLDSKVGGNYNYLYRLFRKSNLKPFERDISTEIYQAGSTPCNGVEGFNCYFPLQSYGFQPTNGVGYQPYRVVVLSFELLHAPATVCGPKKSTNLVKNKCVNFNFNGLTGTGVLTESNKKFLPFQQFGRDIADTTDAVRDPQTLEILDITPCSFGGVSVITPGTNTSNQVAVLYQGVNCTEVPVAIHADQLTPTWRVYSTGSNVFQTRAGCLIGAEHVNNSYECDIPIGAGICASYQTQTNSPRRARSVASQSIIAYTMSLGAENSVAYSNNSIAIPTNFTISVTTEILPVSMTKTSVDCTMYICGDSTECSNLLLQYGSFCTQLNRALTGIAVEQDKNTQEVFAQVKQIYKTPPIKDFGGFNFSQILPDPSKPSKRSFIEDLLFNKVTLADAGFIKQYGDCLGDIAARDLICAQKFNGLTVLPPLLTDEMIAQYTSALLAGTITSGWTFGAGAALQIPFAMQMAYRFNGIGVTQNVLYENQKLIANQFNSAIGKIQDSLSSTATALGKLQDVVNQNAQALNTLVKQLSSNFGAISSVLNDILSRLDPPEAEVQIDRLITGRLQSLQTYVTQQLIRAAEIRASANLAATKMSECVLGQSKRVDFCGKGYQLMSFPQSAPHGVVFLNVTYVPAQEKNFTTAPAICNDGKAHFPREGVFVSNGTNWFVTQRNFYEPQIITTDNTFVSGNCDVVIGIVNNTVYDPLQPELDSFKEELDKYFKNHTSPDVDLGDISGINASVVNIQKEIDRLNEVAKNLNESLIDLQELGKYEQYIKGGGGSDIIKLLNEQVNKEMQSSNLYMSMSSWCYTHSLDGAGLFLFDHAAEEYEHAKKLIIFLNENNVPVQLTSISAPEHKFEGLTQIFQKAYEHEQHISESINNIVDHAIKSKDHATFNFLQWYVAEQHEEEVLFKDILDKIELIGNENHGLYLADQYVKGIAKSRKS

SEQ ID NO: 4923 - protein, 1379 aa, Artificial Sequence
  SARS-CoV-2/Belgium/BC-03016/2020__EPI_ISL_415157 spike protein (1-1211)(K986P_V987P_ H1048Q_H1064N_ H1083N_H1101N) Ferritin construct
MFVFLVLLPLVSSQCVNLTTRTQLPPAYTNSFTRGVYYPDKVFRSSVLHSTQDLFLPFFSNVTWFHAIHVSGTNGTKRFDNPVLPFNDGVYFASTEKSNIIRGWIFGTTLDSKTQSLLIVNNATNVVIKVCEFQFCNDPFLGVYYHKNNKSWMESEFRVYSSANNCTFEYVSQPFLMDLEGKQGNFKNLREFVFKNIDGYFKIYSKHTPINLVRDLPQGFSALEPLVDLPIGINITRFQTLLALHRSYLTPGDSSSGWTAGAAAYYVGYLQPRTFLLKYNENGTITDAVDCALDPLSETKCTLKSFTVEKGIYQTSNFRVQPTESIVRFPNITNLCPFGEVFNATRFASVYAWNRKRISNCVADYSVLYNSASFSTFKCYGVSPTKLNDLCFTNVYADSFVIRGDEVRQIAPGQTGKIADYNYKLPDDFTGCVIAWNSNNLDSKVGGNYNYLYRLFRKSNLKPFERDISTEIYQAGSTPCNGVEGFNCYFPLQSYGFQPTNGVGYQPYRVVVLSFELLHAPATVCGPKKSTNLVKNKCVNFNFNGLTGTGVLTESNKKFLPFQQFGRDIADTTDAVRDPQTLEILDITPCSFGGVSVITPGTNTSNQVAVLYQGVNCTEVPVAIHADQLTPTWRVYSTGSNVFQTRAGCLIGAEHVNNSYECDIPIGAGICASYQTQTNSPRRARSVASQSIIAYTMSLGAENSVAYSNNSIAIPTNFTISVTTEILPVSMTKTSVDCTMYICGDSTECSNLLLQYGSFCTQLNRALTGIAVEQDKNTQEVFAQVKQIYKTPPIKDFGGFNFSQILPDPSKPSKRSFIEDLLFNKVTLADAGFIKQYGDCLGDIAARDLICAQKFNGLTVLPPLLTDEMIAQYTSALLAGTITSGWTFGAGAALQIPFAMQMAYRFNGIGVTQNVLYENQKLIANQFNSAIGKIQDSLSSTAPALGKLQDVVNQNAQALNTLVKQLSSNFGAISSVLNDILSRLDPPEAEVQIDRLITGRLQSLQTYVTQQLIRAAEIRASANLAATKMSECVLGQSKRVDFCGKGYQLMSFPQSAPHGVVFLNVTYVPAQEKNFTTAPAICNDGKAHFPREGVFVSNGTNWFVTQRNFYEPQIITTDNTFVSGNCDVVIGIVNNTVYDPLQPELDSFKEELDKYFKNHTSPDVDLGDISGINASVVNIQKEIDRLNEVAKNLNESLIDLQELGKYEQYIKGGGGSDIIKLLNEQVNKEMQSSNLYMSMSSWCYTHSLDGAGLFLFDHAAEEYEHAKKLIIFLNENNVPVQLTSISAPEHKFEGLTQIFQKAYEHEQHISESINNIVDHAIKSKDHATFNFLQWYVAEQHEEEVLFKDILDKIELIGNENHGLYLADQYVKGIAKSRKS

SEQ ID NO: 4924 - protein, 1379 aa, Artificial Sequence
  SARS-CoV-2/Germany/BavPat3/2020__EPI_ISL_414521 spike protein (1-1211)(K986P_V987P_ H1048Q_H1064N_ H1083N_H1101N) Ferritin construct
MFVFLVLLPLVSSQCVNLTTRTQLPPAYTNSFTRGVYYPDKVFRSSVLHSTQDLFLPFFSNVTWFHAIHVSGTNGTKRFDNPVLPFNDGVYFASTEKSNIIRGWIFGTTLDSKTQSLLIVNNATNVVIKVCEFQFCNDPFLGVYYHKNNKSWMESEFRVYSSANNCTFEYVSQPFLMDLEGKQGNFKNLREFVFKNIDGYFKIYSKHTPINLVRDLPQGFSALEPLVDLPIGINITRFQTLLALHRSYLTPGDSSSGWTAGAAAYYVGYLQPRTFLLKYNENGTITDAVDCALDPLSETKCTLKSFTVEKGIYQTSNFRVQPTESIVRFPNITNLCPFGEVFNATRFASVYAWNRKRISNCVADYSVLYNSASFSTFKCYGVSPTKLNDLCFTNVYADSFVIRGDEVRQIAPGQTGKIADYNYKLPDDFTGCVIAWNSNNLDSKVGGNYNYLYRLFRKSNLKPFERDISTEIYQAGSTPCNGVEGFNCYFPLQSYGFQPTNGVGYQPYRVVVLSFELLHAPATVCGPKKSTNLVKNKCVNFNFNGLTGTGVLTESNKKFLPFQQFGRDIADTTDAVRDPQTLEILDITPCSFGGVSVITPGTNTSNQVAVLYQDVNCTEVPVAIHADQLTPTWRVYSTGSNVFQTRAGCLIGAEHVNNSYECDIPIGAGICASYQTQTNSPRRARSVASQSIIAYTMSLGAENSVAYSNNSIAIPTNFTISVTTEILPVSMTKTSVDCTMYICGDSTECSNLLLQYGSFCTQLNRALTGIAVEQDKNTQQVFAQVKQIYKTPPIKDFGGFNFSQILPDPSKPSKRSFIEDLLFNKVTLADAGFIKQYGDCLGDIAARDLICAQKFNGLTVLPPLLTDEMIAQYTSALLAGTITSGWTFGAGAALQIPFAMQMAYRFNGIGVTQNVLYENQKLIANQFNSAIGKIQDSLSSTASALGKLQDVVNQNAQALNTLVKQLSSNFGAISSVLNDILSRLDPPEAEVQIDRLITGRLQSLQTYVTQQLIRAAEIRASANLAATKMSECVLGQSKRVDFCGKGYQLMSFPQSAPHGVVFLNVTYVPAQEKNFTTAPAICNDGKAHFPREGVFVSNGTNWFVTQRNFYEPQIITTDNTFVSGNCDVVIGIVNNTVYDPLQPELDSFKEELDKYFKNHTSPDVDLGDISGINASVVNIQKEIDRLNEVAKNLNESLIDLQELGKYEQYIKGGGGSDIIKLLNEQVNKEMQSSNLYMSMSSWCYTHSLDGAGLFLFDHAAEEYEHAKKLIIFLNENNVPVQLTSISAPEHKFEGLTQIFQKAYEHEQHISESINNIVDHAIKSKDHATFNFLQWYVAEQHEEEVLFKDILDKIELIGNENHGLYLADQYVKGIAKSRKS

SEQ ID NO: 4925 - protein, 1379 aa, Artificial Sequence
  SARS-CoV-2/France/HF1805/2020__EPI_ISL_414628 spike protein (1-1211)(K986P_V987P_ H1048Q_H1064N_ H1083N_H1101N) Ferritin construct
MFVFLVLLPLVSSQCVNLTTRTQLPPAYTNSFTRGVYYPDKVFRSSVLHSTQDLFLPFFSNVTWFHAIHVSGTNGTKRFDNPVLPFNDGVYFASTEKSNIIRGWIFGTTLDSKTQSLLIVNNATNVVIKVCEFQFCNDPFLGVYYHKNNKSWMESEFRVYSSANNCTFEYVSQPFLMDLEGKQGNFKNLREFVFKNIDGYFKIYSKHTPINLVRDLPQGFSALEPLVDLPIGINITRFQTLLALHRSYLTPGDSSSGWTAGAAAYYVGYLQPRTFLLKYNENGTITDAVDCALDPLSETKCTLKSFTVEKGIYQTSNFRVQPTESIVRFPNITNLCPFGEVFNATRFASVYAWNRKRISNCVADYSVLYNSASFSTFKCYGVSPTKLNDLCFTNVYADSFVIRGDEVRQIAPGQTGKIADYNYKLPDDFTGCVIAWNSNNLDSKVGGNYNYLYRLFRKSNLKPFERDISTEIYQAGSTPCNGVEGFNCYFPLQSYGFQPTNGVGYQPYRVVVLSFELLHAPATVCGPKKSTNLVKNKCVNFNFNGLTGTGVLTESNKKFLPFQQFGRDIADTTDAVRDPQTLEILDITPCSFGGVSVITPGTNTSNQVAVLYQGVNCTEVPVAIHADQLTPTWRVYSTGSNVFQTRAGCLIGAEHVNNSYECDIPIGAGICASYQTQTNSPRRARSVASQSIIAYTMSLGAENSVAYSNNSIAIPTNFTISVTTEILPVSMTKTSVDCTMYICGDSTECSNLLLQYGSFCTQLNRALTGIAVEQDKNTQEVFAQVKQIYKTPPIKDFGGFNFSQILPDPSKPSKRSFIEDLLFNKVTLADAGFIKQYGDCLGDIAARDLICAQKFNGLTVLPPLLTDEMIAQYTSALLAGTITSGWTFGAGAALQIPFAMQMAYRFNGIGVTQNVLYENQKLIANQFNSAIGKIQDSLSSTASALGKLQDVVNQNAQALNTLVKQLSSNFGAISSVLNDILSRLDPPEAEVQIDRLITGRLQSLQTYVTQQLIRAAEIRASANLAATKMSECVLGQSKRVDFCGKGYQLMSFPQSAPHGVVFLNVTYVPAQEKNFTTAPAICNDGKAHFPREGVFVSNGTNWFVTQRNFYEPQIITTDNTFVSGNCDVVIGVVNNTVYDPLQPELDSFKEELDKYFKNHTSPDVDLGDISGINASVVNIQKEIDRLNEVAKNLNESLIDLQELGKYEQYIKGGGGSDIIKLLNEQVNKEMQSSNLYMSMSSWCYTHSLDGAGLFLFDHAAEEYEHAKKLIIFLNENNVPVQLTSISAPEHKFEGLTQIFQKAYEHEQHISESINNIVDHAIKSKDHATFNFLQWYVAEQHEEEVLFKDILDKIELIGNENHGLYLADQYVKGIAKSRKS

SEQ ID NO: 4926 - protein, 1379 aa, Artificial Sequence
  SARS-CoV-2/Netherlands/ZuidHolland_9/2020__EPI_ISL_414445 spike protein (1-1211)(K986P_V987P_ H1048Q_H1064N_ H1083N_H1101N) Ferritin construct
MFVFLVLLPLVSSQCVNLTTRTQLPPAYTNSFTRGVYYPDKVFRSSVLHSTQDLFLPFFSNVTWFHAIHVSGTNGTKRFDNPVLPFNDGVYFASTEKSNIIRGWIFGTTLDSKTQSLLIVNNATNVVIKVCEFQFCNDPFLGVYYHKNNKSWMESEFRVYSSANNCTFEYVSQPFLMDLEGKQGNFKNLREFVFKNIDGYFKIYSKHTPINLVRDLPQGFSALEPLVDLPIGINITRFQTLLALHRSYLTPGDSSSGWTAGAAAYYVGYLQPRTFLLKYNENGTITDAVDCALDPLSETKCTLKSFTVEKGIYQTSNFRVQPTESIVRFPNITNLCPFGEVFNATRFASVYAWNRKRISNCVADYSVLYNSASFSTFKCYGVSPTKLNDLCFTNVYADSFVIRGDEVRQIAPGQTGKIADYNYKLPDDFTGCVIAWNSNNLDSKVGGNYNYLYRLFRKSNLKPFERDISTEIYQAGSTPCNGVEGFNCYFPLQSYGFQPTNGVGYQPYRVVVLSFELLHAPATVCGPKKSTNLVKNKCVNFNFNGLTGTGVLTESNKKFLPFQQFGRDIADTTDAVRDPQTLEILDITPCSFGGVSVITPGTNTSNQVAVLYQGVNCTEVPVAIHADQLTPTWRVYSTGSNVFQTRAGCLIGAEHVNNSYECDIPIGAGICASYQTQTNSPRRARSVASQSIIAYTMSLGAENSVAYSNNSIAIPTNFTISVTTEILPVSMTKTSVDCTMYICGDSTECSNLLLQYGSFCTQLNRALTGIAVEQDKNTQEVFAQVKQIYKTPPIKDFGGFNFSQILPDPSKPSKRSFIEDLLFNKVTLADAGFIKQYGDCLGDIAARDLICVQKFNGLTVLPPLLTDEMIAQYTSALLAGTITSGWTFGAGAALQIPFAMQMAYRFNGIGVTQNVLYENQKLIANQFNSAIGKIQDSLSSTASALGKLQDVVNQNAQALNTLVKQLSSNFGAISSVLNDILSRLDPPEAEVQIDRLITGRLQSLQTYVTQQLIRAAEIRASANLAATKMSECVLGQSKRVDFCGKGYQLMSFPQSAPHGVVFLNVTYVPAQEKNFTTAPAICNDGKAHFPREGVFVSNGTNWFVTQRNFYEPQIITTDNTFVSGNCDVVIGIVNNTVYDPLQPELDSFKEELDKYFKNHTSPDVDLGDISGINASVVNIQKEIDRLNEVAKNLNESLIDLQELGKYEQYIKGGGGSDIIKLLNEQVNKEMQSSNLYMSMSSWCYTHSLDGAGLFLFDHAAEEYEHAKKLIIFLNENNVPVQLTSISAPEHKFEGLTQIFQKAYEHEQHISESINNIVDHAIKSKDHATFNFLQWYVAEQHEEEVLFKDILDKIELIGNENHGLYLADQYVKGIAKSRKS

SEQ ID NO: 4927 - protein, 1379 aa, Artificial Sequence
  SARS-CoV-2/Finland/FIN03032020A/2020__EPI_ISL_413602 spike protein (1-1211)(K986P_V987P_ H1048Q_H1064N_ H1083N_H1101N) Ferritin construct
MFVFLVLLPLVSSQCVNLTTRTQLPPAYTNSFTRGVYYPDKVFRSSVLHSTQDLFLPFFSNVTWFHAIHVSGTNGTKRFDNPVLPFNDGVYFASTEKSNIIRGWIFGTTLDSKTQSLLIVNNATNVVIKVCEFQFCNDPFLGVYYHKNNKSWMESEFRVYSSANNCTFEYVSQPFLMDLEGKQGNFKNLREFVFKNIDGYFKIYSKHTPINLVRDLPQGFSALEPLVDLPIGINITRFQTLLALHRSYLTPGDSSSGWTAGAAAYYVGYLQPRTFLLKYNENGTITDAVDCALDPLSETKCTLKSFTVEKGIYQTSNFRVQPTESIVRFPNITNLCPFGEVFNATRFASVYAWNRKRISNCVADYSVLYNSASFSTFKCYGVSPTKLNDLCFTNVYADSFVIRGDEVRQIAPGQTGKIADYNYKLPDDFTGCVISWNSNNLDSKVGGNYNYLYRLFRKSNLKPFERDISTEIYQAGSTPCNGVEGFNCYFPLQSYGFQPTNGVGYQPYRVVVLSFELLHAPATVCGPKKSTNLVKNKCVNFNFNGLTGTGVLTESNKKFLPFQQFGRDIADTTDAVRDPQTLEILDITPCSFGGVSVITPGTNTSNQVAVLYQGVNCTEVPVAIHADQLTPTWRVYSTGSNVFQTRAGCLIGAEHVNNSYECDIPIGAGICASYQTQTNSPRRARSVASQSIIAYTMSLGAENSVAYSNNSIAIPTNFTISVTTEILPVSMTKTSVDCTMYICGDSTECSNLLLQYGSFCTQLNRALTGIAVEQDKNTQEVFAQVKQIYKTPPIKDFGGFNFSQILPDPSKPSKRSFIEDLLFNKVTLADAGFIKQYGDCLGDIAARDLICAQKFNGLTVLPPLLTDEMIAQYTSALLAGTITSGWTFGAGAALQIPFAMQMAYRFNGIGVTQNVLYENQKLIANQFNSAIGKIQDSLSSTASALGKLQDVVNQNAQALNTLVKQLSSNFGAISSVLNDILSRLDPPEAEVQIDRLITGRLQSLQTYVTQQLIRAAEIRASANLAATKMSECVLGQSKRVDFCGKGYQLMSFPQSAPHGVVFLNVTYVPAQEKNFTTAPAICNDGKAHFPREGVFVSNGTNWFVTQRNFYEPQIITTDNTFVSGNCDVVIGIVNNTVYDPLQPELDSFKEELDKYFKNHTSPDVDLGDISGINASVVNIQKEIDRLNEVAKNLNESLIDLQELGKYEQYIKGGGGSDIIKLLNEQVNKEMQSSNLYMSMSSWCYTHSLDGAGLFLFDHAAEEYEHAKKLIIFLNENNVPVQLTSISAPEHKFEGLTQIFQKAYEHEQHISESINNIVDHAIKSKDHATFNFLQWYVAEQHEEEVLFKDILDKIELIGNENHGLYLADQYVKGIAKSRKS

SEQ ID NO: 4928 - protein, 1379 aa, Artificial Sequence
  SARS-CoV-2/France/GE1977/2020__EPI_ISL_414632 spike protein (1-1211)(K986P_V987P_ H1048Q_H1064N_ H1083N_H1101N) Ferritin construct
MFVFLVLLPLVSSQCVNLTTRTQLPPAYTNSFTRGVYYPDKVFRSSVLHSTQDLFLPFFSNVTWFHAIHVSGTNGTKRFDNPVLPFNDGVYFASTEKSNIIRGWIFGTTLDSKTQSLLIVNNATNVVIKVCEFQFCNDPFLGVYYHKNNKSWMESEFRVYSSANNCTFEYVSQPFLMDLEGKQGNFKNLREFVFKNIDGYFKIYSKHTPINLVRDLPQGFSALEPLVDLPIGINITRFQTLLALHRSYLTPGDSSSGWTAGAAAYYVGYLQPRTFLLKYNENGTITDAVDCALDPLSETKCTLKSFTVEKGIYQTSNFRVQPTESIVRFPNITNLCPFGEVFNATRFASVYAWNRKRISNCVADYSVLYNSASFSTFKCYGVSPTKLNDLCFTNVYADSFVIRGDEVRQIAPGQTGKIADYNYKLPDDFTGCVIAWNSNNLDSKVGGNYNYLYRLFRKSNLKPFERDISTEIYQAGSTPCNGVEGFNCYFPLQSYGFQPTNGVGYQPYRVVVLSFELLHAPATVCGPKKSTNLVKNKCVNFNFNGLTGTGVLTESNKKFLPFQQFGRDIADTTDAVRDPQTLEILDITPCSFGGVSVITPGTNTSNQVAVLYQGVNCTEVPVAIHADQLTPTWRVYSTGSNVFQTRAGCLIGAEHVNNSYECDIPIGAGICASYQTQTNSPRRARSVASQSIIAYTMSLGAENSVAYSNNSIAIPTNFTISVTTEILPVSMTKTSVDCTMYICGDSTECSNLLLQYGSFCTQLNRALTGIAVEQDKNTQEVFAQVKQIYKTPPIKDFGGFNFSQILPDPSKPSKRSFIEDLLFNKVTLADAGFIKQYGDCLGDIAARDLICAQKFNGLTVLPPLLTDEMIAQYTSALLAGTITSGWTFGAGAALQIPFAMQMAYRFNGIGVTQNVLYENQKLIANQFNSAIGKIQDSLFSTASALGKLQDVVNQNAQALNTLVKQLSSNFGAISSVLNDILSRLDPPEAEVQIDRLITGRLQSLQTYVTQQLIRAAEIRASANLAATKMSECVLGQSKRVDFCGKGYQLMSFPQSAPHGVVFLNVTYVPAQEKNFTTAPAICNDGKAHFPREGVFVSNGTNWFVTQRNFYEPQIITTDNTFVSGNCDVVIGIVNNTVYDPLQPELDSFKEELDKYFKNHTSPDVDLGDISGINASVVNIQKEIDRLNEVAKNLNESLIDLQELGKYEQYIKGGGGSDIIKLLNEQVNKEMQSSNLYMSMSSWCYTHSLDGAGLFLFDHAAEEYEHAKKLIIFLNENNVPVQLTSISAPEHKFEGLTQIFQKAYEHEQHISESINNIVDHAIKSKDHATFNFLQWYVAEQHEEEVLFKDILDKIELIGNENHGLYLADQYVKGIAKSRKS

SEQ ID NO: 4929 - protein, 1379 aa, Artificial Sequence
  SARS-CoV-2/Finland/FIN-313/2020__EPI_ISL_414641 spike protein (1-1211)(K986P_V987P_ H1048Q_H1064N_ H1083N_H1101N) Ferritin construct
MFVFLVLLPLVSSQCVNLTTRTQLPPAYTNSFTRGVYYPDKVFRSSVLHSTQDLFLPFFSNVTWFHAIHVSGTNGTKRFDNPVLPFNDGVYFASTEKSNIIRGWIFGTTLDSKTQSLLIVNNATNVVIKVCEFQFCNDPFLGVYYHKNNKSWMESEFRVYSSANNCTFEYVSQPFLMDLEGKQGNFKNLREFVFKNIDGYFKIYSKHTPINLVRDLPQGFSALEPLVDLPIGINITRFKTLLALHRSYLTPGDSSSGWTAGAAAYYVGYLQPRTFLLKYNENGTITDAVDCALDPLSETKCTLKSFTVEKGIYQTSNFRVQPTESIVRFPNITNLCPFGEVFNATRFASVYAWNRKRISNCVADYSVLYNSASFSTFKCYGVSPTKLNDLCFTNVYADSFVIRGDEVRQIAPGQTGKIADYNYKLPDDFTGCVIAWNSNNLDSKVGGNYNYLYRLFRKSNLKPFERDISTEIYQAGSTPCNGVEGFNCYFPLQSYGFQPTNGVGYQPYRVVVLSFELLHAPATVCGPKKSTNLVKNKCVNFNFNGLTGTGVLTESNKKFLPFQQFGRDIADTTDAVRDPQTLEILDITPCSFGGVSVITPGTNTSNQVAVLYQGVNCTEVPVAIHADQLTPTWRVYSTGSNVFQTRAGCLIGAEHVNNSYECDIPIGAGICASYQTQTNSPRRARSVASQSIIAYTMSLGAENSVAYSNNSIAIPTNFTISVTTEILPVSMTKTSVDCTMYICGDSTECSNLLLQYGSFCTQLNRALTGIAVEQDKNTQEVFAQVKQIYKTPPIKDFGGFNFSQILPDPSKPSKRSFIEDLLFNKVTLADAGFIKQYGDCLGDIAARDLICAQKFNGLTVLPPLLTDEMIAQYTSALLAGTITSGWTFGAGAALQIPFAMQMAYRFNGIGVTQNVLYENQKLIANQFNSAIGKIQDSLSSTASALGKLQDVVNQNAQALNTLVKQLSSNFGAISSVLNDILSRLDPPEAEVQIDRLITGRLQSLQTYVTQQLIRAAEIRASANLAATKMSECVLGQSKRVDFCGKGYQLMSFPQSAPHGVVFLNVTYVPAQEKNFTTAPAICNDGKAHFPREGVFVSNGTNWFVTQRNFYEPQIITTDNTFVSGNCDVVIGIVNNTVYDPLQPELDSFKEELDKYFKNHTSPDVDLGDISGINASVVNIQKEIDRLNEVAKNLNESLIDLQELGKYEQYIKGGGGSDIIKLLNEQVNKEMQSSNLYMSMSSWCYTHSLDGAGLFLFDHAAEEYEHAKKLIIFLNENNVPVQLTSISAPEHKFEGLTQIFQKAYEHEQHISESINNIVDHAIKSKDHATFNFLQWYVAEQHEEEVLFKDILDKIELIGNENHGLYLADQYVKGIAKSRKS

SEQ ID NO: 4930 - protein, 1379 aa, Artificial Sequence
  SARS-CoV-2/Netherlands/ZuidHolland_2/2020__EPI_ISL_414556 spike protein (1-1211)(K986P_V987P_ H1048Q_H1064N_ H1083N_H1101N) Ferritin construct
MFVFLVLLPLVSSQCVNLTTRTQLPPAYTNSFTRGVYYPDKVFRSSVLHSTQDLFLPFFSNVTWFHAIHVSGTNGTKRFDNPVLPFNDGVYFASTEKSNIIRGWIFGTTLDSKTQSLLIVNNATNVVIKVCEFQFCNDPFLGVYYHKNNKSWMESEFRVYSSANNCTFEYVSQPFLMDLEGKQGNFKNLREFVFKNIDGYFKIYSKHTPINLVRDLPQGFSALEPLVDLPIGINITRFQTLLALHRSYLTPGDSSSGWTAGAAAYYVGYLQPRTFLLKYNENGTITDAVDCALDPLSETKCTLKSFTVEKGIYQTSNFRVQPTESIVRFPNITNLCPFGEVFNATRFASVYAWNRKRISNCVADYSVLYNSASFSTFKCYGVSPTKLNDLCFTNVYADSFVIRGDEVRQIAPGQTGKIADYNYKLPDDFTGCVIAWNSNNLDSKVGGNYNYLYRLFRKSNLKPFERDISTEIYQAGSTPCNGVEGFNCYFPLQSYGFQPTNGVGYQPYRVVVLSFELLHAPATVCGPKKSTNLVKNKCVNFNFNGLTGTGVLTESNKKFLPFQQFGRDIADTTDAVRDPQTLEILDITPCSFGGVSVITPGTNTSNQVAVLYQGVNCTEVPVAIHADQLTPTWRVYSTGSNVFQTRAGCLIGAEHVNNSYECDIPIGAGICASYQTQTNSPRRARSVASQSIIAYTMSLGAENSVAYSNNSIAIPTNFTISVTTEILPVSMTKTSVDCTMYICGDSTECSNLLLQYGSFCTQLNRALTGIALEQDKNTQEVFAQVKQIYKTPPIKDFGGFNFSQILPDPSKPSKRSFIEDLLFNKVTLADAGFIKQYGDCLGDIAARDLICAQKFNGLTVLPPLLTDEMIAQYTSALLAGTITSGWTFGAGAALQIPFAMQMAYRFNGIGVTQNVLYENQKLIANQFNSAIGKIQDSLSSTASALGKLQDVVNQNAQALNTLVKQLSSNFGAISSVLNDILSRLDPPEAEVQIDRLITGRLQSLQTYVTQQLIRAAEIRASANLAATKMSECVLGQSKRVDFCGKGYQLMSFPQSAPHGVVFLNVTYVPAQEKNFTTAPAICNDGKAHFPREGVFVSNGTNWFVTQRNFYEPQIITTDNTFVSGNCDVVIGIVNNTVYDPLQPELDSFKEELDKYFKNHTSPDVDLGDISGINASVVNIQKEIDRLNEVAKNLNESLIDLQELGKYEQYIKGGGGSDIIKLLNEQVNKEMQSSNLYMSMSSWCYTHSLDGAGLFLFDHAAEEYEHAKKLIIFLNENNVPVQLTSISAPEHKFEGLTQIFQKAYEHEQHISESINNIVDHAIKSKDHATFNFLQWYVAEQHEEEVLFKDILDKIELIGNENHGLYLADQYVKGIAKSRKS

SEQ ID NO: 4931 - protein, 1379 aa, Artificial Sequence
  SARS-CoV-2/USA/WA-UW31/2020__EPI_ISL_414618 spike protein (1-1211)(K986P_V987P_ H1048Q_H1064N_ H1083N_H1101N) Ferritin construct
MFVFLVLLPLVSSQCVNLTTRTQLPPAYTNSFTRGVYYPDKVFRSSVLHSTQDLFLPFFSNVTWFHAIHVSGTNGTKRFDNPVLPFNDGVYFASTEKSNIIRGWIFGTTLDSKTQSLLIVNNATNVVIKVCEFQFCNDPFLGVYYHKNNKSWMESEFRVYSSANNCTFEYVSQPFLMDLEGKQGNFKNLREFVFKNIDGYFKIYSKHTPINLVRDLPQGFSALEPLVDLPIGINITRFQTLLALHRSYLTPGDSSSGWTAGAAAYYVGYLQPRTFLLKYNENGTITDAVDCALDPLSETKCTLKSFTVEKGIYQTSNFRVQPTESIVRFPNITNLCPFGEVFNATRFASVYAWNRKRISNCVADYSVLYNSASFSTFKCYGVSPTKLNDLCFTNVYADSFVIRGDEVRQIAPGQTGKIADYNYKLPDDFTGCVIAWNSNNLDSKVGGNYNYLYRLFRKSNLKPFERDISTEIYQAGSTPCNGAEGFNCYFPLQSYGFQPTNGVGYQPYRVVVLSFELLHAPATVCGPKKSTNLVKNKCVNFNFNGLTGTGVLTESNKKFLPFQQFGRDIADTTDAVRDPQTLEILDITPCSFGGVSVITPGTNTSNQVAVLYQDVNCTEVPVAIHADQLTPTWRVYSTGSNVFQTRAGCLIGAEHVNNSYECDIPIGAGICASYQTQTNSPRRARSVASQSIIAYTMSLGAENSVAYSNNSIAIPTNFTISVTTEILPVSMTKTSVDCTMYICGDSTECSNLLLQYGSFCTQLNRALTGIAVEQDKNTQEVFAQVKQIYKTPPIKDFGGFNFSQILPDPSKPSKRSFIEDLLFNKVTLADAGFIKQYGDCLGDIAARDLICAQKFNGLTVLPPLLTDEMIAQYTSALLAGTITSGWTFGAGAALQIPFAMQMAYRFNGIGVTQNVLYENQKLIANQFNSAIGKIQDSLSSTASALGKLQDVVNQNAQALNTLVKQLSSNFGAISSVLNDILSRLDPPEAEVQIDRLITGRLQSLQTYVTQQLIRAAEIRASANLAATKMSECVLGQSKRVDFCGKGYQLMSFPQSAPHGVVFLNVTYVPAQEKNFTTAPAICNDGKAHFPREGVFVSNGTNWFVTQRNFYEPQIITTDNTFVSGNCDVVIGIVNNTVYDPLQPELDSFKEELDKYFKNHTSPDVDLGDISGINASVVNIQKEIDRLNEVAKNLNESLIDLQELGKYEQYIKGGGGSDIIKLLNEQVNKEMQSSNLYMSMSSWCYTHSLDGAGLFLFDHAAEEYEHAKKLIIFLNENNVPVQLTSISAPEHKFEGLTQIFQKAYEHEQHISESINNIVDHAIKSKDHATFNFLQWYVAEQHEEEVLFKDILDKIELIGNENHGLYLADQYVKGIAKSRKS

SEQ ID NO: 4932 - protein, 1379 aa, Artificial Sequence
  SARS-CoV-2/South Korea/SNU01/2020__EPI_ISL_411929 spike protein (1-1211)(K986P_V987P_ H1048Q_H1064N_ H1083N_H1101N) Ferritin construct
MFVFLVLLPLVSSQCVNLTTRTQLPPAYTNSFTRGVYYPDKVFRSSVLHSTQDLFLPFFSNVTWFHAIHVSGTNGTKRFDNPVLPFNDGVYFASTEKSNIIRGWIFGTTLDSKTQSLLIVNNATNVVIKVCEFQFCNDPFLGVYYHKNNKSWMESEFRVYSSANNCTFEYVSQPFLMDLEGKQGNFKNLREFVFKNIDGYFKIYSKHTPINLVRDLPQGFWALEPLVDLPIGINITRFQTLLALHRSYLTPGDSSSGWTAGAAAYYVGYLQPRTFLLKYNENGTITDAVDCALDPLSETKCTLKSFTVEKGIYQTSNFRVQPTESIVRFPNITNLCPFGEVFNATRFASVYAWNRKRISNCVADYSVLYNSASFSTFKCYGVSPTKLNDLCFTNVYADSFVIRGDEVRQIAPGQTGKIADYNYKLPDDFTGCVIAWNSNNLDSKVGGNYNYLYRLFRKSNLKPFERDISTEIYQAGSTPCNGVEGFNCYFPLQSYGFQPTNGVGYQPYRVVVLSFELLHAPATVCGPKKSTNLVKNKCVNFNFNGLTGTGVLTESNKKFLPFQQFGRDIADTTDAVRDPQTLEILDITPCSFGGVSVITPGTNTSNQVAVLYQDVNCTEVPVAIHADQLTPTWRVYSTGSNVFQTRAGCLIGAEHVNNSYECDIPIGAGICASYQTQTNSPRRARSVASQSIIAYTMSLGAENSVAYSNNSIAIPTNFTISVTTEILPVSMTKTSVDCTMYICGDSTECSNLLLQYGSFCTQLNRALTGIAVEQDKNTQEVFAQVKQIYKTPPIKDFGGFNFSQILPDPSKPSKRSFIEDLLFNKVTLADAGFIKQYGDCLGDIAARDLICAQKFNGLTVLPPLLTDEMIAQYTSALLAGTITSGWTFGAGAALQIPFAMQMAYRFNGIGVTQNVLYENQKLIANQFNSAIGKIQDSLSSTASALGKLQDVVNQNAQALNTLVKQLSSNFGAISSVLNDILSRLDPPEAEVQIDRLITGRLQSLQTYVTQQLIRAAEIRASANLAATKMSECVLGQSKRVDFCGKGYQLMSFPQSAPHGVVFLNVTYVPAQEKNFTTAPAICNDGKAHFPREGVFVSNGTNWFVTQRNFYEPQIITTDNTFVSGNCDVVIGIVNNTVYDPLQPELDSFKEELDKYFKNHTSPDVDLGDISGINASVVNIQKEIDRLNEVAKNLNESLIDLQELGKYEQYIKGGGGSDIIKLLNEQVNKEMQSSNLYMSMSSWCYTHSLDGAGLFLFDHAAEEYEHAKKLIIFLNENNVPVQLTSISAPEHKFEGLTQIFQKAYEHEQHISESINNIVDHAIKSKDHATFNFLQWYVAEQHEEEVLFKDILDKIELIGNENHGLYLADQYVKGIAKSRKS

SEQ ID NO: 4933 - protein, 1379 aa, Artificial Sequence
  SARS-CoV-2/China/WF0004/2020__EPI_ISL_413694 spike protein (1-1211)(K986P_V987P_ H1048Q_H1064N_ H1083N_H1101N) Ferritin construct
MFVFLVLLPLVSSQCVNLTTRTQLPPAYTNSFTRGVYYPDKVFRSSVLHSTQDLFLPFFSNVTWFHAIHVSGTNGTKRFDNPVLPFNDGVYFASTEKSNIIRGWIFGTTLDSKTQSLLIVNNATNVVIKVCEFQFCNDPFLGVYYHKNNKSWTESEFRVYSSANNCTFEYVSQPFLMDLEGKQGNFKNLREFVFKNIDGYFKIYSKHTPINLVRDLPQGFSALEPLVDLPIGINITRFQTLLALHRSYLTPGDSSSGWTAGAAAYYVGYLQPRTFLLKYNENGTITDAVDCALDPLSETKCTLKSFTVEKGIYQTSNFRVQPTESIVRFPNITNLCPFGEVFNATRFASVYAWNRKRISNCVADYSVLYNSASFSTFKCYGVSPTKLNDLCFTNVYADSFVIRGDEVRQIAPGQTGKIADYNYKLPDDFTGCVIAWNSNNLDSKVGGNYNYLYRLFRKSNLKPFERDISTEIYQAGSTPCNGVEGFNCYFPLQSYGFQPTNGVGYQPYRVVVLSFELLHAPATVCGPKKSTNLVKNKCVNFNFNGLTGTGVLTESNKKFLPFQQFGRDIADTTDAVRDPQTLEILDITPCSFGGVSVITPGTNTSNQVAVLYQDVNCTEVPVAIHADQLTPTWRVYSTGSNVFQTRAGCLIGAEHVNNSYECDIPIGAGICASYQTQTNSPRRARSVASQSIIAYTMSLGAENSVAYSNNSIAIPTNFTISVTTEILPVSMTKTSVDCTMYICGDSTECSNLLLQYGSFCTQLNRALTGIAVEQDKNTQEVFAQVKQIYKTPPIKDFGGFNFSQILPDPSKPSKRSFIEDLLFNKVTLADAGFIKQYGDCLGDIAARDLICAQKFNGLTVLPPLLTDEMIAQYTSALLAGTITSGWTFGAGAALQIPFAMQMAYRFNGIGVTQNVLYENQKLIANQFNSAIGKIQDSLSSTASALGKLQDVVNQNAQALNTLVKQLSSNFGAISSVLNDILSRLDPPEAEVQIDRLITGRLQSLQTYVTQQLIRAAEIRASANLAATKMSECVLGQSKRFDFCGKGYQLMSFPQSAPHGVVFLNVTYVPAQEKNFTTAPAICNDGKAHFPREGVFVSNGTNWFVTQRNFYEPQIITTDNTFVSGNCDVVIGIVNNTVYDPLQPELDSFKEELDKYFKNHTSPDVDLGDISGINASVVNIQKEIDRLNEVAKNLNESLIDLQELGKYEQYIKGGGGSDIIKLLNEQVNKEMQSSNLYMSMSSWCYTHSLDGAGLFLFDHAAEEYEHAKKLIIFLNENNVPVQLTSISAPEHKFEGLTQIFQKAYEHEQHISESINNIVDHAIKSKDHATFNFLQWYVAEQHEEEVLFKDILDKIELIGNENHGLYLADQYVKGIAKSRKS

SEQ ID NO: 4934 - protein, 1379 aa, Artificial Sequence
  SARS-CoV-2/China/WF0028/2020__EPI_ISL_413791 spike protein (1-1211)(K986P_V987P_ H1048Q_H1064N_ H1083N_H1101N) Ferritin construct
MFVFLVLLPLVSSQCVNLTTRTQLPPAYTNSFTRGVYYPDKVFRSSVLHSTQDLFLPFFSNVTWFHAIHVSGTNGTKRFDNPVLPFNDGVYFASTEKSNIIRGWIFGTTLDSKTQSLLIVNNATNVVIKVCEFQFCNDPFLGVYYHKNNKSWMESEFRVYSSANNCTFEYVSQPFLMDLEGKQGNFKNLREFVFKNIDGYFKIYSKHTPINLVRDLPQGFSALEPLVDLPIGINITRFQTLLALHRSYLTPGDSSSGWTAGAAAYYVGYLQPRTFLLKYNENGTITDAVDCALDPLSETKCTLKSFTVEKGIYQTSNFRVQPTESIVRFPNITNLCPFGEVFNATRFASVYAWNRKRISNCVADYSVLYNSASFSTFKCYGVSPTKLNDLCFTNVYADSFVIRGDEVRQIAPGQTGKIADYNYKLPDDFTGCVIAWNSNNLDSKVGGNYNYLYRLFRKSNLKPFERDISTEIYQAGSTPCNGVEGFNCYFPLQSYGFQPTNGVGYQPYRVVVLSFELLHAPATVCGPKKSTNLVKNKCVNFNFNGLTGTGVLTESNKKFLPFQQFGRDIADTTDAVRDPQTLEILDITPCSFGGVSVITPGTNTSNQVAVLYQDVNCTEVPVAIHADQLTPTWRVYSTGSNVFQTRAGCLIGAEHVNNSYECDIPIGAGICASYQTQTNSPRRARSVASQSIIAYTMSLGAENSVAYSNNSIAIPTNFTISVTTEILPVSMTKTSVDCTMYICGDSTECSNLLLQYGSFCTQLNRALTGIAVEQDKNTQEVFAQVKQIYKTPPIKDFGGFNFSQILPDPSKPSKRSFIEDLLFNKVTLADAGFIKQYGDCLGDIAARDLICAQKFNGLTVLPPLLTDEMIAQYTSALLAGTITSGWTFGAGAALQIPFAMQMAYRFNGIGVTQNVLYENQKLIANQFNSAIGKIQDSLSSTASALGKLQDVVNQNAQALNTLVKQLSSNFGAISSVLNDILSRLDPPEAEVQIDRLITGRLQSLQTYVTQQLIRAAEIRASANLAATKMSECVLGQSKRVDFCGKGYQLMSFPQSAPHGVVFLNVTYVPAQEKNFTTAPAICNDGKAHFPREGVFVSNGTNWFVTQRNFYEPQIITTDNTFVSGNCDVVIGIVNNTVYDPLQPELESFKEELDKYFKNHTSPDVDLGDISGINASVVNIQKEIDRLNEVAKNLNESLIDLQELGKYEQYIKGGGGSDIIKLLNEQVNKEMQSSNLYMSMSSWCYTHSLDGAGLFLFDHAAEEYEHAKKLIIFLNENNVPVQLTSISAPEHKFEGLTQIFQKAYEHEQHISESINNIVDHAIKSKDHATFNFLQWYVAEQHEEEVLFKDILDKIELIGNENHGLYLADQYVKGIAKSRKS

SEQ ID NO: 4935 - protein, 1379 aa, Artificial Sequence
  SARS-CoV-2/2019-nCoV/USA-CruiseA-18/2020__MT159716.1 spike protein (1-1211)(K986P_V987P_ H1048Q_H1064N_ H1083N_H1101N) Ferritin construct
MFVFLVLLPLVSSQCVNLTTRTQLPPAYTNSFTRGVYYPDKVFRSSVLHSTQDLFLPFFSNVTWFHAIHVSGTNGTKRFDNPVLPFNDGVYFASTEKSNIIRGWIFGTTLDSKTQSLLIVNNATNVVIKVCEFQFCNDPFLGVYYHKNNKSWMESELRVYSSANNCTFEYVSQPFLMDLEGKQGNFKNLREFVFKNIDGYFKIYSKHTPINLVRDLPQGFSALEPLVDLPIGINITRFQTLLALHRSYLTPGDSSSGWTAGAAAYYVGYLQPRTFLLKYNENGTITDAVDCALDPLSETKCTLKSFTVEKGIYQTSNFRVQPTESIVRFPNITNLCPFGEVFNATRFASVYAWNRKRISNCVADYSVLYNSASFSTFKCYGVSPTKLNDLCFTNVYADSFVIRGDEVRQIAPGQTGKIADYNYKLPDDFTGCVIAWNSNNLDSKVGGNYNYLYRLFRKSNLKPFERDISTEIYQAGSTPCNGVEGFNCYFPLQSYGFQPTNGVGYQPYRVVVLSFELLHAPATVCGPKKSTNLVKNKCVNFNFNGLTGTGVLTESNKKFLPFQQFGRDIADTTDAVRDPQTLEILDITPCSFGGVSVITPGTNTSNQVAVLYQDVNCTEVPVAIHADQLTPTWRVYSTGSNVFQTRAGCLIGAEHVNNSYECDIPIGAGICASYQTQTNSPRRARSVASQSIIAYTMSLGAENSVAYSNNSIAIPTNFTISVTTEILPVSMTKTSVDCTMYICGDSTECSNLLLQYGSFCTQLNRALTGIAVEQDKNTQEVFAQVKQIYKTPPIKDFGGFNFSQILPDPSKPSKRSFIEDLLFNKVTLADAGFIKQYGDCLGDIAARDLICAQKFNGLTVLPPLLTDEMIAQYTSALLAGTITSGWTFGAGAALQIPFAMQMAYRFNGIGVTQNVLYENQKLIANQFNSAIGKIQDSLSSTASALGKLQDVVNQNAQALNTLVKQLSSNFGAISSVLNDILSRLDPPEAEVQIDRLITGRLQSLQTYVTQQLIRAAEIRASANLAATKMSECVLGQSKRVDFCGKGYQLMSFPQSAPHGVVFLNVTYVPAQEKNFTTAPAICNDGKAHFPREGVFVSNGTNWFVTQRNFYEPQIITTDNTFVSGNCDVVIGIVNNTVYDPLQPELDSFKEELDKYFKNHTSPDVDLGDISGINASVVNIQKEIDRLNEVAKNLNESLIDLQELGKYEQYIKGGGGSDIIKLLNEQVNKEMQSSNLYMSMSSWCYTHSLDGAGLFLFDHAAEEYEHAKKLIIFLNENNVPVQLTSISAPEHKFEGLTQIFQKAYEHEQHISESINNIVDHAIKSKDHATFNFLQWYVAEQHEEEVLFKDILDKIELIGNENHGLYLADQYVKGIAKSRKS

SEQ ID NO: 4936 - protein, 1379 aa, Artificial Sequence
  SARS-CoV-2/SARS-CoV-2/Yunnan-01/human/2020/CHN__MT049951.1 spike protein (1-1211)(K986P_V987P_ H1048Q_H1064N_ H1083N_H1101N) Ferritin construct
MFVFLVLLPLVSSQCVNLTTRTQLPPANTNSFTRGVYYPDKVFRSSVLHSTQDLFLPFFSNVTWFHAIHVSGTNGTKRFDNPVLPFNDGVYFASTEKSNIIRGWIFGTTLDSKTQSLLIVNNATNVVIKVCEFQFCNDPFLGVYYHKNNKSWMESEFRVYSSANNCTFEYVSQPFLMDLEGKQGNFKNLREFVFKNIDGYFKIYSKHTPINLVRDLPQGFSALEPLVDLPIGINITRFQTLLALHRSYLTPGDSSSGWTAGAAAYYVGYLQPRTFLLKYNENGTITDAVDCALDPLSETKCTLKSFTVEKGIYQTSNFRVQPTESIVRFPNITNLCPFGEVFNATRFASVYAWNRKRISNCVADYSVLYNSASFSTFKCYGVSPTKLNDLCFTNVYADSFVIRGDEVRQIAPGQTGKIADYNYKLPDDFTGCVIAWNSNNLDSKVGGNYNYLYRLFRKSNLKPFERDISTEIYQAGSTPCNGVEGFNCYFPLQSYGFQPTNGVGYQPYRVVVLSFELLHAPATVCGPKKSTNLVKNKCVNFNFNGLTGTGVLTESNKKFLPFQQFGRDIADTTDAVRDPQTLEILDITPCSFGGVSVITPGTNTSNQVAVLYQDVNCTEVPVAIHADQLTPTWRVYSTGSNVFQTRAGCLIGAEHVNNSYECDIPIGAGICASYQTQTNSPRRARSVASQSIIAYTMSLGAENSVAYSNNSIAIPTNFTISVTTEILPVSMTKTSVDCTMYICGDSTECSNLLLQYGSFCTQLNRALTGIAVEQDKNTQEVFAQVKQIYKTPPIKDFGGFNFSQILPDPSKPSKRSFIEDLLFNKVTLADAGFIKQYGDCLGDIAARDLICAQKFNGLTVLPPLLTDEMIAQYTSALLAGTITSGWTFGAGAALQIPFAMQMAYRFNGIGVTQNVLYENQKLIANQFNSAIGKIQDSLSSTASALGKLQDVVNQNAQALNTLVKQLSSNFGAISSVLNDILSRLDPPEAEVQIDRLITGRLQSLQTYVTQQLIRAAEIRASANLAATKMSECVLGQSKRVDFCGKGYQLMSFPQSAPHGVVFLNVTYVPAQEKNFTTAPAICNDGKAHFPREGVFVSNGTNWFVTQRNFYEPQIITTDNTFVSGNCDVVIGIVNNTVYDPLQPELDSFKEELDKYFKNHTSPDVDLGDISGINASVVNIQKEIDRLNEVAKNLNESLIDLQELGKYEQYIKGGGGSDIIKLLNEQVNKEMQSSNLYMSMSSWCYTHSLDGAGLFLFDHAAEEYEHAKKLIIFLNENNVPVQLTSISAPEHKFEGLTQIFQKAYEHEQHISESINNIVDHAIKSKDHATFNFLQWYVAEQHEEEVLFKDILDKIELIGNENHGLYLADQYVKGIAKSRKS

SEQ ID NO: 4937 - protein, 1379 aa, Artificial Sequence
  SARS-CoV-2/USA/WA-UW292/2020__EPI_ISL_418077 spike protein (1-1211)(K986P_V987P_ H1048Q_H1064N_ H1083N_H1101N) Ferritin construct
MFVFLVLLPLVSSQCVNLTTRTQLPPAYTNSFTRGVYYPDKVFRSSVLHSTQDLFLPFFSNVTWFHAIHVSGTNGTKRFDNPVLPFNDGVYFASTEKSNIIRGWIFGTTLDSKTQSLLIVNNATNVVIKVCEFQFCNDPFLGVYYHKNNKSWMESEFRVYSSANNCTFEYVSQPFLMDLEGKQGNFKNLREFVFKNIDGYFKIYSKHTPINLVRDLPQGFSALEPLVDLPIGINITRFQTLLALHRSYLTPGDSSSGWTAGAAAYYVGYLQPRTFLLKYNENGTITDAVDCALDPLSETKCTLKSFTVEKGIYQTSNFRVQPTESIVRFPNITNLCPFGEVFNATRFASVYAWNRKRISNCVADYSVLYNSASFSTFKCYGVSPTKLNDLCFTNVYADSFVIRGDEVRQIAPGQTGKIADYNYKLPDDFTGCVIAWNSNNLDSKVGGNYNYLYRLFRKSNLKPFERDISTEIYQASSTPCNGVEGFNCYFPLQSYGFQPTNGVGYQPYRVVVLSFELLHAPATVCGPKKSTNLVKNKCVNFNFNGLTGTGVLTESNKKFLPFQQFGRDIADTTDAVRDPQTLEILDITPCSFGGVSVITPGTNTSNQVAVLYQDVNCTEVPVAIHADQLTPTWRVYSTGSNVFQTRAGCLIGAEHVNNSYECDIPIGAGICASYQTQTNSPRRARSVASQSIIAYTMSLGAENSVAYSNNSIAIPTNFTISVTTEILPVSMTKTSVDCTMYICGDSTECSNLLLQYGSFCTQLNRALTGIAVEQDKNTQEVFAQVKQIYKTPPIKDFGGFNFSQILPDPSKPSKRSFIEDLLFNKVTLADAGFIKQYGDCLGDIAARDLICAQKFNGLTVLPPLLTDEMIAQYTSALLAGTITSGWTFGAGAALQIPFAMQMAYRFNGIGVTQNVLYENQKLIANQFNSAIGKIQDSLSSTASALGKLQDVVNQNAQALNTLVKQLSSNFGAISSVLNDILSRLDPPEAEVQIDRLITGRLQSLQTYVTQQLIRAAEIRASANLAATKMSECVLGQSKRVDFCGKGYQLMSFPQSAPHGVVFLNVTYVPAQEKNFTTAPAICNDGKAHFPREGVFVSNGTNWFVTQRNFYEPQIITTDNTFVSGNCDVVIGIVNNTVYDPLQPELDSFKEELDKYFKNHTSPDVDLGDISGINASVVNIQKEIDRLNEVAKNLNESLIDLQELGKYEQYIKGGGGSDIIKLLNEQVNKEMQSSNLYMSMSSWCYTHSLDGAGLFLFDHAAEEYEHAKKLIIFLNENNVPVQLTSISAPEHKFEGLTQIFQKAYEHEQHISESINNIVDHAIKSKDHATFNFLQWYVAEQHEEEVLFKDILDKIELIGNENHGLYLADQYVKGIAKSRKS

SEQ ID NO: 4938 - protein, 1379 aa, Artificial Sequence
  SARS-CoV-2/Iceland/192/2020__EPI_ISL_417819 spike protein (1-1211)(K986P_V987P_ H1048Q_H1064N_ H1083N_H1101N) Ferritin construct
MFVFFVLLPLVSSQCVNLTTRTQLPPAYTNSFTRGVYYPDKVFRSSVLHSTQDLFLPFFSNVTWFHAIHVSGTNGTKRFDNPVLPFNDGVYFASTEKSNIIRGWIFGTTLDSKTQSLLIVNNATNVVIKVCEFQFCNDPFLGVYYHKNNKSWMESEFRVYSSANNCTFEYVSQPFLMDLEGKQGNFKNLREFVFKNIDGYFKIYSKHTPINLVRDLPQGFSALEPLVDLPIGINITRFQTLLALHRSYLTPGDSSSGWTAGAAAYYVGYLQPRTFLLKYNENGTITDAVDCALDPLSETKCTLKSFTVEKGIYQTSNFRVQPTESIVRFPNITNLCPFGEVFNATRFASVYAWNRKRISNCVADYSVLYNSASFSTFKCYGVSPTKLNDLCFTNVYADSFVIRGDEVRQIAPGQTGKIADYNYKLPDDFTGCVIAWNSNNLDSKVGGNYNYLYRLFRKSNLKPFERDISTEIYQAGSTPCNGVEGFNCYFPLQSYGFQPTNGVGYQPYRVVVLSFELLHAPATVCGPKKSTNLVKNKCVNFNFNGLTGTGVLTESNKKFLPFQQFGRDIADTTDAVRDPQTLEILDITPCSFGGVSVITPGTNTSNQVAVLYQGVNCTEVPVAIHADQLTPTWRVYSTGSNVFQTRAGCLIGAEHVNNSYECDIPIGAGICASYQTQTNSPRRARSVASQSIIAYTMSLGAENSVAYSNNSIAIPTNFTISVTTEILPVSMTKTSVDCTMYICGDSTECSNLLLQYGSFCTQLNRALTGIAVEQDKNTQEVFAQVKQIYKTPPIKDFGGFNFSQILPDPSKPSKRSFIEDLLFNKVTLADAGFIKQYGDCLGDIAARDLICAQKFNGLTVLPPLLTDEMIAQYTSALLAGTITSGWTFGAGAALQIPFAMQMAYRFNGIGVTQNVLYENQKLIANQFNSAIGKIQDSLSSTASALGKLQDVVNQNAQALNTLVKQLSSNFGAISSVLNDILSRLDPPEAEVQIDRLITGRLQSLQTYVTQQLIRAAEIRASANLAATKMSECVLGQSKRVDFCGKGYQLMSFPQSAPHGVVFLNVTYVPAQEKNFTTAPAICNDGKAHFPREGVFVSNGTNWFVTQRNFYEPQIITTDNTFVSGNCDVVIGIVNNTVYDPLQPELDSFKEELDKYFKNHTSPDVDLGDISGINASVVNIQKEIDRLNEVAKNLNESLIDLQELGKYEQYIKGGGGSDIIKLLNEQVNKEMQSSNLYMSMSSWCYTHSLDGAGLFLFDHAAEEYEHAKKLIIFLNENNVPVQLTSISAPEHKFEGLTQIFQKAYEHEQHISESINNIVDHAIKSKDHATFNFLQWYVAEQHEEEVLFKDILDKIELIGNENHGLYLADQYVKGIAKSRKS

SEQ ID NO: 4939 - protein, 1379 aa, Artificial Sequence
  SARS-CoV-2/Belgium/ULG-6939/2020__EPI_ISL_417020 spike protein (1-1211)(K986P_V987P_ H1048Q_H1064N_ H1083N_H1101N) Ferritin construct
MFVFLVLLPLVSSQCVNLTTRTQLPPAYTNSFTRGVYYPDKVFRSSVLHSTQDLFLPFFSNVTWFHAIHVSGTNGTKRFDNPVLPFNDGVYFASTEKSNIIRGWIFGTTLDSKTQSLLIVNNATNVVIKVCEFQFCNDPFLGVYYHKNNKSWMESEFRVYSSANNCTFEYVSQPFLMDLEGKQGNFKNLREFVFKNIDGYFKIYSKHTPINLVRDLPQGFSALEPLVDLPIGINITRFQTLLALHRSYLTPGDSSSGWTAGAAAYYVGYLQPRTFLLKYNENGTITDAVDCALDPLSETKCTLKSFTVEKGIYQTSNFRVQPTESIVRFPNITNLCPFGEVFNATRFASVYAWNRKRISNCVADYSVLYNSASFSTFKCYGVSPTKLNDLCFTNVYADSFVIRGDEVRQIAPGQTGKIADYNYKLPDDFTGCVIAWNSNNLDSKVGGNYNYLYRLFRKSNLKPFERDISTEIYQAGSTPCNGVEGFNCYFPLQSYGFQPTNGVGYQPYRVVVLSFELLHAPATVCGPKKSTNLVKNKCVNFNFNGLTGTGVLTESNKKFLPFQQFGRDIADTTDAVRDPQTLEILDITPCSFGGVSVITPGTNTSNQVAVLYQGVNCTEVPVAIHADQLTPTWRVYSTGSNVFQTRAGCLIGAEHVNNSYECDIPIGAGICASYQTQTNSPRRARSVASQSIIAYTMSLGAENSVVYSNNSIAIPTNFTISVTTEILPVSMTKTSVDCTMYICGDSTECSNLLLQYGSFCTQLNRALTGIAVEQDKNTQEVFAQVKQIYKTPPIKDFGGFNFSQILPDPSKPSKRSFIEDLLFNKVTLADAGFIKQYGDCLGDIAARDLICAQKFNGLTVLPPLLTDEMIAQYTSALLAGTITSGWTFGAGAALQIPFAMQMAYRFNGIGVTQNVLYENQKLIANQFNSAIGKIQDSLSSTASALGKLQDVVNQNAQALNTLVKQLSSNFGAISSVLNDILSRLDPPEAEVQIDRLITGRLQSLQTYVTQQLIRAAEIRASANLAATKMSECVLGQSKRVDFCGKGYQLMSFPQSAPHGVVFLNVTYVPAQEKNFTTAPAICNDGKAHFPREGVFVSNGTNWFVTQRNFYEPQIITTDNTFVSGNCDVVIGIVNNTVYDPLQPELDSFKEELDKYFKNHTSPDVDLGDISGINASVVNIQKEIDRLNEVAKNLNESLIDLQELGKYEQYIKGGGGSDIIKLLNEQVNKEMQSSNLYMSMSSWCYTHSLDGAGLFLFDHAAEEYEHAKKLIIFLNENNVPVQLTSISAPEHKFEGLTQIFQKAYEHEQHISESINNIVDHAIKSKDHATFNFLQWYVAEQHEEEVLFKDILDKIELIGNENHGLYLADQYVKGIAKSRKS

SEQ ID NO: 4940 - protein, 1379 aa, Artificial Sequence
  SARS-CoV-2/France/HF2496/2020__EPI_ISL_418231 spike protein (1-1211)(K986P_V987P_ H1048Q_H1064N_ H1083N_H1101N) Ferritin construct
MFVFLVLLPLVSSQCVNLTTRTQLPPAYTNSFTRGVYYPDKVFRSSVLHSTQDLFLPFFSNVTWFHAIHVSGTNGTKRFDNPVLPFNDGVYFASTEKSNIIRGWIFGTTLDSKTQSLLIVNNATNVVIKVCEFQFCNDPFLGVYYHKNNKSWMESEFRVYSSANNCTFEYVSQPFLMDLEGKQGNFKNLREFVFKNIDGYFKIYSKHTPINLVRDLPQGFSALEPLVDLPIGINITRFQTLLALHRSYLTPGDSSSGWTAGAAAYYVGYLQPRTFLLKYNENGTITDAVDCALDPLSETKCTLKSFTVEKGIYQTSNFRVQPTESIVRFPNITNLCPFGEVFNATRFASVYAWNRKRISNCVADYSVLYNSASFSTFKCYGVSPTKLNDLCFTNVYADSFVIRGDEVRQIAPGQTGKIADYNYKLPDDFTGCVIAWNSNNLDSKVGGNYNYLYRLFRKSNLKPFERDISTEIYQAGSTPCNGVEGFNCYFPLQSYGFQPTNGVGYQPYRVVVLSFELLHAPATVCGPKKSTNLVKNKCVNFNFNGLTGTGVLTESNKKFLPFQQFGRDIADTTDAVRDPQTLEILDITPCSFGGVSVITPGTNTSNQVAVLYQGVNCTEVPVAIHADQLTPTWRVYSTGSNVFQTRAGCLIGAEHVNNSYECDIPIGAGICASYQTQTNSPRRARSVASQSIIAYTMSLGAENSVAYSNNSIAIPTNFTISVTTEILPVSMTKTSVDCTMYICGDSTECSNLLLQYGSFCTQLNRALTGIAVEQDKNTQEVFAQVKQIYKTPPIKDFGGFNFSQILPDPSKPSKRSFIEDLLFNKVTLADAGFIKQYGDCLGDIVARDLICAQKFNGLTVLPPLLTDEMIAQYTSALLAGTITSGWTFGAGAALQIPFAMQMAYRFNGIGVTQNVLYENQKLIANQFNSAIGKIQDSLSSTASALGKLQDVVNQNAQALNTLVKQLSSNFGAISSVLNDILSRLDPPEAEVQIDRLITGRLQSLQTYVTQQLIRAAEIRASANLAATKMSECVLGQSKRVDFCGKGYQLMSFPQSAPHGVVFLNVTYVPAQEKNFTTAPAICNDGKAHFPREGVFVSNGTNWFVTQRNFYEPQIITTDNTFVSGNCDVVIGIVNNTVYDPLQPELDSFKEELDKYFKNHTSPDVDLGDISGINASVVNIQKEIDRLNEVAKNLNESLIDLQELGKYEQYIKGGGGSDIIKLLNEQVNKEMQSSNLYMSMSSWCYTHSLDGAGLFLFDHAAEEYEHAKKLIIFLNENNVPVQLTSISAPEHKFEGLTQIFQKAYEHEQHISESINNIVDHAIKSKDHATFNFLQWYVAEQHEEEVLFKDILDKIELIGNENHGLYLADQYVKGIAKSRKS

SEQ ID NO: 4941 - protein, 1379 aa, Artificial Sequence
  SARS-CoV-2/USA/WA-UW291/2020__EPI_ISL_418076 spike protein (1-1211)(K986P_V987P_ H1048Q_H1064N_ H1083N_H1101N) Ferritin construct
MFVFLVLLPLVSSQCVNLTTRTQLPPAYTNSFTRGVYYPDKVFRSSVLHSTQDLFLPFFSNVTWFHAIHVSGTNGTKRFDNPVLPFNDGVYFASTEKSNIIRGWIFGTTLDSKTQSLLIVNNATNVVIKVCEFQFCNDPFLGVYYHKNNKSWMESEFRVYSSANNCTFEYVSQPFLMDLEGKQGNFKNLREFVFKNIDGYFKIYSKHTPINLVRDLPQGFSALEPLVDLPIGINITRFQTLLALHRSYLTPGDSSSGWTAGAAAYYVGYLQPRTFLLKYNENGTITDAVDCALDPLSETKCTLKSFTVEKGIYQTSNFRVQPTESIVRFPNITNLCPFGEVFNATRFASVYAWNRKRISNCVADYSVLYNSASFSTFKCYGVSPTKLNDLCFTNVYADSFVIRGDEVRQIAPGQTGKIADYNYKLPDDFTGCVIAWNSNNLDSKVGGNYNYLYRLFRKSNLKPFERDISTEIYQAGSTPCNGVEGFNCYFPLQSYGFQPTNGVGYQPYRVVVLSFELLHAPATVCGPKKSTNLVKNKCVNFNFNGLTGTGVLTESNKKFLPFQQFGRDIADTTDAVRDPQTLEILDITPCSFGGVSVITPGTNTSNQVAVLYQGVNCTEVPVAIHADQLTPTWRVYSTGSNVFQTRAGCLIGAEHVNNSYECDIPIGAGICASYQTQTNSPRRARSVASQSIIAYTMSLGAENSVAYSNNSIAIPTNFTISVTTEILPVSMTKTSVDCTMYICGDSTECSNLLLQYGSFCTQLNRALTGIAVEQDKNTQEVFAQVKQIYKTPPIKDFGGFNFSQILPDPSKPSKRSFIEDLLFNKVTLADAGFIKQYGDCLGDIAARDLICAQKFNGLTVLPPLLTDEMIAQYTSALLAGTITSGWTFGAGAALQIPFAMQMAYRFNGIGVTQNVLYENQKLIANQFNSAIGKIQYSLSSTASALGKLQDVVNQNAQALNTLVKQLSSNFGAISSVLNDILSRLDPPEAEVQIDRLITGRLQSLQTYVTQQLIRAAEIRASANLAATKMSECVLGQSKRVDFCGKGYQLMSFPQSAPHGVVFLNVTYVPAQEKNFTTAPAICNDGKAHFPREGVFVSNGTNWFVTQRNFYEPQIITTDNTFVSGNCDVVIGIVNNTVYDPLQPELDSFKEELDKYFKNHTSPDVDLGDISGINASVVNIQKEIDRLNEVAKNLNESLIDLQELGKYEQYIKGGGGSDIIKLLNEQVNKEMQSSNLYMSMSSWCYTHSLDGAGLFLFDHAAEEYEHAKKLIIFLNENNVPVQLTSISAPEHKFEGLTQIFQKAYEHEQHISESINNIVDHAIKSKDHATFNFLQWYVAEQHEEEVLFKDILDKIELIGNENHGLYLADQYVKGIAKSRKS

SEQ ID NO: 4942 - protein, 1379 aa, Artificial Sequence; identical to SEQ ID NO: 4905
  SARS-CoV-2/Portugal/PT0034/2020__EPI_ISL_418019 spike protein (1-1211)(K986P_V987P_ H1048Q_H1064N_ H1083N_H1101N) Ferritin construct

SEQ ID NO: 4943 - protein, 1379 aa, Artificial Sequence
  SARS-CoV-2/Iceland/202/2020__EPI_ISL_417750 spike protein (1-1211)(K986P_V987P_ H1048Q_H1064N_ H1083N_H1101N) Ferritin construct
MFVFLVLLPLVSSQCVNLTTRTQLPPAYTNSFTRGVYYPDKVFRSSVLHSTQDLFLPFFSNVTWFHAIHVSGTNGTKRFDNPVLPFNDGVYFASTEKSNIIRGWIFGTTLDSKTQSLLIVNNATNVVIKVCEFQFCNDPFLGVYYHKNNKSWMESEFRVYSSANNCTFEYVSQPFLMDLEGKQGNFKNLREFVFKNIDGYFKIYSKHTPINLVRDLPQGFSALEPLVDLPIGINITRFQTLLALHRSYLTPGDSSSGWTAGAAAYYVGYLQPRTFLLKYNENGTITDAVDCALDPLSETKCTLKSFTVEKGIYQTSNFRVQPTESIVRFPNITNLCPFGEVFNATRFASVYAWNRKRISNCVADYSVLYNSASFSTFKCYGVSPTKLNDLCFTNVYADSFVIRGDEVRQIAPGQTGKIADYNYKLPDDFTGCVIAWNSNNLDSKVGGNYNYLYRLFRKSNLKPFERDISTEIYQAGSTPCNGVEGFNCYFPLQSYGFQPTNGVGYQPYRVVVLSFELLHAPATVCGPKKSTNLVKNKCVNFNFNGLTGTGVLTESNKKFLPFQQFGRDIADTTDAVRDPQTLEILDITPCSFGGVSVITPGTNTSNQVAVLYQDVNCTEVPVAIHADQLTPTWRVYSTGSNVFQTRAGCLIGAEHVNNSYECDIPIGAGICASYQTQTNSPRRARSVASQSIIAYTMSLGAENSVAYSNNSIAIPTNFTISVTTEILPVSMTKTSVDCTMYICGDSTECSNLLLQYGSFCTQLNRALTGIAVEQDKNTQEVFAQVKQIYKTPPIKDFGGFNFSQILPDPSKPSKRSFIEDLLFNKVTLADAGFIKQYGDCLGDIAARDLICAQKFNGLTVLPPLLTDEMIAQYTSALLAGTITSGWTFGAGAALQIPFAMQMAYRFNGIGVTQNVLYENQKLIANQFNSAIGKIQDSLSSTASALGKLQDVVNQNAQALNTLVKQLSSNFGAISSVLNDILSRLDPPEAEVQIDRLITGRLQSLQTYVTQQLIRAAEIRASANLAATKMSECVLGQSKRVDFCGKGYQLMSFPQSAPHGVVFLNVTYVPAQEKNFTTAPAICNDGKAHFPREGVFVSNGTNWFVTQRNFYEPQIITTDNTFVSGNCDVVIGIVNNTVYDPLQPELDSFKEELDKYFKNHTSPDVDLGDIPGINASVVNIQKEIDRLNEVAKNLNESLIDLQELGKYEQYIKGGGGSDIIKLLNEQVNKEMQSSNLYMSMSSWCYTHSLDGAGLFLFDHAAEEYEHAKKLIIFLNENNVPVQLTSISAPEHKFEGLTQIFQKAYEHEQHISESINNIVDHAIKSKDHATFNFLQWYVAEQHEEEVLFKDILDKIELIGNENHGLYLADQYVKGIAKSRKS

SEQ ID NO: 4944 - protein, 1379 aa, Artificial Sequence
  SARS-CoV-2/USA/WA-UW261/2020__EPI_ISL_418046 spike protein (1-1211)(K986P_V987P_ H1048Q_H1064N_ H1083N_H1101N) Ferritin construct
MFVFLVLLPLVSSQCVNLTTRTQLPPAYTNSFTRGVYYPDKVFRSSVLHSTQDLFLPFFSNVTWFHAIHVSGTNGTKRFDNPVLPFNDGVYFASTEKSNIIRGWIFGTTLDSKTQSLLIVNNATNVVIKVCEFQFCNDPFLGVYYHKNNKSWMESEFRVYSSANNCTFEYVSQPFLMDLEGKQGNFKNLREFVFKNIDGYFKIYSKHTPINLVRDLPQGFSALEPLVDLPIGINITRFQTLLALHRSYLTPGDSSSGWTAGAAAYYVGYLQPRTFLLKYNENGTITDAVDCALDPLSETKCTLKSFTVEKGIYQTSNFRVQPTESIVRFPNITNLCPFGEVFNATRFTSVYAWNRKRISNCVADYSVLYNSASFSTFKCYGVSPTKLNDLCFTNVYADSFVIRGDEVRQIAPGQTGKIADYNYKLPDDFTGCVIAWNSNNLDSKVGGNYNYLYRLFRKSNLKPFERDISTEIYQAGSTPCNGVEGFNCYFPLQSYGFQPTNGVGYQPYRVVVLSFELLHAPATVCGPKKSTNLVKNKCVNFNFNGLTGTGVLTESNKKFLPFQQFGRDIADTTDAVRDPQTLEILDITPCSFGGVSVITPGTNTSNQVAVLYQDVNCTEVPVAIHADQLTPTWRVYSTGSNVFQTRAGCLIGAEHVNNSYECDIPIGAGICASYQTQTNSPRRARSVASQSIIAYTMSLGAENSVAYSNNSIAIPTNFTISVTTEILPVSMTKTSVDCTMYICGDSTECSNLLLQYGSFCTQLNRALTGIAVEQDKNTQEVFAQVKQIYKTPPIKDFGGFNFSQILPDPSKPSKRSFIEDLLFNKVTLADAGFIKQYGDCLGDIAARDLICAQKFNGLTVLPPLLTDEMIAQYTSALLAGTITSGWTFGAGAALQIPFAMQMAYRFNGIGVTQNVLYENQKLIANQFNSAIGKIQDSLSSTASALGKLQDVVNQNAQALNTLVKQLSSNFGAISSVLNDILSRLDPPEAEVQIDRLITGRLQSLQTYVTQQLIRAAEIRASANLAATKMSECVLGQSKRVDFCGKGYQLMSFPQSAPHGVVFLNVTYVPAQEKNFTTAPAICNDGKAHFPREGVFVSNGTNWFVTQRNFYEPQIITTDNTFVSGNCDVVIGIVNNTVYDPLQPELDSFKEELDKYFKNHTSPDVDLGDISGINASVVNIQKEIDRLNEVAKNLNESLIDLQELGKYEQYIKGGGGSDIIKLLNEQVNKEMQSSNLYMSMSSWCYTHSLDGAGLFLFDHAAEEYEHAKKLIIFLNENNVPVQLTSISAPEHKFEGLTQIFQKAYEHEQHISESINNIVDHAIKSKDHATFNFLQWYVAEQHEEEVLFKDILDKIELIGNENHGLYLADQYVKGIAKSRKS

SEQ ID NO: 4945 - protein, 1379 aa, Artificial Sequence
  SARS-CoV-2/Portugal/PT0035/2020__EPI_ISL_418020 spike protein (1-1211)(K986P_V987P_ H1048Q_H1064N_ H1083N_H1101N) Ferritin construct
MFVFLVLLPLVSSQCVNLTTRTQLPPAYTNSFTRGVYYPDKVFRSSVLHSTQDLFLPFFSNVTWFHAIHVSGTNGTKRFDNPVLPFNDGVYFASTEKSNIIRGWIFGTTLDSKTQSLLIVNNATNVVIKVCEFQFCNDPFLGVYYHKNNKSWMESEFRVYSSANNCTFEYVSQPFLMDLEGKQGNFKNLREFVFKNIDGYFKIYSKHTPINLVRDLPQGFSALEPLVDLPIGINITRFQTLLALHRSYLTPGDSSSGWTAGAAAYYVGYLQPRTFLLKYNENGTITDAVDCALDPLSETKCTLKSFTVEKGIYQTSNFRVQPTESIVRFPNITNLCPFGEVFNATRFASVYAWNRKRISNCVADYSVLYNSASFSTFKCYGVSPTKLNDLCFTNVYADSFVIRGDEVRQIAPGQTGKIADYNYKLPDDFTGCVIAWNSNNLDSKVGGNYNYLYRLFRKSNLKPFERDISTEIYQAGSTPCNGVEGFNCYFPLQSYGFQPTNGVGYQPYRVVVLSFELLHAPATVCGPKKSTNLVKNKCVNFNFNGLTGTGVLTESNKKFLPFQQFGRDIADTTDAVRDPQTLEILDITPCSFGGVSVITPGTNTSNQVAVLYQDVNCTEVPVAIHADQLTPTWRVYSTGSNVFQTRAGCLIGAEHVNNSYECDIPIGAGICASYQTQTNSPRRARSVASQSIIAYTMSLGAENSVAYSNNSIAIPTNFTISVTTEILPVSMTKTSVDCTMYICGDSTECSNLLLQYGSFCTQLNRALTGIAVEQDKNTQEVFAQVKQIYKTPPIKDFGGFNFSQILPDPSKPSKRSFIEDLLFNKVTLADAGFIKQYGDCLGDISARDLICAQKFNGLTVLPPLLTDEMIAQYTSALLAGTITSGWTFGAGAALQIPFAMQMAYRFNGIGVTQNVLYENQKLIANQFNSAIGKIQDSLSSTASALGKLQDVVNQNAQALNTLVKQLSSNFGAISSVLNDILSRLDPPEAEVQIDRLITGRLQSLQTYVTQQLIRAAEIRASANLAATKMSECVLGQSKRVDFCGKGYQLMSFPQSAPHGVVFLNVTYVPAQEKNFTTAPAICNDGKAHFPREGVFVSNGTNWFVTQRNFYEPQIITTDNTFVSGNCDVVIGIVNNTVYDPLQPELDSFKEELDKYFKNHTSPDVDLGDISGINASVVNIQKEIDRLNEVAKNLNESLIDLQELGKYEQYIKGGGGSDIIKLLNEQVNKEMQSSNLYMSMSSWCYTHSLDGAGLFLFDHAAEEYEHAKKLIIFLNENNVPVQLTSISAPEHKFEGLTQIFQKAYEHEQHISESINNIVDHAIKSKDHATFNFLQWYVAEQHEEEVLFKDILDKIELIGNENHGLYLADQYVKGIAKSRKS

SEQ ID NO: 4946 - protein, 1379 aa, Artificial Sequence
  SARS-CoV-2/USA/NY-NYUMC7/2020__EPI_ISL_418192 spike protein (1-1211)(K986P_V987P_ H1048Q_H1064N_ H1083N_H1101N) Ferritin construct
MFVFLVLLPLVSSQCVNLTTRTQLPPAYTNSFTRGVYYPDKVFRSSVLHSTQDLFLPFFSNVTWFHAIHVSGTNGTKRFDNPVLPFNDGVYFASTEKSNIIRGWIFGTTLDSKTQSLLIVNNATNVVIKVCEFQFCNDPFLGVYHHKNNKSWMESEFRVYSSANNCTFEYVSQPFLMDLEGKQGNFKNLREFVFKNIDGYFKIYSKHTPINLVRDLPQGFSALEPLVDLPIGINITRFQTLLALHRSYLTPGDSSSGWTAGAAAYYVGYLQPRTFLLKYNENGTITDAVDCALDPLSETKCTLKSFTVEKGIYQTSNFRVQPTESIVRFPNITNLCPFGEVFNATRFASVYAWNRKRISNCVADYSVLYNSASFSTFKCYGVSPTKLNDLCFTNVYADSFVIRGDEVRQIAPGQTGKIADYNYKLPDDFTGCVIAWNSNNLDSKVGGNYNYLYRLFRKSNLKPFERDISTEIYQAGSTPCNGVEGFNCYFPLQSYGFQPTNGVGYQPYRVVVLSFELLHAPATVCGPKKSTNLVKNKCVNFNFNGLTGTGVLTESNKKFLPFQQFGRDIADTTDAVRDPQTLEILDITPCSFGGVSVITPGTNTSNQVAVLYQGVNCTEVPVAIHADQLTPTWRVYSTGSNVFQTRAGCLIGAEHVNNSYECDIPIGAGICASYQTQTNSPRRARSVASQSIIAYTMSLGAENSVAYSNNSIAIPTNFTISVTTEILPVSMTKTSVDCTMYICGDSTECSNLLLQYGSFCTQLNRALTGIAVEQDKNTQEVFAQVKQIYKTPPIKDFGGFNFSQILPDPSKPSKRSFIEDLLFNKVTLADAGFIKQYGDCLGDIAARDLICAQKFNGLTVLPPLLTDEMIAQYTSALLAGTITSGWTFGAGAALQIPFAMQMAYRFNGIGVTQNVLYENQKLIANQFNSAIGKIQDSLSSTASALGKLQDVVNQNAQALNTLVKQLSSNFGAISSVLNDILSRLDPPEAEVQIDRLITGRLQSLQTYVTQQLIRAAEIRASANLAATKMSECVLGQSKRVDFCGKGYQLMSFPQSAPHGVVFLNVTYVPAQEKNFTTAPAICNDGKAHFPREGVFVSNGTNWFVTQRNFYEPQIITTDNTFVSGNCDVVIGIVNNTVYDPLQPELDSFKEELDKYFKNHTSPDVDLGDISGINASVVNIQKEIDRLNEVAKNLNESLIDLQELGKYEQYIKGGGGSDIIKLLNEQVNKEMQSSNLYMSMSSWCYTHSLDGAGLFLFDHAAEEYEHAKKLIIFLNENNVPVQLTSISAPEHKFEGLTQIFQKAYEHEQHISESINNIVDHAIKSKDHATFNFLQWYVAEQHEEEVLFKDILDKIELIGNENHGLYLADQYVKGIAKSRKS

SEQ ID NO: 4947 - protein, 1379 aa, Artificial Sequence
  SARS-CoV-2/Iceland/189/2020__EPI_ISL_417709 spike protein (1-1211)(K986P_V987P_ H1048Q_H1064N_ H1083N_H1101N) Ferritin construct
MFVFLVLLPLVSSQCVNLTTRTQLPPAYTNSFTRGVYYPDKVFRSSVLHSTQDLFLPFFSNVTWFHAIHVSGTNGTKRFDNPVLPFNDGVYFASTEKSNIIRGWIFGTTLDSKTQSLLIVNNATNVVIKVCEFQFCNDPFLGVYYHKNNKSWMESEFRVYSSANNCTFEYVSQPFLMDLEGKQGNFKNLREFVFKNIDGYFKIYSKHTPINLVRDLPQGFSALEPLVDLPIGINITRFQTLLALHRSYLTPGDSSSGWTAGAAAYYVGYLQPRTFLLKYNENGTITDAVDCALDPLSETKCTLKSFTVEKGIYQTSNFRVQPTESIVRFPNITNLCPFGEVFNATRFASVYAWNRKRISNCVADYSVLYNSASFSTFKCYGVSPTKLNDLCFTNVYADSFVIRGDEVRQIAPGQTGKIADYNYKLPDDFTGCVIAWNSNNLDSKVGGNYNYLYRLFRKSNLKPFERDISTEIYQAGSTPCNGVEGFNCYFPLQSYGFQPTNGVGYQPYRVVVLSFELLHAPATVCGPKKSTNLVKNKCVNFNFNGLTGTGVLTESNKKFLPFQQFGRDIADTTDAVRDPQTLEILDITPCSFGGVSVITPGTNTSNQVAVLYQGVNCTEVPVAIHADQLTPTWRVYSTGSNVFQTRAGCLIGAEHVNNSYECDIPIGAGICASYQTQTNSPRRARSVASQSIIAYTMSLGAENSVAYSNNSIAIPTNFTISVTTEILPVSMTKTSVDCTMYICGDSTECSNLLLQYGSFCTQLNRALTGIAVEQDKNTQEVFAQVKQIYKTPPIKDFGGFNFSQILPDPSKPSKRSFIEDLLFNKVTLADAGFTKQYGDCLGDIAARDLICAQKFNGLTVLPPLLTDEMIAQYTSALLAGTITSGWTFGAGAALQIPFAMQMAYRFNGIGVTQNVLYENQKLIANQFNSAIGKIQDSLSSTASALGKLQDVVNQNAQALNTLVKQLSSNFGAISSVLNDILSRLDPPEAEVQIDRLITGRLQSLQTYVTQQLIRAAEIRASANLAATKMSECVLGQSKRVDFCGKGYQLMSFPQSAPHGVVFLNVTYVPAQEKNFTTAPAICNDGKAHFPREGVFVSNGTNWFVTQRNFYEPQIITTDNTFVSGNCDVVIGIVNNTVYDPLQPELDSFKEELDKYFKNHTSPDVDLGDISGINASVVNIQKEIDRLNEVAKNLNESLIDLQELGKYEQYIKGGGGSDIIKLLNEQVNKEMQSSNLYMSMSSWCYTHSLDGAGLFLFDHAAEEYEHAKKLIIFLNENNVPVQLTSISAPEHKFEGLTQIFQKAYEHEQHISESINNIVDHAIKSKDHATFNFLQWYVAEQHEEEVLFKDILDKIELIGNENHGLYLADQYVKGIAKSRKS

SEQ ID NO: 4948 - protein, 1379 aa, Artificial Sequence
  SARS-CoV-2/Australia/NSW56/2020__EPI_ISL_417408 spike protein (1-1211)(K986P_V987P_ H1048Q_H1064N_ H1083N_H1101N) Ferritin construct
MFVFLVLLPLVSSQCVNLTTRTQLPPAYTNSFTRGVYYPDKVFRSSVLHSTQDLFLPFFSNVTWFHAIHVSGTNGTKRFDNPVLPFNDGVYFASTEKSNIIRGWIFGTTLDSKTQSLLIVNNATNVVIKVCEFQFCNDPFLGVYYHKNNKSWMESEFRVYSSANNCTFEYVSQPFLMDLEGKQGNFKNLREFVFKNIDGYFKIYSKHTPINLVRDLPQGFSALEPLVDLPIGINITRFQTLLALHRSYLTPGDSSSGWTAGAAAYYVGYLQPRTFLLKYNENGTITDAVDCALDPLSETKCTLKSFTVEKGIYQTSNFRVQPTESIVRFPNITNLCPFGEVFNATRFASVYAWNRKRISNCVADYSVLYNSASFSTFKCYGVSPTKLNDLCFTNVYADSFVIRGDEVRQIAPGQTGKIADYNYKLPDDFTGCVIAWNSNNLDSKVGGNYNYLYRLFRKSNLKPFERDISTEIYQAGSTPCNGVEGFNCYFPLQSYGFQPTNGVGYQPYRVVVLSFELLHAPATVCGPKKSTNLVKNKCVNFNFNGLTGTGVLTESNKKFLPFQQFGRDIADTTDAVRDPQTLEILDITPCSFGGVSVITPGTNTSNQVAVLYQDVNCTEVPVAIHADQLTPTWRVYSTGSNVFQTRAGCLIGAEHVNNSYECDIPIGAGICASYQTQTNSPRRARSVASQSIIAYTMSLGAENSVAYSNNSIAIPTNFTISVTTEILPVSMTKTSVDCTMYICGDSTECSNLLLQYGSFCTQLNRALTGIAVEQDKNTQEVFAQVKQIYKTPPIKDFGGFNFSQILPDSSKPSKRSFIEDLLFNKVTLADAGFIKQYGDCLGDIAARDLICAQKFNGLTVLPPLLTDEMIAQYTSALLAGTITSGWTFGAGAALQIPFAMQMAYRFNGIGVTQNVLYENQKLIANQFNSAIGKIQDSLSSTASALGKLQDVVNQNAQALNTLVKQLSSNFGAISSVLNDILSRLDPPEAEVQIDRLITGRLQSLQTYVTQQLIRAAEIRASANLAATKMSECVLGQSKRVDFCGKGYQLMSFPQSAPHGVVFLNVTYVPAQEKNFTTAPAICNDGKAHFPREGVFVSNGTNWFVTQRNFYEPQIITTDNTFVSGNCDVVIGIVNNTVYDPLQPELDSFKEELDKYFKNHTSPDVDLGDISGINASVVNIQKEIDRLNEVAKNLNESLIDLQELGKYEQYIKGGGGSDIIKLLNEQVNKEMQSSNLYMSMSSWCYTHSLDGAGLFLFDHAAEEYEHAKKLIIFLNENNVPVQLTSISAPEHKFEGLTQIFQKAYEHEQHISESINNIVDHAIKSKDHATFNFLQWYVAEQHEEEVLFKDILDKIELIGNENHGLYLADQYVKGIAKSRKS

SEQ ID NO: 4949 - protein, 1379 aa, Artificial Sequence
  SARS-CoV-2/Iceland/280/2020__EPI_ISL_417608 spike protein (1-1211)(K986P_V987P_ H1048Q_H1064N_ H1083N_H1101N) Ferritin construct
MFVFLVLLPLVSSQCVNLTTRTQLPPAYTNSFTRGVYYPDKVFRSSVLHSTQDLFLPFFSNVTWFHAIHVSGTNGTKRFDNPVLPFNDGVYFASTEKSNIIRGWIFGTTLDSKTQSLLIVNNATNVVIKVCEFQFCNDPFLGVYYHKNNKSWMESEFRVYSSANNCTFEYVSQPFLMDLEGKQGNFKNLREFVFKNIDGYFKIYSKHTPINLVRDLPQGFSALEPLVDLPIGINITRFQTLLALHRSYLTPGDSSSGWTAGAAAYYVGYLQPRTFLLKYNENGTITDAVDCALDPLSETKCTLKSFTVEKGIYQTSNFRVQPTESIVRFPNITNLCPFGEVFNATRFASVYAWNRKRISNCVADYSVLYNSASFSTFKCYGVSPTKLNDLCFTNVYADSFVIRGDEVRQIAPGQTGKIADYNYKLPDDFTGCVIAWNSNNLDSKVGGNYNYLYRLFRKSNLKPFERDISTEIYQAGSTPCNGVEGFNCYFPLQSYGFQPTNGVGYQPYRVVVLSFELLHAPATVCGPKKSTNLVKNKCVNFNFNGLTGTGVLTESNKKFLPFQQFGRDIADTTDAVRDPQTLEILDITPCSFGGVSVITPGTNTSNQVAVLYQGVNCTEVPVAIHADQLTPTWRVYSTGSNVFQTRAGCLIGAEHVNNSYECDIPIGAGICASYHTQTNSPRRARSVASQSIIAYTMSLGAENSVAYSNNSIAIPTNFTISVTTEILPVSMTKTSVDCTMYICGDSTECSNLLLQYGSFCTQLNRALTGIAVEQDKNTQEVFAQVKQIYKTPPIKDFGGFNFSQILPDPSKPSKRSFIEDLLFNKVTLADAGFIKQYGDCLGDIAARDLICAQKFNGLTVLPPLLTDEMIAQYTSALLAGTITSGWTFGAGAALQIPFAMQMAYRFNGIGVTQNVLYENQKLIANQFNSAIGKIQDSLSSTASALGKLQDVVNQNAQALNTLVKQLSSNFGAISSVLNDILSRLDPPEAEVQIDRLITGRLQSLQTYVTQQLIRAAEIRASANLAATKMSECVLGQSKRVDFCGKGYQLMSFPQSAPHGVVFLNVTYVPAQEKNFTTAPAICNDGKAHFPREGVFVSNGTNWFVTQRNFYEPQIITTDNTFVSGNCDVVIGIVNNTVYDPLQPELDSFKEELDKYFKNHTSPDVDLGDISGINASVVNIQKEIDRLNEVAKNLNESLIDLQELGKYEQYIKGGGGSDIIKLLNEQVNKEMQSSNLYMSMSSWCYTHSLDGAGLFLFDHAAEEYEHAKKLIIFLNENNVPVQLTSISAPEHKFEGLTQIFQKAYEHEQHISESINNIVDHAIKSKDHATFNFLQWYVAEQHEEEVLFKDILDKIELIGNENHGLYLADQYVKGIAKSRKS

SEQ ID NO: 4950 - protein, 1379 aa, Artificial Sequence; identical to SEQ ID NO: 4905
  SARS-CoV-2/Iceland/247/2020__EPI_ISL_417575 spike protein (1-1211)(K986P_V987P_ H1048Q_H1064N_ H1083N_H1101N) Ferritin construct

SEQ ID NO: 4951 - protein, 1379 aa, Artificial Sequence
  SARS-CoV-2/Iceland/238/2020__EPI_ISL_417566 spike protein (1-1211)(K986P_V987P_ H1048Q_H1064N_ H1083N_H1101N) Ferritin construct
MFVFLVLLPLVSSQCVNLTTRTQLPPAYTNSFTRGVYYPDKVFRSSVLHSTQDLFLPFFSNVTWFHAIHVSGTNGTKRFDNPVLPFNDGVYFASTEKSNIIRGWIFGTTLDSKTQSLLIVNNATNVVIKVCEFQFCNDPFLGVYYHKNNKSWMESEFRVYSSANNCTFEYVSQPFLMDLEGKQGNFKNLREFVFKNIDGYFKIYSKHTPINLVRDLPQGFSALEPLVDLPIGINITRFQTLLALHRSYLTPGDSSSGWTAGAAAYYVGYLQPRTFLLKYNENGTITDAVDCALDPLSETKCTLKSFTVEKGIYQTSNFRVQPTESIVRFPNITNLCPFGEVFNATRFASVYAWNRKRISNCVADYSVLYNSASFSTFKCYGVSPTKLNDLCFTNVYADSFVIRGDEVRQIAPGQTGKIADYNYKLPDDFTGCVIAWNSNNLDSKVGGNYNYLYRLFRKSNLKPFERDISTEIYQAGSTPCNGVEGFNCYFPLQSYGFQPTNGVGYQPYRVVVLSFELLHAPATVCGPKKSTNLVKNKCVNFNFNGLTGTGVLTESNKKFLPFQQFGRDIADTTDAVRDPQTLEILDITPCSFGGVSVITPGTNTSNQVAVLYQGVNCTEVPVAIHADQLTPTWRVYSTGSNVFQTRAGCLIGAEHVNNSYECDIPIGAGICASYQTQTNSPRRARSVASQSIIAYTMSLGAENSVAYSNNSIAIPTNFTISVTTEILPVSMTKTSVDCTMYICGDSTECSNLLLQYGSFCTQLNRALTGIAVEQDKNTQEVFAQVKQIYKTPPIKDFGGFNFSQILPDPSKPSKRSFIEDLLFNKVTLADVGFIKQYGDCLGDIAARDLICAQKFNGLTVLPPLLTDEMIAQYTSALLAGTITSGWTFGAGAALQIPFAMQMAYRFNGIGVTQNVLYENQKLIANQFNSAIGKIQDSLSSTASALGKLQDVVNQNAQALNTLVKQLSSNFGAISSVLNDILSRLDPPEAEVQIDRLITGRLQSLQTYVTQQLIRAAEIRASANLAATKMSECVLGQSKRVDFCGKGYQLMSFPQSAPHGVVFLNVTYVPAQEKNFTTAPAICNDGKAHFPREGVFVSNGTNWFVTQRNFYEPQIITTDNTFVSGNCDVVIGIVNNTVYDPLQPELDSFKEELDKYFKNHTSPDVDLGDISGINASVVNIQKEIDRLNEVAKNLNESLIDLQELGKYEQYIKGGGGSDIIKLLNEQVNKEMQSSNLYMSMSSWCYTHSLDGAGLFLFDHAAEEYEHAKKLIIFLNENNVPVQLTSISAPEHKFEGLTQIFQKAYEHEQHISESINNIVDHAIKSKDHATFNFLQWYVAEQHEEEVLFKDILDKIELIGNENHGLYLADQYVKGIAKSRKS

SEQ ID NO: 4952 - protein, 1379 aa, Artificial Sequence
  SARS-CoV-2/Greece/16/2020__EPI_ISL_418265 spike protein (1-1211)(K986P_V987P_ H1048Q_H1064N_ H1083N_H1101N) Ferritin construct
MFVFLVLLPLVSSQCVNLTTRTQLPPAYTNSFTRGVYYPDKVFRSSVLHSTQDLFLPFFSNVTWFHAIHVSGTNGTKRFDNPVLPFNDGVYFASTEKSNIIRGWIFGTTLDSKTQSLLIVNNATNVVIKVCEFQFCNDPFLGVYYHKNNKSWMESEFRVYSSANNCTFEYVSQPFLMDLEGKQGNFKNLREFVFKNVDGYFKIYSKHTPINLVRDLPQGFSALEPLVDLPIGINITRFQTLLALHRSYLTPGDSSSGWTAGAAAYYVGYLQPRTFLLKYNENGTITDAVDCALDPLSETKCTLKSFTVEKGIYQTSNFRVQPTESIVRFPNITNLCPFGEVFNATRFASVYAWNRKRISNCVADYSVLYNSASFSTFKCYGVSPTKLNDLCFTNVYADSFVIRGDEVRQIAPGQTGKIADYNYKLPDDFTGCVIAWNSNNLDSKVGGNYNYLYRLFRKSNLKPFERDISTEIYQAGSTPCNGVEGFNCYFPLQSYGFQPTNGVGYQPYRVVVLSFELLHAPATVCGPKKSTNLVKNKCVNFNFNGLTGTGVLTESNKKFLPFQQFGRDIADTTDAVRDPQTLEILDITPCSFGGVSVITPGTNTSNQVAVLYQDVNCTEVPVAIHADQLTPTWRVYSTGSNVFQTRAGCLIGAEHVNNSYECDIPIGAGICASYQTQTNSPRRARSVASQSIIAYTMSLGAENSVAYSNNSIAIPTNFTISVTTEILPVSMTKTSVDCTMYICGDSTECSNLLLQYGSFCTQLNRALTGIAVEQDKNTQEVFAQVKQIYKTPPIKDFGGFNFSQILPDPSKPSKRSFIEDLLFNKVTLADAGFIKQYGDCLGDIAARDLICAQKFNGLTVLPPLLTDEMIAQYTSALLAGTITSGWTFGAGAALQIPFAMQMAYRFNGIGVTQNVLYENQKLIANQFNSAIGKIQDSLSSTASALGKLQDVVNQNAQALNTLVKQLSSNFGAISSVLNDILSRLDPPEAEVQIDRLITGRLQSLQTYVTQQLIRAAEIRASANLAATKMSECVLGQSKRVDFCGKGYQLMSFPQSAPHGVVFLNVTYVPAQEKNFTTAPAICNDGKAHFPREGVFVSNGTNWFVTQRNFYEPQIITTDNTFVSGNCDVVIGIVNNTVYDPLQPELDSFKEELDKYFKNHTSPDVDLGDISGINASVVNIQKEIDRLNEVAKNLNESLIDLQELGKYEQYIKGGGGSDIIKLLNEQVNKEMQSSNLYMSMSSWCYTHSLDGAGLFLFDHAAEEYEHAKKLIIFLNENNVPVQLTSISAPEHKFEGLTQIFQKAYEHEQHISESINNIVDHAIKSKDHATFNFLQWYVAEQHEEEVLFKDILDKIELIGNENHGLYLADQYVKGIAKSRKS

SEQ ID NO: 4953 - protein, 1379 aa, Artificial Sequence
  SARS-CoV-2/Iceland/319/2020__EPI_ISL_417648 spike protein (1-1211)(K986P_V987P_ H1048Q_H1064N_ H1083N_H1101N) Ferritin construct
MFVFLVLLPLVSSQCVNLTTRTQLPPAYTNSFTRGVYYPDKVFRSSVLHSTQDLFLPFFSNVTWFHAIHVSGTNGTKRFDNPVLPFNDGVYFASTEKSNIIRGWIFGTTLDSKTQSLLIVNNATNVVIKVCEFQFCNDPFLGVYYHKNNKSWMESEFRVYSSANNCTFEYVSQPFLIDLEGKQGNFKNLREFVFKNIDGYFKIYSKHTPINLVRDLPQGFSALEPLVDLPIGINITRFQTLLALHRSYLTPGDSSSGWTAGAAAYYVGYLQPRTFLLKYNENGTITDAVDCALDPLSETKCTLKSFTVEKGIYQTSNFRVQPTESIVRFPNITNLCPFGEVFNATRFASVYAWNRKRISNCVADYSVLYNSASFSTFKCYGVSPTKLNDLCFTNVYADSFVIRGDEVRQIAPGQTGKIADYNYKLPDDFTGCVIAWNSNNLDSKVGGNYNYLYRLFRKSNLKPFERDISTEIYQAGSTPCNGVEGFNCYFPLQSYGFQPTNGVGYQPYRVVVLSFELLHAPATVCGPKKSTNLVKNKCVNFNFNGLTGTGVLTESNKKFLPFQQFGRDIADTTDAVRDPQTLEILDITPCSFGGVSVITPGTNTSNQVAVLYQGVNCTEVPVAIHADQLTPTWRVYSTGSNVFQTRAGCLIGAEHVNNSYECDIPIGAGICASYQTQTNSPRRARSVASQSIIAYTMSLGAENSVAYSNNSIAIPTNFTISVTTEILPVSMTKTSVDCTMYICGDSTECSNLLLQYGSFCTQLNRALTGIAVEQDKNTQEVFAQVKQIYKTPPIKDFGGFNFSQILPDPSKPSKRSFIEDLLFNKVTLADAGFIKQYGDCLGDIAARDLICAQKFNGLTVLPPLLTDEMIAQYTSALLAGTITSGWTFGAGAALQIPFAMQMAYRFNGIGVTQNVLYENQKLIANQFNSAIGKIQDSLSSTASALGKLQDVVNQNAQALNTLVKQLSSNFGAISSVLNDILSRLDPPEAEVQIDRLITGRLQSLQTYVTQQLIRAAEIRASANLAATKMSECVLGQSKRVDFCGKGYQLMSFPQSAPHGVVFLNVTYVPAQEKNFTTAPAICNDGKAHFPREGVFVSNGTNWFVTQRNFYEPQIITTDNTFVSGNCDVVIGIVNNTVYDPLQPELDSFKEELDKYFKNHTSPDVDLGDISGINASVVNIQKEIDRLNEVAKNLNESLIDLQELGKYEQYIKGGGGSDIIKLLNEQVNKEMQSSNLYMSMSSWCYTHSLDGAGLFLFDHAAEEYEHAKKLIIFLNENNVPVQLTSISAPEHKFEGLTQIFQKAYEHEQHISESINNIVDHAIKSKDHATFNFLQWYVAEQHEEEVLFKDILDKIELIGNENHGLYLADQYVKGIAKSRKS

SEQ ID NO: 4954 - protein, 1379 aa, Artificial Sequence
  SARS-CoV-2/Congo/94/2020__EPI_ISL_417947 spike protein (1-1211)(K986P_V987P_ H1048Q_H1064N_ H1083N_H1101N) Ferritin construct
MFVFLVLLPLVSSQCVNLTTRTQLPPAYTNSFTRGVYYPDKVFRSSVLHSTQDLFLPFFSNVTWFHAIHVSGTNGTKRFDNPVLPFNDGVYFASTEKSNIIRGWIFGTTLDSKTQSLLIVNNATNVVIKVCEFQFCNDPFLGVYYHKNNKSWMESEFRVYSSANNCTFEYVSQPFLMDLEGKQGNFKNLREFVFKNIDGYFKIYSKHTPINLVRDLPQGFSALEPLVDLPIGINITRFQTLLALHRSYLTPGDSSSGWTAGAAAYYVGYLQPRTFLLKYNENGTITDAVDCALDPLSETKCTLKSFTVEKGIYQTSNFRVQPTESIVRFPNITNLCPFGEVFNATRFASVYAWNRKRISNCVADYSVLYNSASFSTFKCYGVSPTKLNDLCFTNVYADSFVIRGDEVRQIAPGQTGKIADYNYKLPDDFTGCVIAWNSNNLDSKVGGNYNYLYRLFRKSNLKPFERDISTEIYQAGSTPCNGVEGFNCYFPLQSYGFQPTNGVGYQPYRVVVLSFELLHAPATVCGPKKSTNLVKNKCVNFNFNGLTGTGVLTESNKKFLPFQQFGRDIADTTDAVRDPQTLEILDITPCSFGGVSVITPGTNTSNQVAVLYQGVNCTEVPVAIHADQLTPTWRVYSTGSNVFQTRAGCLIGAEHVNNSYECDIPIGAGICASYQTQTNSPRRARSVASQSIIAYTMSLGAENSVAYSNNSIAIPTNFTISVTTEILPVSMTKTSVDCTMYICGDSTECSNLLLQYGSFCTQLNRALTGIAVEQDKNTQEVFAQVKQIYKTPPIKDFGGFNFSQILPDPSKPSKRSFIEDILFNKVTLADAGFIKQYGDCLGDIAARDLICAQKFNGLTVLPPLLTDEMIAQYTSALLAGTITSGWTFGAGAALQIPFAMQMAYRFNGIGVTQNVLYENQKLIANQFNSAIGKIQDSLSSTASALGKLQDVVNQNAQALNTLVKQLSSNFGAISSVLNDILSRLDPPEAEVQIDRLITGRLQSLQTYVTQQLIRAAEIRASANLAATKMSECVLGQSKRVDFCGKGYQLMSFPQSAPHGVVFLNVTYVPAQEKNFTTAPAICNDGKAHFPREGVFVSNGTNWFVTQRNFYEPQIITTDNTFVSGNCDVVIGIVNNTVYDPLQPELDSFKEELDKYFKNHTSPDVDLGDISGINASVVNIQKEIDRLNEVAKNLNESLIDLQELGKYEQYIKGGGGSDIIKLLNEQVNKEMQSSNLYMSMSSWCYTHSLDGAGLFLFDHAAEEYEHAKKLIIFLNENNVPVQLTSISAPEHKFEGLTQIFQKAYEHEQHISESINNIVDHAIKSKDHATFNFLQWYVAEQHEEEVLFKDILDKIELIGNENHGLYLADQYVKGIAKSRKS

SEQ ID NO: 4955 - protein, 1379 aa, Artificial Sequence
  SARS-CoV-2/Congo/158/2020__EPI_ISL_417950 spike protein (1-1211)(K986P_V987P_ H1048Q_H1064N_ H1083N_H1101N) Ferritin construct
MFVFLVLLPLVSSQCVNLTTRTQLPPAYTNSFTRGVYYPDKVFRSSVLHSTQDLFLPFFSNVTWFHAIHVSGTNGTKRFDNPVLPFNDGVYFASTEKSNIIRGWIFGTTLDSKTQSLLIVNNATNVVIKVCEFQFCNDPFLGVYYHKNNKSWMESEFRVYSSANNCTFEYVSQPFLMDLEGKQGNFKNLREFVFKNIDGYFKIYSKHTPINLVRDLPQGFSALEPLVDLPIGINITRFQTLLALHRSYLTPGDSSSGWTAGAAAYYVGYLQPRTFLLKYNENGTITDAVDCALDPLSETKCTLKSFTVEKGIYQTSNFRVQPTESIVRFPNITNLCPFGEVFNATRFASVYAWNRKRISNCVADYSVLYNSASFSTFKCYGVSPTKLNDLCFTNVYADSFVIRGDEVRQIAPGQTGKIADYNYKLPDDFTGCVIAWNSNNLDSKVGGNYNYLYRLFRKSNLKPFERDISTEIYQAGSTPCNGVEGFNCYFPLQSYGFQPTNGVGYQPYRVVVLSFELLHAPATVCGPKKSTNLVKNKCVNFNFNGLTGTGVLTESNKKFLPFQQFGRDIADTTDAVRDPQTLEILDITPCSFGGVSVITPGTNTSNQVAVLYQDVNCTEVPVAIHADQLTPTWRVYSTGSNVFQTRAGCLIGAEHVNNSYECDIPIGAGICASYQTQTNSPRRARSVASQSIIAYTMSLGAENSVAYSNNSIAIPTNFTISVTTEILPVSMTKTSVDCTMYICGDSTECSNLLLQYGSFCTQLNRALTGIAVEQDKNTQEVFAQVKQIYKTPPIKDFGGFNFSQILPDPSKPSKRSFIEDLLFNKVTLADAGFIKQYGDCLGDIAARDLICAQKFNGLTVLPPLLTDEMIAQYTSALLAGTITSGWTFGAGAALQIPFAMQMAYRFNGIGVTQNVLYENQKLIANQFNSAIGKIQDSLSSTASALGKLQDVVNQNAQALNTLVKQLSSNFGAISSVLNDILSRLDPPEAEVQIDRLITGRLQSLQTYVTQQLIRAAEIRASANLAATKMSECVLGQSKRVDFCGKGYQLMSFPQSAPHGVVFLNVTYVPAQEKNFTTAPAICNDGKAHFPREGVFVSNGTNWFVTQRNFYEPQIITTDNTFLSGNCDVVIGIVNNTVYDPLQPELDSFKEELDKYFKNHTSPDVDLGDISGINASVVNIQKEIDRLNEVAKNLNESLIDLQELGKYEQYIKGGGGSDIIKLLNEQVNKEMQSSNLYMSMSSWCYTHSLDGAGLFLFDHAAEEYEHAKKLIIFLNENNVPVQLTSISAPEHKFEGLTQIFQKAYEHEQHISESINNIVDHAIKSKDHATFNFLQWYVAEQHEEEVLFKDILDKIELIGNENHGLYLADQYVKGIAKSRKS

SEQ ID NO: 4956 - protein, 1379 aa, Artificial Sequence
  SARS-CoV-2/USA/UT-00034/2020__EPI_ISL_417977 spike protein (1-1211)(K986P_V987P_ H1048Q_H1064N_ H1083N_H1101N) Ferritin construct
MFVFLVLLPLVSSQCVNLTTRTQLPPAYTNSFTRGVYYPDKVFRSSVLHSTQDLFLPFFSNVTWFHAIHVSGTNGTKRFDNPVLPFNDGVYFASTEKSNIIRGWIFGTTLDSKTQSLLIVNNATNVVIKVCEFQFCNDPFLGVYYYKNNKSWMESEFRVYSSANNCTFEYVSQPFLMDLEGKQGNFKNLREFVFKNIDGYFKIYSKHTPINLVRDLPQGFSALEPLVDLPIGINITRFQTLLALHRSYLTPGDSSSGWTAGAAAYYVGYLQPRTFLLKYNENGTITDAVDCALDPLSETKCTLKSFTVEKGIYQTSNFRVQPTESIVRFPNITNLCPFGEVFNATRFASVYAWNRKRISNCVADYSVLYNSASFSTFKCYGVSPTKLNDLCFTNVYADSFVIRGDEVRQIAPGQTGKIADYNYKLPDDFTGCVIAWNSNNLDSKVGGNYNYLYRLFRKSNLKPFERDISTEIYQAGSTPCNGVEGFNCYFPLQSYGFQPTNGVGYQPYRVVVLSFELLHAPATVCGPKKSTNLVKNKCVNFNFNGLTGTGVLTESNKKFLPFQQFGRDIADTTDAVRDPQTLEILDITPCSFGGVSVITPGTNTSNQVAVLYQGVNCTEVPVAIHADQLTPTWRVYSTGSNVFQTRAGCLIGAEHVNNSYECDIPIGAGICASYQTQTNSPRRARSVASQSIIAYTMSLGAENSVAYSNNSIAIPTNFTISVTTEILPVSMTKTSVDCTMYICGDSTECSNLLLQYGSFCTQLNRALTGIAVEQDKNTQEVFAQVKQIYKTPPIKDFGGFNFSQILPDPSKPSKRSFIEDLLFNKVTLADAGFIKQYGDCLGDIAARDLICAQKFNGLTVLPPLLTDEMIAQYTSALLAGTITSGWTFGAGAALQIPFAMQMAYRFNGIGVTQNVLYENQKLIANQFNSAIGKIQDSLSSTASALGKLQDVVNQNAQALNTLVKQLSSNFGAISSVLNDILSRLDPPEAEVQIDRLITGRLQSLQTYVTQQLIRAAEIRASANLAATKMSECVLGQSKRVDFCGKGYQLMSFPQSAPHGVVFLNVTYVPAQEKNFTTAPAICNDGKAHFPREGVFVSNGTNWFVTQRNFYEPQIITTDNTFVSGNCDVVIGIVNNTVYDPLQPELDSFKEELDKYFKNHTSPDVDLGDISGINASVVNIQKEIDRLNEVAKNLNESLIDLQELGKYEQYIKGGGGSDIIKLLNEQVNKEMQSSNLYMSMSSWCYTHSLDGAGLFLFDHAAEEYEHAKKLIIFLNENNVPVQLTSISAPEHKFEGLTQIFQKAYEHEQHISESINNIVDHAIKSKDHATFNFLQWYVAEQHEEEVLFKDILDKIELIGNENHGLYLADQYVKGIAKSRKS

SEQ ID NO: 4957 - protein, 1379 aa, Artificial Sequence
  SARS-CoV-2/USA/UT-00033/2020__EPI_ISL_417976 spike protein (1-1211)(K986P_V987P_ H1048Q_H1064N_ H1083N_H1101N) Ferritin construct
MFVFLVLLPLVSSQCVNLTTRTQLPPAYTNSFTRGVYYPDKVFRSSVLHSTQDLFLPFFSNVTWFHAIHVSGTNGTKRFDNPVLPFNDGVYFASTEKSNIIRGWIFGTTLDSKTQSLLIVNNATNVVIKVCEFQFCNDPFLGVYYHKNNKSWMESEFRVYSSANNCTFEYVSQPFLMDLEGKQGNFKNLREFVFKNIDGYFKIYSKHTPINLVRDLPQGFSALEPLVDLPIGINITRFQTLLALHRSYLTPGDSSSGLTAGAAAYYVGYLQPRTFLLKYNENGTITDAVDCALDPLSETKCTLKSFTVEKGIYQTSNFRVQPTESIVRFPNITNLCPFGEVFNATRFASVYAWNRKRISNCVADYSVLYNSASFSTFKCYGVSPTKLNDLCFTNVYADSFVIRGDEVRQIAPGQTGKIADYNYKLPDDFTGCVIAWNSNNLDSKVGGNYNYLYRLFRKSNLKPFERDISTEIYQAGSTPCNGVEGFNCYFPLQSYGFQPTNGVGYQPYRVVVLSFELLHAPATVCGPKKSTNLVKNKCVNFNFNGLTGTGVLTESNKKFLPFQQFGRDIADTTDAVRDPQTLEILDITPCSFGGVSVITPGTNTSNQVAVLYQGVNCTEVPVAIHADQLTPTWRVYSTGSNVFQTRAGCLIGAEHVNNSYECDIPIGAGICASYQTQTNSPRRARSVASQSIIAYTMSLGAENSVAYSNNSIAIPTNFTISVTTEILPVSMTKTSVDCTMYICGDSTECSNLLLQYGSFCTQLNRALTGIAVEQDKNTQEVFAQVKQIYKTPPIKDFGGFNFSQILPDPSKPSKRSFIEDLLFNKVTLADAGFIKQYGDCLGDIAARDLICAQKFNGLTVLPPLLTDEMIAQYTSALLAGTITSGWTFGAGAALQIPFAMQMAYRFNGIGVTQNVLYENQKLIANQFNSAIGKIQDSLSSTASALGKLQDVVNQNAQALNTLVKQLSSNFGAISSVLNDILSRLDPPEAEVQIDRLITGRLQSLQTYVTQQLIRAAEIRASANLAATKMSECVLGQSKRVDFCGKGYQLMSFPQSAPHGVVFLNVTYVPAQEKNFTTAPAICNDGKAHFPREGVFVSNGTNWFVTQRNFYEPQIITTDNTFVSGNCDVVIGIVNNTVYDPLQPELDSFKEELDKYFKNHTSPDVDLGDISGINASVVNIQKEIDRLNEVAKNLNESLIDLQELGKYEQYIKGGGGSDIIKLLNEQVNKEMQSSNLYMSMSSWCYTHSLDGAGLFLFDHAAEEYEHAKKLIIFLNENNVPVQLTSISAPEHKFEGLTQIFQKAYEHEQHISESINNIVDHAIKSKDHATFNFLQWYVAEQHEEEVLFKDILDKIELIGNENHGLYLADQYVKGIAKSRKS

SEQ ID NO: 4958 - protein, 1379 aa, Artificial Sequence
  SARS-CoV-2/USA/WI-13/2020__EPI_ISL_417516 spike protein (1-1211)(K986P_V987P_ H1048Q_H1064N_ H1083N_H1101N) Ferritin construct
MFVFLVLLPLVSSQCVNLTTRTQLPPAYTNSFTRGVYYPDKVFRSSVLHSTQDLFLPFFSNVTWFHAIHVSGTNGTKRFDNPVLPFNDGVYFASTEKSNIIRGWIFGTTLDSKTQSLLIVNNATNVVIKVCEFQFCNDPFLGVYYHKNNKSWMESEFRVYSSANNCTFEYVSQPFLMDLEGKQGNFKNLREFVFKNIDGYFKIYSKHTPINLVRDLPQGFSALEPLVDLPIGINITRFQTLLALHRSYLTPGDSSSGWTAGAAAYYVGYLQPRTFLLKYNENGTITDAVDCALDPLSETKCTLKSFTVEKGIYQTSNFRVLPTESIVRFPNITNLCPFGEVFNATRFASVYAWNRKRISNCVADYSVLYNSASFSTFKCYGVSPTKLNDLCFTNVYADSFVIRGDEVRQIAPGQTGKIADYNYKLPDDFTGCVIAWNSNNLDSKVGGNYNYLYRLFRKSNLKPFERDISTEIYQAGSTPCNGVEGFNCYFPLQSYGFQPTNGVGYQPYRVVVLSFELLHAPATVCGPKKSTNLVKNKCVNFNFNGLTGTGVLTESNKKFLPFQQFGRDIADTTDAVRDPQTLEILDITPCSFGGVSVITPGTNTSNQVAVLYQGVNCTEVPVAIHADQLTPTWRVYSTGSNVFQTRAGCLIGAEHVNNSYECDIPIGAGICASYQTQTNSPRRARSVASQSIIAYTMSLGAENSVAYSNNSIAIPTNFTISVTTEILPVSMTKTSVDCTMYICGDSTECSNLLLQYGSFCTQLNRALTGIAVEQDKNTQEVFAQVKQIYKTPPIKDFGGFNFSQILPDPSKPSKRSFIEDLLFNKVTLADAGFIKQYGDCLGDIAARDLICAQKFNGLTVLPPLLTDEMIAQYTSALLAGTITSGWTFGAGAALQIPFAMQMAYRFNGIGVTQNVLYENQKLIANQFNSAIGKIQDSLSSTASALGKLQDVVNQNAQALNTLVKQLSSNFGAISSVLNDILSRLDPPEAEVQIDRLITGRLQSLQTYVTQQLIRAAEIRASANLAATKMSECVLGQSKRVDFCGKGYQLMSFPQSAPHGVVFLNVTYVPAQEKNFTTAPAICNDGKAHFPREGVFVSNGTNWFVTQRNFYEPQIITTDNTFVSGNCDVVIGIVNNTVYDPLQPELDSFKEELDKYFKNHTSPDVDLGDISGINASVVNIQKEIDRLNEVAKNLNESLIDLQELGKYEQYIKGGGGSDIIKLLNEQVNKEMQSSNLYMSMSSWCYTHSLDGAGLFLFDHAAEEYEHAKKLIIFLNENNVPVQLTSISAPEHKFEGLTQIFQKAYEHEQHISESINNIVDHAIKSKDHATFNFLQWYVAEQHEEEVLFKDILDKIELIGNENHGLYLADQYVKGIAKSRKS

SEQ ID NO: 4959 - protein, 1378 aa, Artificial Sequence
  SARS-CoV-2/India/1-27/2020__EPI_ISL_413522 spike protein (1-1210)(K985P_V986P_ H1047Q_H1063N_ H1082N_H1100N) Ferritin construct
MFVFLVLLPLVSSQCVNLTTRTQLPPAYTNSFTRGVYYPDKVFRSSVLHSTQDLFLPFFSNVTWFHAIHVSGTNGTKRFDNPVLPFNDGVYFASTEKSNIIRGWIFGTTLDSKTQSLLIVNNATNVVIKVCEFQFCNDPFLGVYHKNNKSWMESEFRVYSSANNCTFEYVSQPFLMDLEGKQGNFKNLREFVFKNIDGYFKIYSKHTPINLVRDLPQGFSALEPLVDLPIGINITRFQTLLALHRSYLTPGDSSSGWTAGAAAYYVGYLQPRTFLLKYNENGTITDAVDCALDPLSETKCTLKSFTVEKGIYQTSNFRVQPTESIVRFPNITNLCPFGEVFNATRFASVYAWNRKRISNCVADYSVLYNSASFSTFKCYGVSPTKLNDLCFTNVYADSFVIRGDEVIQIAPGQTGKIADYNYKLPDDFTGCVIAWNSNNLDSKVGGNYNYLYRLFRKSNLKPFERDISTEIYQAGSTPCNGVEGFNCYFPLQSYGFQPTNGVGYQPYRVVVLSFELLHAPATVCGPKKSTNLVKNKCVNFNFNGLTGTGVLTESNKKFLPFQQFGRDIADTTDAVRDPQTLEILDITPCSFGGVSVITPGTNTSNQVAVLYQDVNCTEVPVAIHADQLTPTWRVYSTGSNVFQTRAGCLIGAEHVNNSYECDIPIGAGICASYQTQTNSPRRARSVASQSIIAYTMSLGAENSVAYSNNSIAIPTNFTISVTTEILPVSMTKTSVDCTMYICGDSTECSNLLLQYGSFCTQLNRALTGIAVEQDKNTQEVFAQVKQIYKTPPIKDFGGFNFSQILPDPSKPSKRSFIEDLLFNKVTLADAGFIKQYGDCLGDIAARDLICAQKFNGLTVLPPLLTDEMIAQYTSALLAGTITSGWTFGAGAALQIPFAMQMAYRFNGIGVTQNVLYENQKLIANQFNSAIGKIQDSLSSTASALGKLQDVVNQNAQALNTLVKQLSSNFGAISSVLNDILSRLDPPEAEVQIDRLITGRLQSLQTYVTQQLIRAAEIRASANLAATKMSECVLGQSKRVDFCGKGYQLMSFPQSAPHGVVFLNVTYVPAQEKNFTTAPAICNDGKAHFPREGVFVSNGTNWFVTQRNFYEPQIITTDNTFVSGNCDVVIGIVNNTVYDPLQPELDSFKEELDKYFKNHTSPDVDLGDISGINASVVNIQKEIDRLNEVAKNLNESLIDLQELGKYEQYIKGGGGSDIIKLLNEQVNKEMQSSNLYMSMSSWCYTHSLDGAGLFLFDHAAEEYEHAKKLIIFLNENNVPVQLTSISAPEHKFEGLTQIFQKAYEHEQHISESINNIVDHAIKSKDHATFNFLQWYVAEQHEEEVLFKDILDKIELIGNENHGLYLADQYVKGIAKSRKS

SEQ ID NO: 4960 - protein, 1373 aa, Artificial Sequence
  SARS-CoV-2/pangolin/Guangxi/P4L/2017__EPI_ISL_410538 spike protein (1-1205)(K980P_V981P_ H1042Q_H1058N_ H1077N_H1095N) Ferritin construct
MFVFLFVLPLVSSQCVNLTTRTGIPPGYTNSSTRGVYYPDKVFRSSILHLTQDLFLPFFSNVTWFNTINYQGGFKKFDNPVLPFNDGVYFASTEKSNIIRGWIFGTTLDARTQSLLIVNNATNVVIKVCEFQFCTDPFLGVYYHNNNKTWVENEFRVYSSANNCTFEYISQPFLMDLEGKQGNFKNLREFVFKNVDGYFKIYSKHTPIDLVRDLPRGFAALEPLVDLPIGINITRFQTLLALHRSYLTPGNLESGWTTGAAAYYVGYLQQRTFLLSYNQNGTITDAVDCSLDPLSETKCTLKSLTVEKGIYQTSNFRVQPTISIVRFPNITNLCPFGEVFNASKFASVYAWNRKRISNCVADYSVLYNSTSFSTFKCYGVSPTKLNDLCFTNVYADSFVVKGDEVRQIAPGQTGVIADYNYKLPDDFTGCVIAWNSVKQDALTGGNYGYLYRLFRKSKLKPFERDISTEIYQAGSTPCNGQVGLNCYYPLERYGFHPTTGVNYQPFRVVVLSFELLNGPATVCGPKLSTTLVKDKCVNFNFNGLTGTGVLTTSKKQFLPFQQFGRDISDTTDAVRDPQTLEILDITPCSFGGVSVITPGTNTSNQVAVLYQDVNCTEVPMAIHAEQLTPAWRVYSAGANVFQTRAGCLVGAEHVNNSYECDIPVGAGICASYHSMSSLRSVNQRSIIAYTMSLGAENSVAYSNNSIAIPTNFTISVTTEILPVSMTKTSVDCTMYICGDSIECSNLLLQYGSFCTQLNRALTGIAVEQDKNTQEVFAQVKQIYKTPPIKDFGGFNFSQILPDPSKPSKRSFIEDLLFNKVTLADAGFIKQYGDCLGDIAARDLICAQKFNGLTVLPPLLTDEMIAQYTSALLAGTITSGWTFGAGAALQIPFAMQMAYRFNGIGVTQNVLYENQKLIANQFNSAIGKIQDSLSSTASALGKLQDVVNQNAQALNTLVKQLSSNFGAISSVLNDILSRLDPPEAEVQIDRLITGRLQSLQTYVTQQLIRAAEIRASANLAATKMSECVLGQSKRVDFCGKGYQLMSFPQSAPHGVVFLNVTYVPAQEKNFTTAPAICNEGKAHFPREGVFVSNGTNWFITQRNFYEPQIITTDNTFVSGSCDVVIGIVNNTVYDPLQPELDSFKEELDKYFKNHTSPDVDLGDISGINASVVNIQKEIDRLNEVAKNLNESPIDLQELGKYEQYIKGGGGSDIIKLLNEQVNKEMQSSNLYMSMSSWCYTHSLDGAGLFLFDHAAEEYEHAKKLIIFLNENNVPVQLTSISAPEHKFEGLTQIFQKAYEHEQHISESINNIVDHAIKSKDHATFNFLQWYVAEQHEEEVLFKDILDKIELIGNENHGLYLADQYVKGIAKSRKS

SEQ ID NO: 4961 - protein, 1373 aa, Artificial Sequence
  SARS-CoV-2/pangolin/Guangxi/P5L/2017__EPI_ISL_410540 spike protein (1-1205)(K980P_V981P_ H1042Q_H1058N_ H1077N_H1095N) Ferritin construct
MFVFLFVLPLVSSQCVNLTTRTGIPPGYTNSSTRGVYYPDKVFRSSILHLTQDLFLPFFSNVTWFNTINYQGGFKKFDNPVLPFNDGVYFASTEKSNIIRGWIFGTTLDARTQSLLIVNNATNVVIKVCEFQFCTDPFLGVYYHNNNKTWVENEFRVYSSANNCTFEYISQPFLMDLEGKQGNFKNLREFVFKNVDGYFKIYSKHTPIDLVRDLPRGFAALEPLVDLPIGINITRFQTLLALHRSYLTPGKLESGWTTGAAAYYVGYLQQRTFLLSYNQNGTITDAVDCSLDPLSETKCTLKSLTVEKGIYQTSNFRVQPTISIVRFPNITNLCPFGEVFNASKFASVYAWNRKRISNCVADYSVLYNSTSFSTFKCYGVSPTKLNDLCFTNVYADSFVVKGDEVRQIAPGQTGVIADYNYKLPDDFTGCVIAWNSVKQDALTGGNYGYLYRLFRKSKLKPFERDISTEIYQAGSTPCNGQVGLNCYYPLERYGFHPTTGVNYQPFRVVVLSFELLNGPATVCGPKLSTTLVKDKCVNFNFNGLTGTGVLTTSKKQFLPFQQFGRDISDTTDAVRDPQTLEILDITPCSFGGVSVITPGTNTSNQVAVLYQDVNCTEVPMAIHAEQLTPAWRVYSAGANVFQTRAGCLVGAEHVNNSYECDIPVGAGICASYHSMSSFRSVNQRSIIAYTMSLGAENSVAYSNNSIAIPTNFTISVTTEILPVSMTKTSVDCTMYICGDSIECSNLLLQYGSFCTQLNRALTGIAVEQDKNTQEVFAQVKQIYKTPPIKDFGGFNFSQILPDPSKPSKRSFIEDLLFNKVTLADAGFIKQYGDCLGDIAARDLICAQKFNGLTVLPPLLTDEMIAQYTSALLAGTITSGWTFGAGAALQIPFAMQMAYRFNGIGVTQNVLYENQKLIANQFNSAIGKIQDSLSSTASALGKLQDVVNQNAQALNTLVKQLSSNFGAISSVLNDILSRLDPPEAEVQIDRLITGRLQSLQTYVTQQLIRAAEIRASANLAATKMSECVLGQSKRVDFCGKGYQLMSFPQSAPHGVVFLNVTYVPAQEKNFTTAPAICNEGKAHFPREGVFVSNGTNWFITQRNFYEPQIITTDNTFVSGSCDVVIGIVNNTVYDPLQPELDSFKEELDKYFKNHTSPDVDLGDISGINASVVNIQKEIDRLNEVAKNLNESLIDLQELGKYEQYIKGGGGSDIIKLLNEQVNKEMQSSNLYMSMSSWCYTHSLDGAGLFLFDHAAEEYEHAKKLIIFLNENNVPVQLTSISAPEHKFEGLTQIFQKAYEHEQHISESINNIVDHAIKSKDHATFNFLQWYVAEQHEEEVLFKDILDKIELIGNENHGLYLADQYVKGIAKSRKS

SEQ ID NO: 4962 - protein, 1373 aa, Artificial Sequence
  SARS-CoV-2/pangolin/Guangxi/P5E/2017__EPI_ISL_410541 spike protein (1-1205)(K980P_V981P_ H1042Q_H1058N_ H1077N_H1095N) Ferritin construct
MFVFLFVLPLVSSQCVNLTTRTGIPPGYTNSSTRGVYYPDKVFRSSILHLTQDLFLPFFSNVTWFNTITYQGGSKKFDNPVLPFNDGVYFASTEKSNIIRGWIFGTTLDARTQSLLIVNNATNVVIKVCEFQFCTDPFLGVYYHNNNKTWVENEFRVYSSANNCTFEYISQPFLMDLEGKQGNFKNLREFVFKNVDGYFKIYSKHTPIDLVRDLPRGFAALEPLVDLPIGINITRFQTLLALHRSYLTPGKLESGWTTGAAAYYVGYLQQRTFLLSYNQNGTITDAVDCSLDPLSETKCTLKSLTVEKGIYQTSNFRVQPTISIVRFPNITNLCPFGEVFNASKFASVYAWNRKRISNCVADYSVLYNSTSFSTFKCYGVSPTKLNDLCFTNVYADSFVVKGDEVRQIAPGQTGVIADYNYKLPDDFTGCVIAWNSVKQDALTGDNYGYLYRLFRKSKLKPFERDISTEIYQAGSTPCNGQVGLNCYYPLERYGFHPTTGVNYQPFRVVVLSFELLNGPATVCGPKLSTTLVKDKCVNFNFNGLTGTGVLTTSKKQFLPFQQFGRDISDTTDAVRDPQTLEILDITPCSFGGVSVITPGTNTSNQVAVLYQDVNCTEVPMAIHAEQLTPAWRVYSAGANVFQTRAGCLVGAEHVNNSYECDIPVGAGICASYHSMSSFRSVNQRSIIAYTMSLGAENSVAYSNNSIAIPTNFTISVTTEILPVSMTKTSVDCTMYICGDSIECSNLLLQYGSFCTQLNRALTGIAVEQDKNTQEVFAQVKQIYKTPPIKDFGGFNFSQILPDPSKPSKRSFIEDLLFNKVTLADAGFIKQYGDCLGDIAARDLICAQKFNGLTVLPPLLTDEMIAQYTSALLAGTITSGWTFGAGAALQIPFAMQMAYRFNGIGVTQNVLYENQKLIANQFNSAIGKIQDSLSSTASALGKLQDVVNQNAQALNTLVKQLSSNFGAISSVLNDILSRLDPPEAEVQIDRLITGRLQSLQTYVTQQLIRAAEIRASANLAATKMSECVLGQSKRVDFCGKGYQLMSFPQSAPHGVVFLNVTYVPAQEKNFTTAPAICNEGKAHFPREGVFVSNGTNWFITQRNFYEPQIITTDNTFVSGSCDVVIGIVNNTVYDPLQPELDSFKEELDKYFKNHTSPDVDLGDISGINASVVNIQKEIDRLNEVAKNLNESLIDLQELGKYEQYIKGGGGSDIIKLLNEQVNKEMQSSNLYMSMSSWCYTHSLDGAGLFLFDHAAEEYEHAKKLIIFLNENNVPVQLTSISAPEHKFEGLTQIFQKAYEHEQHISESINNIVDHAIKSKDHATFNFLQWYVAEQHEEEVLFKDILDKIELIGNENHGLYLADQYVKGIAKSRKS

SEQ ID NO: 4963 - protein, 1371 aa, Artificial Sequence
  SARS-CoV-2/pangolin/Guangxi/P1E/2017__EPI_ISL_410539 spike protein (1-1203)(K978P_V979P_ H1040Q_H1056N_ H1075N_H1093N) Ferritin construct
MFVFLFVLPLVSSQCVNLTTRTGIQPGYTNSSTRGVYYPDKVFRSSILHLTQDLFLPFFSNVTWFNTINYQGGFKKFDNPVLPFNDGVYFASTEKSNIIRGWIFGTTLDARTQSLLIVNNATNVVIKVCEFQFCTDPFLGVYYHNNNKTWVENEFRVYSSANNCTFEYISQPFLMDLEGKQGNFKNLREFVFKNVDGYFKIYSKHTPIDLVRDLPRGFAALEPLVDLPIGINITRFQTLLALHRSYLTPGKLESGWTTGAAAYYVGYLQQRTFLLSYNQNGTITDAVDCSLDPLSETKCTLKSLTVEKGIYQTSNFRVQPTISIVRFPNITNLCPFGEVFNASKFASVYAWNRKRISNCVADYSVLYNSTSFSTFKCYGVSPTKLNDLCFTNVYADSFVVKGDEVRQIAPGQTGVIADYNYKLPDDFTGCVIAWNSVKQDALTGGNYLYRLFRKSKLKPFERDISTEIYQAGSTPCNGQVGLNCYYPLERYGFHPTTGVNYQPFRVVVLSFELLNGPATVCGPKLSTTLVKDKCVNFNFNGLTGTGVLTTSKKQFLPFQQFGRDISDTTDAVRDPQTLEILDITPCSFGGVSVITPGTNTSNQVAVLYQDVNCTEVPMAIHAEQLTPAWRVYSAGANVFQTRAGCLVGAEHVNNSYECDIPVGAGICASYHSMSSLRSVNQRSIIAYTMSLGAENSVAYSNNSIAIPTNFTISVTTEILPVSMTKTSVDCTMYICGDSIECSNLLLQYGSFCTQLNRALTGIAVEQDKNTQEVFAQVKQIYKTPPIKDFGGFNFSQILPDPSKPSKRSFIEDLLFNKVTLADAGFIKQYGDCLGDIAARDLICAQKFNGLTVLPPLLTDEMIAQYTSALLAGTITSGWTFGAGAALQIPFAMQMAYRFNGIGVTQNVLYENQKLIANQFNSAIGKIQDSLSSTASALGKLQDVVNQNAQALNTLVKQLSSNFGAISSVLNDILSRLDPPEAEVQIDRLITGRLQSLQTYVTQQLIRAAEIRASANLAATKMSECVLGQSKRVDFCGKGYQLMSFPQSAPHGVVFLNVTYVPAQEKNFTTAPAICNEGKAHFPREGVFVSNGTNWFITQRNFYEPQIITTDNTFVSGSCDVVIGIVNNTVYDPLQPELDSFKEELDKYFKNHTSPDVDLGDISGINASVVNIQKEIDRLNEVAKNLNESLIDLQELGKYEQYIKGGGGSDIIKLLNEQVNKEMQSSNLYMSMSSWCYTHSLDGAGLFLFDHAAEEYEHAKKLIIFLNENNVPVQLTSISAPEHKFEGLTQIFQKAYEHEQHISESINNIVDHAIKSKDHATFNFLQWYVAEQHEEEVLFKDILDKIELIGNENHGLYLADQYVKGIAKSRKS

SEQ ID NO: 4964 - protein, 1379 aa, Artificial Sequence
  SARS-CoV-2/Wuhan/WIV05/2019__EPI_ISL_402128 spike protein (1-1211)(I712C_T1077C) Ferritin construct
MFVFLVLLPLVSSQCVNLTTRTQLPPAYTNSFTRGVYYPDKVFRSSVLHSTQDLFLPFFSNVTWFHAIHVSGTNGTKRFDNPVLPFNDGVYFASTEKSNIIRGWIFGTTLDSKTQSLLIVNNATNVVIKVCEFQFCNDPFLGVYYHKNNKSWMESEFRVYSSANNCTFEYVSQPFLMDLEGKQGNFKNLREFVFKNIDGYFKIYSKHTPINLVRDLPQGFSALEPLVDLPIGINITRFQTLLALHRSYLTPGDSSSGWTAGAAAYYVGYLQPRTFLLKYNENGTITDAVDCALDPLSETKCTLKSFTVEKGIYQTSNFRVQPTESIVRFPNITNLCPFGEVFNATRFASVYAWNRKRISNCVADYSVLYNSASFSTFKCYGVSPTKLNDLCFTNVYADSFVIRGDEVRQIAPGQTGKIADYNYKLPDDFTGCVIAWNSNNLDSKVGGNYNYLYRLFRKSNLKPFERDISTEIYQAGSTPCNGVEGFNCYFPLQSYGFQPTNGVGYQPYRVVVLSFELLHAPATVCGPKKSTNLVKNKCVNFNFNGLTGTGVLTESNKKFLPFQQFGRDIADTTDAVRDPQTLEILDITPCSFGGVSVITPGTNTSNQVAVLYQDVNCTEVPVAIHADQLTPTWRVYSTGSNVFQTRAGCLIGAEHVNNSYECDIPIGAGICASYQTQTNSPRRARSVASQSIIAYTMSLGAENSVAYSNNSCAIPTNFTISVTTEILPVSMTKTSVDCTMYICGDSTECSNLLLQYGSFCTQLNRALTGIAVEQDKNTQEVFAQVKQIYKTPPIKDFGGFNFSQILPDPSKPSKRSFIEDLLFNKVTLADAGFIKQYGDCLGDIAARDLICAQKFNGLTVLPPLLTDEMIAQYTSALLAGTITSGWTFGAGAALQIPFAMQMAYRFNGIGVTQNVLYENQKLIANQFNSAIGKIQDSLSSTASALGKLQDVVNQNAQALNTLVKQLSSNFGAISSVLNDILSRLDKVEAEVQIDRLITGRLQSLQTYVTQQLIRAAEIRASANLAATKMSECVLGQSKRVDFCGKGYHLMSFPQSAPHGVVFLHVTYVPAQEKNFTCAPAICHDGKAHFPREGVFVSNGTHWFVTQRNFYEPQIITTDNTFVSGNCDVVIGIVNNTVYDPLQPELDSFKEELDKYFKNHTSPDVDLGDISGINASVVNIQKEIDRLNEVAKNLNESLIDLQELGKYEQYIKGGGGSDIIKLLNEQVNKEMQSSNLYMSMSSWCYTHSLDGAGLFLFDHAAEEYEHAKKLIIFLNENNVPVQLTSISAPEHKFEGLTQIFQKAYEHEQHISESINNIVDHAIKSKDHATFNFLQWYVAEQHEEEVLFKDILDKIELIGNENHGLYLADQYVKGIAKSRKS

SEQ ID NO: 4965 - protein, 1375 aa, Artificial Sequence
  SARS-CoV-2/bat/Yunnan/RaTG13/2013__EPI_ISL_402131 spike protein (1-1207)(I708C_T1073C) Ferritin construct
MFVFLVLLPLVSSQCVNLTTRTQLPPAYTNSSTRGVYYPDKVFRSSVLHLTQDLFLPFFSNVTWFHAIHVSGTNGIKRFDNPVLPFNDGVYFASTEKSNIIRGWIFGTTLDSKTQSLLIVNNATNVVIKVCEFQFCNDPFLGVYYHKNNKSWMESEFRVYSSANNCTFEYVSQPFLMDLEGKQGNFKNLREFVFKNIDGYFKIYSKHTPINLVRDLPPGFSALEPLVDLPIGINITRFQTLLALHRSYLTPGDSSSGWTAGAAAYYVGYLQPRTFLLKYNENGTITDAVDCALDPLSETKCTLKSFTVEKGIYQTSNFRVQPTDSIVRFPNITNLCPFGEVFNATTFASVYAWNRKRISNCVADYSVLYNSTSFSTFKCYGVSPTKLNDLCFTNVYADSFVITGDEVRQIAPGQTGKIADYNYKLPDDFTGCVIAWNSKHIDAKEGGNFNYLYRLFRKANLKPFERDISTEIYQAGSKPCNGQTGLNCYYPLYRYGFYPTDGVGHQPYRVVVLSFELLNAPATVCGPKKSTNLVKNKCVNFNFNGLTGTGVLTESNKKFLPFQQFGRDIADTTDAVRDPQTLEILDITPCSFGGVSVITPGTNASNQVAVLYQDVNCTEVPVAIHADQLTPTWRVYSTGSNVFQTRAGCLIGAEHVNNSYECDIPIGAGICASYQTQTNSRSVASQSIIAYTMSLGAENSVAYSNNSCAIPTNFTISVTTEILPVSMTKTSVDCTMYICGDSTECSNLLLQYGSFCTQLNRALTGIAVEQDKNTQEVFAQVKQIYKTPPIKDFGGFNFSQILPDPSKPSKRSFIEDLLFNKVTLADAGFIKQYGDCLGDIAARDLICAQKFNGLTVLPPLLTDEMIAQYTSALLAGTITSGWTFGAGAALQIPFAMQMAYRFNGIGVTQNVLYENQKLIANQFNSAIGKIQDSLSSTASALGKLQDVVNQNAQALNTLVKQLSSNFGAISSVLNDILSRLDKVEAEVQIDRLITGRLQSLQTYVTQQLIRAAEIRASANLAATKMSECVLGQSKRVDFCGKGYHLMSFPQSAPHGVVFLHVTYVPAQEKNFTCAPAICHDGKAHFPREGVFVSNGTHWFVTQRNFYEPQIITTDNTFVSGSCDVVIGIVNNTVYDPLQPELDSFKEELDKYFKNHTSPDVDLGDISGINASVVNIQKEIDRLNEVAKNLNESLIDLQELGKYEQYIKGGGGSDIIKLLNEQVNKEMQSSNLYMSMSSWCYTHSLDGAGLFLFDHAAEEYEHAKKLIIFLNENNVPVQLTSISAPEHKFEGLTQIFQKAYEHEQHISESINNIVDHAIKSKDHATFNFLQWYVAEQHEEEVLFKDILDKIELIGNENHGLYLADQYVKGIAKSRKS

SEQ ID NO: 4966 - protein, 1379 aa, Artificial Sequence
  SARS-CoV-2/Wuhan/HBCDC-HB-01/2019__EPI_ISL_402132 spike protein (1-1211)(I712C_T1077C) Ferritin construct
MFVFLVLLPLVSSQCVNLTTRTQLPPAYTNSITRGVYYPDKVFRSSVLHSTQDLFLPFFSNVTWFHAIHVSGTNGTKRFDNPVLPFNDGVYFASTEKSNIIRGWIFGTTLDSKTQSLLIVNNATNVVIKVCEFQFCNDPFLGVYYHKNNKSWMESEFRVYSSANNCTFEYVSQPFLMDLEGKQGNFKNLREFVFKNIDGYFKIYSKHTPINLVRDLPQGFSALEPLVDLPIGINITRFQTLLALHRSYLTPGDSSSGWTAGAAAYYVGYLQPRTFLLKYNENGTITDAVDCALDPLSETKCTLKSFTVEKGIYQTSNFRVQPTESIVRFPNITNLCPFGEVFNATRFASVYAWNRKRISNCVADYSVLYNSASFSTFKCYGVSPTKLNDLCFTNVYADSFVIRGDEVRQIAPGQTGKIADYNYKLPDDFTGCVIAWNSNNLDSKVGGNYNYLYRLFRKSNLKPFERDISTEIYQAGSTPCNGVEGFNCYFPLQSYGFQPTNGVGYQPYRVVVLSFELLHAPATVCGPKKSTNLVKNKCVNFNFNGLTGTGVLTESNKKFLPFQQFGRDIADTTDAVRDPQTLEILDITPCSFGGVSVITPGTNTSNQVAVLYQDVNCTEVPVAIHADQLTPTWRVYSTGSNVFQTRAGCLIGAEHVNNSYECDIPIGAGICASYQTQTNSPRRARSVASQSIIAYTMSLGAENSVAYSNNSCAIPTNFTISVTTEILPVSMTKTSVDCTMYICGDSTECSNLLLQYGSFCTQLNRALTGIAVEQDKNTQEVFAQVKQIYKTPPIKDFGGFNFSQILPDPSKPSKRSFIEDLLFNKVTLADAGFIKQYGDCLGDIAARDLICAQKFNGLTVLPPLLTDEMIAQYTSALLAGTITSGWTFGAGAALQIPFAMQMAYRFNGIGVTQNVLYENQKLIANQFNSAIGKIQDSLSSTASALGKLQDVVNQNAQALNTLVKQLSSNFGAISSVLNDILSRLDKVEAEVQIDRLITGRLQSLQTYVTQQLIRAAEIRASANLAATKMSECVLGQSKRVDFCGKGYHLMSFPQSAPHGVVFLHVTYVPAQEKNFTCAPAICHDGKAHFPREGVFVSNGTHWFVTQRNFYEPQIITTDNTFVSGNCDVVIGIVNNTVYDPLQPELDSFKEELDKYFKNHTSPDVDLGDISGINASVVNIQKEIDRLNEVAKNLNESLIDLQELGKYEQYIKGGGGSDIIKLLNEQVNKEMQSSNLYMSMSSWCYTHSLDGAGLFLFDHAAEEYEHAKKLIIFLNENNVPVQLTSISAPEHKFEGLTQIFQKAYEHEQHISESINNIVDHAIKSKDHATFNFLQWYVAEQHEEEVLFKDILDKIELIGNENHGLYLADQYVKGIAKSRKS

SEQ ID NO: 4967 - protein, 1379 aa, Artificial Sequence
  SARS-CoV-2/Guangdong/20SF028/2020__EPI_ISL_403936 spike protein (1-1211)(I712C_T1077C) Ferritin construct
MFVFLVLLPLVSSQCVNLTTRTQLPPAYTNSFTRGVYYPDKVFRSSVLYSTQDLFLPFFSNVTWFHAIHVSGTNGTKRFDNPVLPFNDGVYFASTEKSNIIRGWIFGTTLDSKTQSLLIVNNATNVVIKVCEFQFCNDPFLGVYYHKNNKSWMESEFRVYSSANNCTFEYVSQPFLMDLEGKQGNFKNLREFVFKNIDGYFKIYSKHTPINLVRDLPQGFSALEPLVDLPIGINITRFQTLLALHRSYLTPGDSSSGWTAGAAAYYVGYLQPRTFLLKYNENGTITDAVDCALDPLSETKCTLKSFTVEKGIYQTSNFRVQPTESIVRFPNITNLCPFGEVFNATRFASVYAWNRKRISNCVADYSVLYNSASFSTFKCYGVSPTKLNDLCFTNVYADSFVIRGDEVRQIAPGQTGKIADYNYKLPDDFTGCVIAWNSNNLDSKVGGNYNYLYRLFRKSNLKPFERDISTEIYQAGSTPCNGVEGFNCYFPLQSYGFQPTNGVGYQPYRVVVLSFELLHAPATVCGPKKSTNLVKNKCVNFNFNGLTGTGVLTESNKKFLPFQQFGRDIADTTDAVRDPQTLEILDITPCSFGGVSVITPGTNTSNQVAVLYQDVNCTEVPVAIHADQLTPTWRVYSTGSNVFQTRAGCLIGAEHVNNSYECDIPIGAGICASYQTQTNSPRRARSVASQSIIAYTMSLGAENSVAYSNNSCAIPTNFTISVTTEILPVSMTKTSVDCTMYICGDSTECSNLLLQYGSFCTQLNRALTGIAVEQDKNTQEVFAQVKQIYKTPPIKDFGGFNFSQILPDPSKPSKRSFIEDLLFNKVTLADAGFIKQYGDCLGDIAARDLICAQKFNGLTVLPPLLTDEMIAQYTSALLAGTITSGWTFGAGAALQIPFAMQMAYRFNGIGVTQNVLYENQKLIANQFNSAIGKIQDSLSSTASALGKLQDVVNQNAQALNTLVKQLSSNFGAISSVLNDILSRLDKVEAEVQIDRLITGRLQSLQTYVTQQLIRAAEIRASANLAATKMSECVLGQSKRVDFCGKGYHLMSFPQSAPHGVVFLHVTYVPAQEKNFTCAPAICHDGKAHFPREGVFVSNGTHWFVTQRNFYEPQIITTDNTFVSGNCDVVIGIVNNTVYDPLQPELDSFKEELDKYFKNHTSPDVDLGDISGINASVVNIQKEIDRLNEVAKNLNESLIDLQELGKYEQYIKGGGGSDIIKLLNEQVNKEMQSSNLYMSMSSWCYTHSLDGAGLFLFDHAAEEYEHAKKLIIFLNENNVPVQLTSISAPEHKFEGLTQIFQKAYEHEQHISESINNIVDHAIKSKDHATFNFLQWYVAEQHEEEVLFKDILDKIELIGNENHGLYLADQYVKGIAKSRKS

SEQ ID NO: 4968 - protein, 1379 aa, Artificial Sequence
  SARS-CoV-2/Shenzhen/SZTH-001/2020__EPI_ISL_406592 spike protein (1-1211)(I712C_T1077C) Ferritin construct
MFVFLVLLPLVSSQCVNLTTRTQLPPAYTNSFTRGVYYPDKVFRSSVLHSTQDLFLPFFSNVTWFHAIHVSGTNGTKRFDNPVLPFNDGVYFASTEKSNIIRGWIFGTTLDSKTQSLLIVNNATNVVIKVCEFQFCNDPFLGVYYHKNNKSWMESEFRVYSSANNCTFEYVSQPFLMDLEGKQGNFKNLREFVFKNIDGYFKIYSKHTPINLVRDLPQGFSALEPLVDLPIGINITRFQTLLALHRSYLTPGDSSSGWTAGAAAYYVGYLQPRTFLLKYNENGTITDAVDCALDPLSETKCTLKSFTVEKGIYQTSNFRVQPTESIVRFPNITNLCPFGEVFNATRFASVYAWNRKRISNCVADYSVLYNSASFSTFKCYGVSPTKLNDLCFTNVYADSFVIRGDEVRQIAPGQTGKIADYNYKLPDDFTGCVIAWNSNNLDSKVGGNYNYLYRLFRKSNLKPFERDISTEIYQAGSTPCNGVEGFNCYFPLQSYGFQPTNGVGYQPYRVVVLSFELLHAPATVCGPKKSTNLVKNKCVNFNFNGLTGTGVLTESNKKFLPFQQFGRDIADTTDAVRDPQTLEILDITPCSFGGVSVITPGTNTSNQVAVLYQDVNCTEVPVAIHADQLTPTWRVYSTGSNVFQTRAGCLIGAEHVNNSYECDIPIGAGICASYQTQTNSPRRARSVASQSIIAYTMSLGAENSVAYSNNSCAIPTNFTISVTTEILPVSMTKTSVDCTMYICGDSTECSNLLLQYGSFCTQLNRALTGIAVEQDKNTQEVFAQVKQIYKTPPIKDFGGFNFSQILPDPSKPSKRSFIEDLLFNKVTLADAGFIKQYGDCLGDIAARDLICAQKFNGLTVLPPLLTDEMIAQYTSALLAGTITSGWTFGAGAALQIPFAMQMAYRFNGIGVTQNVLYENQKLIANQFNSAIGKIQDSLSSTASALGKLQDVVNQNAQALNTLVKQLSSNFGAISSVLNDILSRLDKVEAEVQIDRLITGRLQSLQTYVTQQLIRAAEIRASANLAATKMSECVLGQSKRVDFCGKGYHLMSFPQSAPHGVVFLHVTYVPAQEKNFTCAPAICHDGKAHFPREGVFVSNGTHWFVTQRNFYEPQIITTDNTFVSGNCDVLIGIVNNTVYDPLQPELDSFKEELDKYFKNHTSPDVDLGDISGINASVVNIQKEIDRLNEVAKNLNESLIDLQELGKYEQYIKGGGGSDIIKLLNEQVNKEMQSSNLYMSMSSWCYTHSLDGAGLFLFDHAAEEYEHAKKLIIFLNENNVPVQLTSISAPEHKFEGLTQIFQKAYEHEQHISESINNIVDHAIKSKDHATFNFLQWYVAEQHEEEVLFKDILDKIELIGNENHGLYLADQYVKGIAKSRKS

SEQ ID NO: 4969 - protein, 1379 aa, Artificial Sequence
  SARS-CoV-2/Shenzhen/SZTH-004/2020__EPI_ISL_406595 spike protein (1-1211)(I712C_T1077C) Ferritin construct
MFVFLVLLPLVSSQCVNLTTRTQLPPAYTNSFTRGVYYPDKVFRSSVLHSTQDLFLPFFSNVTWFHAIHVSGTNGTKRFDNPVLPFNDGVYFASTEKSNIIRGWIFGTTLDSKTQSLLIVNNATNVVIKVCEFQFCNDPFLGVYYHKNNKSWMESEFRVYSSANNCTFEYVSQPFLMDLEGKQGNFKNLREFVFKNIDGYFKIYSKHTPINLVRDLPQGFSALEPLVDLPIGINITRFQTLLALHRSYLTPGDSSSGWTAGAAAYYVGYLQPRTFLLKYNENGTITDAVDCALDPLSETKCTLKSFTVEKGIYQTSNFRVQPTESIVRFPNITNLCPFGEVFNATRFASVYAWDRKRISNCVAYYSVLYNSASFSTFKCYGVSPTKLNDLCFTNVYADSFVIRGDEVRQIAPGQTGKIADYNYKLPDDFTGCVIAWNSNNLDSKVGGNYNYLYRLFRKSNLKPFERDISTEIYQAGSTPCNGVEGFNCYFPLQSYGFQPTNGVGYQPYRVVVLSFELLHAPATVCGPKKSTNLVKNKCVNFNFNGLTGTGVLTESNKKFLPFQQFGRDIADTTDAVRDPQTLEILDITPCSFGGVSVITPGTNTSNQVAVLYQDVNCTEVPVAIHADQLTPTWRVYSTGSNVFQTRAGCLIGAEHVNNSYECDIPIGAGICASYQTQTNSPRRARSVASQSIIAYTMSLGAENSVAYSNNSCAIPTNFTISVTTEILPVSMTKTSVDCTMYICGDSTECSNLLLQYGSFCTQLNRALTGIAVEQDKNTQEVFAQVKQIYKTPPIKDFGGFNFSQILPDPSKPSKRSFIEDLLFNKVTLADAGFIKQYGDCLGDIAARDLICAQKFNGLTVLPPLLTDEMIAQYTSALLAGTITSGWTFGAGAALQIPFAMQMAYRFNGIGVTQNVLYENQKLIANQFNSAIGKIQDSLSSTASALGKLQDVVNQNAQALNTLVKQLSSNFGAISSVLNDILSRLDKVEAEVQIDRLITGRLQSLQTYVTQQLIRAAEIRASANLAATKMSECVLGQSKRVDFCGKGYHLMSFPQSAPHGVVFLHVTYVPAQEKNFTCAPAICHDGKAHFPREGVFVSNGTHWFVTQRNFYEPQIITTDNTFVSGNCDVVIGIVNNTVYDPLQPELDSFKEELDKYFKNHTSPDVDLGDISGINASVVNIQKEIDRLNEVAKNLNESLIDLQELGKYEQYIKGGGGSDIIKLLNEQVNKEMQSSNLYMSMSSWCYTHSLDGAGLFLFDHAAEEYEHAKKLIIFLNENNVPVQLTSISAPEHKFEGLTQIFQKAYEHEQHISESINNIVDHAIKSKDHATFNFLQWYVAEQHEEEVLFKDILDKIELIGNENHGLYLADQYVKGIAKSRKS

SEQ ID NO: 4970 - protein, 1379 aa, Artificial Sequence
  SARS-CoV-2/France/IDF0372/2020__EPI_ISL_406596 spike protein (1-1211)(I712C_T1077C) Ferritin construct
MFVFLVLLPLVSSQCVNLTTRTQLPPAYTNSFTRGVYYPDKVFRSSVLHSTQDLFLPFFSNVTWFHAIHVSGTNGTKRFDNPVLPFNDGVYFASTEKSNIIRGWIFGTTLDSKTQSLLIVNNATNVVIKVCEFQFCNDPFLGVYYHKNNKSWMESEFRVYSSANNCTFEYVSQPFLMDLEGKQGNFKNLREFVFKNIDGYFKIYSKHTPINLVRDLPQGFSALEPLVDLPIGINITRFQTLLALHRSYLTPGDSSSGWTAGAAAYYVGYLQPRTFLLKYNENGTITDAVDCALDPLSETKCTLKSFTVEKGIYQTSNFRVQPTESIVRFPNITNLCPFGEVFNATRFASVYAWNRKRISNCVADYSFLYNSASFSTFKCYGVSPTKLNDLCFTNVYADSFVIRGDEVRQIAPGQTGKIADYNYKLPDDFTGCVIAWNSNNLDSKVGGNYNYLYRLFRKSNLKPFERDISTEIYQAGSTPCNGVEGFNCYFPLQSYGFQPTNGVGYQPYRVVVLSFELLHAPATVCGPKKSTNLVKNKCVNFNFNGLTGTGVLTESNKKFLPFQQFGRDIADTTDAVRDPQTLEILDITPCSFGGVSVITPGTNTSNQVAVLYQDVNCTEVPVAIHADQLTPTWRVYSTGSNVFQTRAGCLIGAEHVNNSYECDIPIGAGICASYQTQTNSPRRARSVASQSIIAYTMSLGAENSVAYSNNSCAIPTNFTISVTTEILPVSMTKTSVDCTMYICGDSTECSNLLLQYGSFCTQLNRALTGIAVEQDKNTQEVFAQVKQIYKTPPIKDFGGFNFSQILPDPSKPSKRSFIEDLLFNKVTLADAGFIKQYGDCLGDIAARDLICAQKFNGLTVLPPLLTDEMIAQYTSALLAGTITSGWTFGAGAALQIPFAMQMAYRFNGIGVTQNVLYENQKLIANQFNSAIGKIQDSLSSTASALGKLQDVVNQNAQALNTLVKQLSSNFGAISSVLNDILSRLDKVEAEVQIDRLITGRLQSLQTYVTQQLIRAAEIRASANLAATKMSECVLGQSKRVDFCGKGYHLMSFPQSAPHGVVFLHVTYVPAQEKNFTCAPAICHDGKAHFPREGVFVSNGTHWFVTQRNFYEPQIITTDNTFVSGNCDVVIGIVNNTVYDPLQPELDSFKEELDKYFKNHTSPDVDLGDISGINASVVNIQKEIDRLNEVAKNLNESLIDLQELGKYEQYIKGGGGSDIIKLLNEQVNKEMQSSNLYMSMSSWCYTHSLDGAGLFLFDHAAEEYEHAKKLIIFLNENNVPVQLTSISAPEHKFEGLTQIFQKAYEHEQHISESINNIVDHAIKSKDHATFNFLQWYVAEQHEEEVLFKDILDKIELIGNENHGLYLADQYVKGIAKSRKS

SEQ ID NO: 4971 - protein, 1379 aa, Artificial Sequence
  SARS-CoV-2/Australia/VIC01/2020__EPI_ISL_406844 spike protein (1-1211)(I712C_T1077C) Ferritin construct
MFVFLVLLPLVSSQCVNLTTRTQLPPAYTNSFTRGVYYPDKVFRSSVLHSTQDLFLPFFSNVTWFHAIHVSGTNGTKRFDNPVLPFNDGVYFASTEKSNIIRGWIFGTTLDSKTQSLLIVNNATNVVIKVCEFQFCNDPFLGVYYHKNNKSWMESEFRVYSSANNCTFEYVSQPFLMDLEGKQGNFKNLREFVFKNIDGYFKIYSKHTPINLVRDLPQGFSALEPLVDLPIGINITRFQTLLALHRRYLTPGDSSSGWTAGAAAYYVGYLQPRTFLLKYNENGTITDAVDCALDPLSETKCTLKSFTVEKGIYQTSNFRVQPTESIVRFPNITNLCPFGEVFNATRFASVYAWNRKRISNCVADYSVLYNSASFSTFKCYGVSPTKLNDLCFTNVYADSFVIRGDEVRQIAPGQTGKIADYNYKLPDDFTGCVIAWNSNNLDSKVGGNYNYLYRLFRKSNLKPFERDISTEIYQAGSTPCNGVEGFNCYFPLQSYGFQPTNGVGYQPYRVVVLSFELLHAPATVCGPKKSTNLVKNKCVNFNFNGLTGTGVLTESNKKFLPFQQFGRDIADTTDAVRDPQTLEILDITPCSFGGVSVITPGTNTSNQVAVLYQDVNCTEVPVAIHADQLTPTWRVYSTGSNVFQTRAGCLIGAEHVNNSYECDIPIGAGICASYQTQTNSPRRARSVASQSIIAYTMSLGAENSVAYSNNSCAIPTNFTISVTTEILPVSMTKTSVDCTMYICGDSTECSNLLLQYGSFCTQLNRALTGIAVEQDKNTQEVFAQVKQIYKTPPIKDFGGFNFSQILPDPSKPSKRSFIEDLLFNKVTLADAGFIKQYGDCLGDIAARDLICAQKFNGLTVLPPLLTDEMIAQYTSALLAGTITSGWTFGAGAALQIPFAMQMAYRFNGIGVTQNVLYENQKLIANQFNSAIGKIQDSLSSTASALGKLQDVVNQNAQALNTLVKQLSSNFGAISSVLNDILSRLDKVEAEVQIDRLITGRLQSLQTYVTQQLIRAAEIRASANLAATKMSECVLGQSKRVDFCGKGYHLMSFPQSAPHGVVFLHVTYVPAQEKNFTCAPAICHDGKAHFPREGVFVSNGTHWFVTQRNFYEPQIITTDNTFVSGNCDVVIGIVNNTVYDPLQPELDSFKEELDKYFKNHTSPDVDLGDISGINASVVNIQKEIDRLNEVAKNLNESLIDLQELGKYEQYIKGGGGSDIIKLLNEQVNKEMQSSNLYMSMSSWCYTHSLDGAGLFLFDHAAEEYEHAKKLIIFLNENNVPVQLTSISAPEHKFEGLTQIFQKAYEHEQHISESINNIVDHAIKSKDHATFNFLQWYVAEQHEEEVLFKDILDKIELIGNENHGLYLADQYVKGIAKSRKS

SEQ ID NO: 4972 - protein, 1379 aa, Artificial Sequence
  SARS-CoV-2/Germany/BavPat1/2020__EPI_ISL_406862 spike protein (1-1211)(I712C_T1077C) Ferritin construct
MFVFLVLLPLVSSQCVNLTTRTQLPPAYTNSFTRGVYYPDKVFRSSVLHSTQDLFLPFFSNVTWFHAIHVSGTNGTKRFDNPVLPFNDGVYFASTEKSNIIRGWIFGTTLDSKTQSLLIVNNATNVVIKVCEFQFCNDPFLGVYYHKNNKSWMESEFRVYSSANNCTFEYVSQPFLMDLEGKQGNFKNLREFVFKNIDGYFKIYSKHTPINLVRDLPQGFSALEPLVDLPIGINITRFQTLLALHRSYLTPGDSSSGWTAGAAAYYVGYLQPRTFLLKYNENGTITDAVDCALDPLSETKCTLKSFTVEKGIYQTSNFRVQPTESIVRFPNITNLCPFGEVFNATRFASVYAWNRKRISNCVADYSVLYNSASFSTFKCYGVSPTKLNDLCFTNVYADSFVIRGDEVRQIAPGQTGKIADYNYKLPDDFTGCVIAWNSNNLDSKVGGNYNYLYRLFRKSNLKPFERDISTEIYQAGSTPCNGVEGFNCYFPLQSYGFQPTNGVGYQPYRVVVLSFELLHAPATVCGPKKSTNLVKNKCVNFNFNGLTGTGVLTESNKKFLPFQQFGRDIADTTDAVRDPQTLEILDITPCSFGGVSVITPGTNTSNQVAVLYQGVNCTEVPVAIHADQLTPTWRVYSTGSNVFQTRAGCLIGAEHVNNSYECDIPIGAGICASYQTQTNSPRRARSVASQSIIAYTMSLGAENSVAYSNNSCAIPTNFTISVTTEILPVSMTKTSVDCTMYICGDSTECSNLLLQYGSFCTQLNRALTGIAVEQDKNTQEVFAQVKQIYKTPPIKDFGGFNFSQILPDPSKPSKRSFIEDLLFNKVTLADAGFIKQYGDCLGDIAARDLICAQKFNGLTVLPPLLTDEMIAQYTSALLAGTITSGWTFGAGAALQIPFAMQMAYRFNGIGVTQNVLYENQKLIANQFNSAIGKIQDSLSSTASALGKLQDVVNQNAQALNTLVKQLSSNFGAISSVLNDILSRLDKVEAEVQIDRLITGRLQSLQTYVTQQLIRAAEIRASANLAATKMSECVLGQSKRVDFCGKGYHLMSFPQSAPHGVVFLHVTYVPAQEKNFTCAPAICHDGKAHFPREGVFVSNGTHWFVTQRNFYEPQIITTDNTFVSGNCDVVIGIVNNTVYDPLQPELDSFKEELDKYFKNHTSPDVDLGDISGINASVVNIQKEIDRLNEVAKNLNESLIDLQELGKYEQYIKGGGGSDIIKLLNEQVNKEMQSSNLYMSMSSWCYTHSLDGAGLFLFDHAAEEYEHAKKLIIFLNENNVPVQLTSISAPEHKFEGLTQIFQKAYEHEQHISESINNIVDHAIKSKDHATFNFLQWYVAEQHEEEVLFKDILDKIELIGNENHGLYLADQYVKGIAKSRKS

SEQ ID NO: 4973 - protein, 1379 aa, Artificial Sequence
  SARS-CoV-2/Wuhan/HBCDC-HB-02/2020__EPI_ISL_412978 spike protein (1-1211)(I712C_T1077C) Ferritin construct
MFVFLVLLPLVSSQCVNLTTRTQLPPAYTNSFTRGVYYPDKVFRSSVLHSTQDLFLPFFSNVTWFHAIHVSGTNGTKRFDNPVLPFNDGVYFASTEKSNIIRGWIFGTTLDSKTQSLLIVNNATNVVIKVCEFQFCNDPFLGVYYHKNNKSWMESEFRVYSSANNCTFEYVSQPFLMDLEGKQGNFKNLREFVFKNIDGYFKIYSKHTPINLVRDLPQGFSALEPLVDLPIGINITRFQTLLALHRSYLTPGDSSSGWTAGAAAYYVGYLQPRTFLLKYNENGTITDAVDCALDPLSETKCTLKSFTVEKGIYQTSNFRVQPTESIVRFPNITNLCPFGEVFNATRFASVYAWNRKRISNCVADYSVLYNSASFSTFKCYGVSPTKLNDLCFTNVYADSFVIRGDEVRQIAPGQTGKIADYNYKLPDDFTGCVIAWNSNNLDSKVGGNYNYLYRLFRKSNLKPFERDISTEIYQAGSTPCNGVEGFNCYFPLQSYGFQPTNGVGYQPYRVVVLSFELLHAPATVCGPKKSTNLVKNKCVNFNFNGLTGTGVLTESNKKFLPFQQFGRDIADTTDAVRDPQTLEILDITPCSFGGVSVITPGTNTSNQVAVLYQDVNCTEVPVAIHADQLTPTWRVYSTGSNVFQTRAGCLIGAEHVNNSYECDIPIGAGICASYQTQTNSPRRARSVASQSIIAYTMSLGAENSVAYSNNSCAIPTNFTISVTTEILPVSMTKTSVDCTMYICGDSTECSNFLLQYGSFCTQLNRALTGIAVEQDKNTQEVFAQVKQIYKTPPIKDFGGFNFSQILPDPSKPSKRSFIEDLLFNKVTLADAGFIKQYGDCLGDIAARDLICAQKFNGLTVLPPLLTDEMIAQYTSALLAGTITSGWTFGAGAALQIPFAMQMAYRFNGIGVTQNVLYENQKLIANQFNSAIGKIQDSLSSTASALGKLQDVVNQNAQALNTLVKQLSSNFGAISSVLNDILSRLDKVEAEVQIDRLITGRLQSLQTYVTQQLIRAAEIRASANLAATKMSECVLGQSKRVDFCGKGYHLMSFPQSAPHGVVFLHVTYVPAQEKNFTCAPAICHDGKAHFPREGVFVSNGTHWFVTQRNFYEPQIITTDNTFVSGNCDVVIGIVNNTVYDPLQPELDSFKEELDKYFKNHTSPDVDLGDISGINASVVNIQKEIDRLNEVAKNLNESLIDLQELGKYEQYIKGGGGSDIIKLLNEQVNKEMQSSNLYMSMSSWCYTHSLDGAGLFLFDHAAEEYEHAKKLIIFLNENNVPVQLTSISAPEHKFEGLTQIFQKAYEHEQHISESINNIVDHAIKSKDHATFNFLQWYVAEQHEEEVLFKDILDKIELIGNENHGLYLADQYVKGIAKSRKS

SEQ ID NO: 4974 - protein, 1379 aa, Artificial Sequence
  SARS-CoV-2/Australia/QLD02/2020__EPI_ISL_407896 spike protein (1-1211)(I712C_T1077C) Ferritin construct
MFVFLVLLPLVSSQCVNLTTRTQLPPAYTNSFTRGVYYPDKVFRSSVLHSTQDLFLPFFSNVTWFHAIHVSGTNGTKRFDNPVLPFNDGVYFASTEKSNIIRGWIFGTTLDSKTQSLLIVNNATNVVIKVCEFQFCNDPFLGVYYHKNNKSWMESEFRVYSSANNCTFEYVSQPFLMDLEGKQGNFKNLREFVFKNIDGYFKIYSKHTPINLVRDLPQGFSALEPLVDLPIGINITRFQTLLALHRSYLTPGDSSSGWTAGAAAYYVGYLQPRTFLLKYNENGTITDAVDCALDPLSETKCTLKSFTVEKGIYQTSNFRVQPTESIVRFPNITNLCPFGEVFNATRFASVYAWNRKRISNCVADYSVLYNSASFSTFKCYGVSPTKLNDLCFTNVYADSFVIRGDEVRQIAPGQTGKIADYNYKLPDDFTGCVIAWNSNNLDSKVGGNYNYLYRLFRKSNLKPFERDISTEIYQAGSTPCNGVEGFNCYFPLQSYGFQPTNGVGYQPYRVVVLSFELLHAPATVCGPKKSTNLVKNKCVNFNFNGLTGTGVLTESNKKFLPFQQFGRDIADTTDAVRDPQTLEILDITPCSFGGVSVITPGTNTSNQVAVLYQDVNCTEVPVAIHADQLTPTWRVYSTGSNVFQTRAGCLIGAEHVNNSYECDIPIGAGICASYQTQTNSPRRARSVASQSIIAYTMSLGAENSVAYSNNSCAIPTNFTISVTTEILPVSMTKTSVDCTMYICGDSTECSNLLLQYGSFCTQLNRALTGIAVEQDKNTQEVFAQVKQIYKTPPIKDFGGFNFSQILPDPSKPSKRSFIEDLLFNKVTLADAGFIKQYGDCLGDIAARDLICAQKFNGLTVLPPLLTDEMIAQYTSALLAGTITSGWTFGAGAALQIPFAMQMAYRFNGIGVTQNVLYENQKLIANQFNSAIGKIQDSLSSTASALGKLQDVVNQNAQALNTLVKQLSSNFGAISSVLNDILSRLDKVEAEVQIDRLITGRLQSLQTYVTQQLIRAAEIRASANLAATKMSECVLGQSKRVDFCGKGYHLMSFPQSAPHGVVFLHVTYVPAQEKNFTCAPAICHDGKAHFPREGVFVSNGTHWFVTQRNFYEPQIITTDNTFVSGNCDVVIGIVNNTVYDPLQLELDSFKEELDKYFKNHTSPDVDLGDISGINASVVNIQKEIDRLNEVAKNLNESLIDLQELGKYEQYIKGGGGSDIIKLLNEQVNKEMQSSNLYMSMSSWCYTHSLDGAGLFLFDHAAEEYEHAKKLIIFLNENNVPVQLTSISAPEHKFEGLTQIFQKAYEHEQHISESINNIVDHAIKSKDHATFNFLQWYVAEQHEEEVLFKDILDKIELIGNENHGLYLADQYVKGIAKSRKS

SEQ ID NO: 4975 - protein, 1379 aa, Artificial Sequence
  SARS-CoV-2/India/1-31/2020__EPI_ISL_413523 spike protein (1-1211)(I712C_T1077C) Ferritin construct
MFVFLVLLPLVSSQCVNLTTRTQLPPAYTNSFTRGVYYPDKVFRSSVLHSTQDLFLPFFSNVTWFHAIHVSGTNGTKRFDNPVLPFNDGVYFASTEKSNIIRGWIFGTTLDSKTQSLLIVNNATNVVIKVCEFQFCNDPFLGVYYHKNNKSWMESEFRVYSSANNCTFEYVSQPFLMDLEGKQGNFKNLREFVFKNIDGYFKIYSKHTPINLVRDLPQGFSALEPLVDLPIGINITRFQTLLALHRSYLTPGDSSSGWTAGAAAYYVGYLQPRTFLLKYNENGTITDAVDCALDPLSETKCTLKSFTVEKGIYQTSNFRVQPTESIVRFPNITNLCPFGEVFNATRFASVYAWNRKRISNCVADYSVLYNSASFSTFKCYGVSPTKLNDLCFTNVYADSFVIRGDEVRQIAPGQTGKIADYNYKLPDDFTGCVIAWNSNNLDSKVGGNYNYLYRLFRKSNLKPFERDISTEIYQAGSTPCNGVEGFNCYFPLQSYGFQPTNGVGYQPYRVVVLSFELLHAPATVCGPKKSTNLVKNKCVNFNFNGLTGTGVLTESNKKFLPFQQFGRDIADTTDAVRDPQTLEILDITPCSFGGVSVITPGTNTSNQVAVLYQDVNCTEVPVAIHADQLTPTWRVYSTGSNVFQTRAGCLIGAEHVNNSYECDIPIGAGICASYQTQTNSPRRARSVASQSIIAYTMSLGAENSVAYSNNSCAIPTNFTISVTTEILPVSMTKTSVDCTMYICGDSTECSNLLLQYGSFCTQLNRALTGIAVEQDKNTQEVFAQVKQIYKTPPIKDFGGFNFSQILPDPSKPSKRSFIEDLLFNKVTLADAGFIKQYGDCLGDIAARDLICAQKFNGLTVLPPLLTDEMIAQYTSALLAGTITSGWTFGAGAALQIPFAMQMAYRFNGIGVTQNVLYENQKLIANQFNSVIGKIQDSLSSTASALGKLQDVVNQNAQALNTLVKQLSSNFGAISSVLNDILSRLDKVEAEVQIDRLITGRLQSLQTYVTQQLIRAAEIRASANLAATKMSECVLGQSKRVDFCGKGYHLMSFPQSAPHGVVFLHVTYVPAQEKNFTCAPAICHDGKAHFPREGVFVSNGTHWFVTQRNFYEPQIITTDNTFVSGNCDVVIGIVNNTVYDPLQPELDSFKEELDKYFKNHTSPDVDLGDISGINASVVNIQKEIDRLNEVAKNLNESLIDLQELGKYEQYIKGGGGSDIIKLLNEQVNKEMQSSNLYMSMSSWCYTHSLDGAGLFLFDHAAEEYEHAKKLIIFLNENNVPVQLTSISAPEHKFEGLTQIFQKAYEHEQHISESINNIVDHAIKSKDHATFNFLQWYVAEQHEEEVLFKDILDKIELIGNENHGLYLADQYVKGIAKSRKS

SEQ ID NO: 4976 - protein, 1379 aa, Artificial Sequence
  SARS-CoV-2/Guangdong/GD2020087-P0008/2020__EPI_ISL_413863 spike protein (1-1211)(I712C_T1077C) Ferritin construct
MFVFLVLLPLVSSQCVNLTTRTQLPPAYTNSFTRGVYYPDKVFRSSVLHSTQDLFLPFFSNVTWFHAIHVSGTNGTKRFDNPVLPFNDGVYFASTEKSNIIRGWIFGTTLDSKTQSLLIVNNATNVVIKVCEFQFCNDPFLGVYYHKNNKSWMESEFRVYSSANNCTFEYVSQPFLMDLEGKQGNFKNLREFVFKNIDGYFKIYSKHTPINLVRDLPQGFSALEPLVDLPIGINITRFQTLLALHRSYLTPGDSSSGWTAGAAAYYVGYLQPRTFLLKYNENGTITDAVDCALDPLSETKCTLKSFTVEKGIYQTSNFRVQPTESIVRFPNITNLCPFGEVFNATRFASVYAWNRKRISNCVADYSVLYNSASFSTFKCYGVSPTKLNDLCFTNVYADSFVIRGDEVREIAPGQTGKIADYNYKLPDDFTGCVIAWNSNNLDSKVGGNYNYLYRLFRKSNLKPFERDISTEIYQAGSTPCNGVEGFNCYFPLQSYGFQPTNGVGYQPYRVVVLSFELLHAPATVCGPKKSTNLVKNKCVNFNFNGLTGTGVLTESNKKFLPFQQFGRDIADTTDAVRDPQTLEILDITPCSFGGVSVITPGTNTSNQVAVLYQDVNCTEVPVAIHADQLTPTWRVYSTGSNVFQTRAGCLIGAEHVNNSYECDIPIGAGICASYQTQTNSPRRARSVASQSIIAYTMSLGAENSVAYSNNSCAIPTNFTISVTTEILPVSMTKTSVDCTMYICGDSTECSNLLLQYGSFCTQLNRALTGIAVEQDKNTQEVFAQVKQIYKTPPIKDFGGFNFSQILPDPSKPSKRSFIEDLLFNKVTLADAGFIKQYGDCLGDIAARDLICAQKFNGLTVLPPLLTDEMIAQYTSALLAGTITSGWTFGAGAALQIPFAMQMAYRFNGIGVTQNVLYENQKLIANQFNSAIGKIQDSLSSTASALGKLQDVVNQNAQALNTLVKQLSSNFGAISSVLNDILSRLDKVEAEVQIDRLITGRLQSLQTYVTQQLIRAAEIRASANLAATKMSECVLGQSKRVDFCGKGYHLMSFPQSAPHGVVFLHVTYVPAQEKNFTCAPAICHDGKAHFPREGVFVSNGTHWFVTQRNFYEPQIITTDNTFVSGNCDVVIGIVNNTVYDPLQPELDSFKEELDKYFKNHTSPDVDLGDISGINASVVNIQKEIDRLNEVAKNLNESLIDLQELGKYEQYIKGGGGSDIIKLLNEQVNKEMQSSNLYMSMSSWCYTHSLDGAGLFLFDHAAEEYEHAKKLIIFLNENNVPVQLTSISAPEHKFEGLTQIFQKAYEHEQHISESINNIVDHAIKSKDHATFNFLQWYVAEQHEEEVLFKDILDKIELIGNENHGLYLADQYVKGIAKSRKS

SEQ ID NO: 4977 - protein, 1379 aa, Artificial Sequence
  SARS-CoV-2/Sweden/01/2020__EPI_ISL_411951 spike protein (1-1211)(I712C_T1077C) Ferritin construct
MFVFLVLLPLVSSQCVNLTTRTQLPPAYTNSFTRGVYYPDKVFRSSVLHSTQDLFLPFFSNVTWFHAIHVSGTNGTKRFDNPVLPFNDGVYFASTEKSNIIRGWIFGTTLDSKTQSLLIVNNATNVVIKVCEFQFCNDPFLGVYYHKNNKSWMESEFRVYSSANNCTFEYVSQPFLMDLEGKQGNFKNLREFVFKNIDGYFKIYSKHTPINLVRDLPQGFSALEPLVDLPIGINITRFQTLLALHRSYLTPGDSSSGWTAGAAAYYVGYLQPRTFLLKYNENGTITDAVDCALDPLSETKCTLKSFTVEKGIYQTSNFRVQPTESIVRFPNITNLCPFGEVFNATRFASVYAWNRKRISNCVADYSVLYNSASFSTFKCYGVSPTKLNDLCFTNVYADSFVIRGDEVRQIAPGQTGKIADYNYKLPDDFTGCVIAWNSNNLDSKVGGNYNYLYRLFRKSNLKPFERDISTEIYQAGSTPCNGVEGFNCYFPLQSYGFQPTNGVGYQPYRVVVLSFELLHAPATVCGPKKSTNLVKNKCVNFNFNGLTGTGVLTESNKKFLPFQQFGRDIADTTDAVRDPQTLEILDITPCSFGGVSVITPGTNTSNQVAVLYQDVNCTEVPVAIHADQLTPTWRVYSTGSNVFQTRAGCLIGAEHVNNSYECDIPIGAGICASYQTQTNSPRRARSVASQSIIAYTMSLGAENSVAYSNNSCAIPTNFTISVTTEILPVSMTKTSVDCTMYICGDSTECSNLLLQYGSFCTQLNRALTGIAVEQDKNTQEVFAQVKQIYKTPPIKDCGGFNFSQILPDPSKPSKRSFIEDLLFNKVTLADAGFIKQYGDCLGDIAARDLICAQKFNGLTVLPPLLTDEMIAQYTSALLAGTITSGWTFGAGAALQIPFAMQMAYRFNGIGVTQNVLYENQKLIANQFNSAIGKIQDSLSSTASALGKLQDVVNQNAQALNTLVKQLSSNFGAISSVLNDILSRLDKVEAEVQIDRLITGRLQSLQTYVTQQLIRAAEIRASANLAATKMSECVLGQSKRVDFCGKGYHLMSFPQSAPHGVVFLHVTYVPAQEKNFTCAPAICHDGKAHFPREGVFVSNGTHWFVTQRNFYEPQIITTDNTFVSGNCDVVIGIVNNTVYDPLQPELDSFKEELDKYFKNHTSPDVDLGDISGINASVVNIQKEIDRLNEVAKNLNESLIDLQELGKYEQYIKGGGGSDIIKLLNEQVNKEMQSSNLYMSMSSWCYTHSLDGAGLFLFDHAAEEYEHAKKLIIFLNENNVPVQLTSISAPEHKFEGLTQIFQKAYEHEQHISESINNIVDHAIKSKDHATFNFLQWYVAEQHEEEVLFKDILDKIELIGNENHGLYLADQYVKGIAKSRKS

SEQ ID NO: 4978 - protein, 1379 aa, Artificial Sequence
  SARS-CoV-2/Tianmen/HBCDC-HB-07/2020__EPI_ISL_412983 spike protein (1-1211)(I712C_T1077C) Ferritin construct
MFVFLVLLPLVSSQCVNLTTRTQLPPAYTNSFTRGVYYPDKVFRSSVLHSTQDLFLPFFSNVTWFHAIHVSGTNGTKRFDNPVLPFNDGVYFASTEKSNIIRGWIFGTTLDSKTQSLLIVNNATNVVIKVCEFQFCNDPFLGVYYHKNNKSWMESEFRVYSSANNCTFEYVSQPFLMDLEGKQGNFKNLREFVFKNIDGYFKIYSKHTPINLVRDLPQGFSALEPLVDLPIGINITRFQTLLALHRSYLTPGDSSSGWTAGAAAYYVGYLQPRTFLLKYNENGTITDAVDCALDPLSETKCTLKSFTVEKGIYQTSNFRVQPTESIVRFPNITNLCPFGEVFNATRFASVYAWNRKRISNCVADYSVLYNSASFSTFKCYGVSPTKLNDLCFTNVYADSFVIRGDEVRQIAPGQTGKIADYNYKLPDDFTGCVIAWNSNNLDSKVGGNYNYLYRLFRKSNLKPFERDISTEIYQAGSTPCNGVEGFNCYFPLQSYGFQPTNGVGYQPYRVVVLSFELLHAPATVCGPKKSTNLVKNKCVNFNFNGLTGTGVLTESNKKFLPFQQFGRDIADTTDAVRDPQTLEILDITPCSFGGVSVITPGTNTSNQVAVLYQDLNCTEVPVAIHADQLTPTWRVYSTGSNVFQTRAGCLIGAEHVNNSYECDIPIGAGICASYQTQTNSPRRARSVASQSIIAYTMSLGAENSVAYSNNSCAIPTNFTISVTTEILPVSMTKTSVDCTMYICGDSTECSNLLLQYGSFCTQLNRALTGIAVEQDKNTQEVFAQVKQIYKTPPIKDFGGFNFSQILPDPSKPSKRSFIEDLLFNKVTLADAGFIKQYGDCLGDIAARDLICAQKFNGLTVLPPLLTDEMIAQYTSALLAGTITSGWTFGAGAALQIPFAMQMAYRFNGIGVTQNVLYENQKLIANQFNSAIGKIQDSLSSTASALGKLQDVVNQNAQALNTLVKQLSSNFGAISSVLNDILSRLDKVEAEVQIDRLITGRLQSLQTYVTQQLIRAAEIRASANLAATKMSECVLGQSKRVDFCGKGYHLMSFPQSAPHGVVFLHVTYVPAQEKNFTCAPAICHDGKAHFPREGVFVSNGTHWFVTQRNFYEPQIITTDNTFVSGNCDVVIGIVNNTVYDPLQPELDSFKEELDKYFKNHTSPDVDLGDISGINASVVNIQKEIDRLNEVAKNLNESLIDLQELGKYEQYIKGGGGSDIIKLLNEQVNKEMQSSNLYMSMSSWCYTHSLDGAGLFLFDHAAEEYEHAKKLIIFLNENNVPVQLTSISAPEHKFEGLTQIFQKAYEHEQHISESINNIVDHAIKSKDHATFNFLQWYVAEQHEEEVLFKDILDKIELIGNENHGLYLADQYVKGIAKSRKS

SEQ ID NO: 4979 - protein, 1379 aa, Artificial Sequence
  SARS-CoV-2/Hong Kong/case42_VM20002493/2020__EPI_ISL_414527 spike protein (1-1211)(I712C_T1077C) Ferritin construct
MFVFLVLLPLVSSQCVNLTTRTQLPPAYTNSFTRGVYYPDKVFRSSVLHSTQDLFLPFFSNVTWFHAIHVSGTNGTKRFDNPVLPFNDGVYFASTEKSNIIRGWIFGTTLDSKTQSLLIVNNATNVVIKVCEFQFCNDPFLGVYYHKNNKSWMESEFRVYSSANNCTFEYVSQPFLMDLEGKQGNFKNLREFVFKNIDGYFKIYSKHTPINLVRDLPQGFSALEPLVDLPIGINITRFQTLLALHRSYLTPGDSSSGWTAGAAAYYVGYLQPRTFLLKYNENGTITDAVDCALDPLSETKCTLKSFTVEKGIYQTSNFRVQPTESIVRFPNITNLCPFGEVFNATRFASVYAWNRKRISNCVADYSVLYNSASFSTFKCYGVSPTKLNDLCFTNVYADSFVIRGDEVRQIAPGQTGKIADYNYKLPDDFTGCVIAWNSNNLDSKVGGNYNYLYRLFRKSNLKPFERDISTEIYQAGSTPCNGVEGFNCYFPLQSYGFQPTNGVGYQPYRVVVLSFELLHAPATVCGPKKSTNLVKNKCVNFNFNGLTGTGVLTESNKKFLPFQQFGRDIADTTDAVRDPQTLEILDITPCSFGGVSVITPGTNTSNQVAVLYQDVNCTEVPVAIHADQLTPTWRVYSTGSNVFQTRAGCLIGAEHVNNSYECDIPIGAGICASYQTQTNSPRRARSVASQSIIAYTMSLGAENSVAYSNNSCAIPTNFAISVTTEILPVSMTKTSVDCTMYICGDSTECSNLLLQYGSFCTQLNRALTGIAVEQDKNTQEVFAQVKQIYKTPPIKDFGGFNFSQILPDPSKPSKRSFIEDLLFNKVTLADAGFIKQYGDCLGDIAARDLICAQKFNGLTVLPPLLTDEMIAQYTSALLAGTITSGWTFGAGAALQIPFAMQMAYRFNGIGVTQNVLYENQKLIANQFNSAIGKIQDSLSSTASALGKLQDVVNQNAQALNTLVKQLSSNFGAISSVLNDILSRLDKVEAEVQIDRLITGRLQSLQTYVTQQLIRAAEIRASANLAATKMSECVLGQSKRVDFCGKGYHLMSFPQSAPHGVVFLHVTYVPAQEKNFTCAPAICHDGKAHFPREGVFVSNGTHWFVTQRNFYEPQIITTDNTFVSGNCDVVIGIVNNTVYDPLQPELDSFKEELDKYFKNHTSPDVDLGDISGINASVVNIQKEIDRLNEVAKNLNESLIDLQELGKYEQYIKGGGGSDIIKLLNEQVNKEMQSSNLYMSMSSWCYTHSLDGAGLFLFDHAAEEYEHAKKLIIFLNENNVPVQLTSISAPEHKFEGLTQIFQKAYEHEQHISESINNIVDHAIKSKDHATFNFLQWYVAEQHEEEVLFKDILDKIELIGNENHGLYLADQYVKGIAKSRKS

SEQ ID NO: 4980 - protein, 1379 aa, Artificial Sequence
  SARS-CoV-2/USA/CruiseA-23/2020__EPI_ISL_414482 spike protein (1-1211)(I712C_T1077C) Ferritin construct
MFVFLVLLPLVSSQCVNLTTRTQLPPAYTNSFTRGVYYPDKVFRSSVLHSTQDLFLPFFSNVTWFHAIHVSGTNGTKRFDNPVLPFNDGVYFASTEKSNIIRGWIFGTTLDSKTQSLLIVNNATNVVIKVCEFQFCNDPFLGVYYHKNNKSWMESEFRVYSSANNCTFEYVSQPFLMDLEVKQGNFKNLREFVFKNIDGYFKIYSKHTPINLVRDLPQGFSALEPLVDLPIGINITRFQTLLALHRSYLTPGDSSSGWTAGAAAYYVGYLQPRTFLLKYNENGTITDAVDCALDPLSETKCTLKSFTVEKGIYQTSNFRVQPTESIVRFPNITNLCPFGEVFNATRFASVYAWNRKRISNCVADYSVLYNSASFSTFKCYGVSPTKLNDLCFTNVYADSFVIRGDEVRQIAPGQTGKIADYNYKLPDDFTGCVIAWNSNNLDSKVGGNYNYLYRLFRKSNLKPFERDISTEIYQAGSTPCNGVEGFNCYFPLQSYGFQPTNGVGYQPYRVVVLSFELLHAPATVCGPKKSTNLVKNKCVNFNFNGLTGTGVLTESNKKFLPFQQFGRDIADTTDAVRDPQTLEILDITPCSFGGVSVITPGTNTSNQVAVLYQDVNCTEVPVAIHADQLTPTWRVYSTGSNVFQTRAGCLIGAEHVNNSYECDIPIGAGICASYQTQTNSPRRARSVASQSIIAYTMSLGAENSVAYSNNSCAIPTNFTISVTTEILPVSMTKTSVDCTMYICGDSTECSNLLLQYGSFCTQLNRALTGIAVEQDKNTQEVFAQVKQIYKTPPIKDFGGFNFSQILPDPSKPSKRSFIEDLLFNKVTLADAGFIKQYGDCLGDIAARDLICAQKFNGLTVLPPLLTDEMIAQYTSALLAGTITSGWTFGAGAALQIPFAMQMAYRFNGIGVTQNVLYENQKLIANQFNSAIGKIQDSLSSTASALGKLQDVVNQNAQALNTLVKQLSSNFGAISSVLNDILSRLDKVEAEVQIDRLITGRLQSLQTYVTQQLIRAAEIRASANLAATKMSECVLGQSKRVDFCGKGYHLMSFPQSAPHGVVFLHVTYVPAQEKNFTCAPAICHDGKAHFPREGVFVSNGTHWFVTQRNFYEPQIITTDNTFVSGNCDVVIGIVNNTVYDPLQPELDSFKEELDKYFKNHTSPDVDLGDISGINASVVNIQKEIDRLNEVAKNLNESLIDLQELGKYEQYIKGGGGSDIIKLLNEQVNKEMQSSNLYMSMSSWCYTHSLDGAGLFLFDHAAEEYEHAKKLIIFLNENNVPVQLTSISAPEHKFEGLTQIFQKAYEHEQHISESINNIVDHAIKSKDHATFNFLQWYVAEQHEEEVLFKDILDKIELIGNENHGLYLADQYVKGIAKSRKS

SEQ ID NO: 4981 - protein, 1379 aa, Artificial Sequence
  SARS-CoV-2/Hong Kong/case85_VM20002868/2020__EPI_ISL_414519 spike protein (1-1211)(I712C_T1077C) Ferritin construct
MFVFLVLVPLVSSQCVNLTTRTQLPPAYTNSFTRGVYYPDKVFRSSVLHSTQDLFLPFFSNVTWFHAIHVSGTNGTKRFDNPVLPFNDGVYFASTEKSNIIRGWIFGTTLDSKTQSLLIVNNATNVVIKVCEFQFCNDPFLGVYYHKNNKSWMESEFRVYSSANNCTFEYVSQPFLMDLEGKQGNFKNLREFVFKNIDGYFKIYSKHTPINLVRDLPQGFSALEPLVDLPIGINITRFQTLLALHRSYLTPGDSSSGWTAGAAAYYVGYLQPRTFLLKYNENGTITDAVDCALDPLSETKCTLKSFTVEKGIYQTSNFRVQPTESIVRFPNITNLCPFGEVFNATRFASVYAWNRKRISNCVADYSVLYNSASFSTFKCYGVSPTKLNDLCFTNVYADSFVIRGDEVRQIAPGQTGKIADYNYKLPDDFTGCVIAWNSNNLDSKVGGNYNYLYRLFRKSNLKPFERDISTEIYQAGSTPCNGVEGFNCYFPLQSYGFQPTNGVGYQPYRVVVLSFELLHAPATVCGPKKSTNLVKNKCVNFNFNGLTGTGVLTESNKKFLPFQQFGRDIADTTDAVRDPQTLEILDITPCSFGGVSVITPGTNTSNQVAVLYQDVNCTEVPVAIHADQLTPTWRVYSTGSNVFQTRAGCLIGAEHVNNSYECDIPIGAGICASYQTQTNSPRRARSVASQSIIAYTMSLGAENSVAYSNNSCAIPTNFTISVTTEILPVSMTKTSVDCTMYICGDSTECSNLLLQYGSFCTQLNRALTGIAVEQDKNTQEVFAQVKQIYKTPPIKDFGGFNFSQILPDPSKPSKRSFIEDLLFNKVTLADAGFIKQYGDCLGDIAARDLICAQKFNGLTVLPPLLTDEMIAQYTSALLAGTITSGWTFGAGAALQIPFAMQMAYRFNGIGVTQNVLYENQKLIANQFNSAIGKIQDSLSSTASALGKLQDVVNQNAQALNTLVKQLSSNFGAISSVLNDILSRLDKVEAEVQIDRLITGRLQSLQTYVTQQLIRAAEIRASANLAATKMSECVLGQSKRVDFCGKGYHLMSFPQSAPHGVVFLHVTYVPAQEKNFTCAPAICHDGKAHFPREGVFVSNGTHWFVTQRNFYEPQIITTDNTFVSGNCDVVIGIVNNTVYDPLQPELDSFKEELDKYFKNHTSPDVDLGDISGINASVVNIQKEIDRLNEVAKNLNESLIDLQELGKYEQYIKGGGGSDIIKLLNEQVNKEMQSSNLYMSMSSWCYTHSLDGAGLFLFDHAAEEYEHAKKLIIFLNENNVPVQLTSISAPEHKFEGLTQIFQKAYEHEQHISESINNIVDHAIKSKDHATFNFLQWYVAEQHEEEVLFKDILDKIELIGNENHGLYLADQYVKGIAKSRKS

SEQ ID NO: 4982 - protein, 1379 aa, Artificial Sequence; identical to SEQ ID NO: 4972
  SARS-CoV-2/England/200990660/2020__EPI_ISL_414523 spike protein (1-1211)(I712C_T1077C) Ferritin construct

SEQ ID NO: 4983 - protein, 1379 aa, Artificial Sequence
  SARS-CoV-2/Australia/NSW09/2020__EPI_ISL_413595 spike protein (1-1211)(I712C_T1077C) Ferritin construct
MFVFLVLLPLVSSQCVNLTTRTQLPPAYTNSFTRGVYYPDKVFRSSVLHSTQDLFLPFFSNVTWFHAIHVSGTNGTKRFDNPVLPFNDGVYFASTEKSNIIRGWIFGTTLDSKTQSLLIVNNATNVVIKVCEFQFCNDPFLGVYYHKNNKSWMESEFRVYSSANNCTFEYVSQPFLMDLEGKQGNFKNLREFVFKNIDGYFKIYSKHTPINLVRDLPQGFSALEPLVDLPIGINITRFQTLLALHRSYLTPGDSSSGWTAGAAAYYVGYLQPRTFLLKYNENGTITDAVDCALDPLSETKCTLKSFTVEKGIYQTSNFRVQPTESIVRFPNITNLCPFGEVFNATRFASVYAWNRKRISNCVADYSVLYNSASFSTFKCYGVSPTKLNDLCFTNVYADSFVIRGDEVRQIAPGQTGKIADYNYKLPDDFTGCVIAWNSNNLDSKVGGNYNYLYRLFRKSNLKPFERDISTEIYQAGSTPCNGVEGFNCYFPLQSYGFQPTNGVGYQPYRVVVLSFELLHAPATVCGPKKSTNLVKNKCVNFNFNGLTGTGVLTESNKKFLPFQQFGRDIADTTDAVRDPQTLEILDITPCSFGGVSVITPGTNTSNQVAVLYQDVNCTEVPVAIHADQLTPTWRVYSTGSNVFQTRAGCLIGAEHVNNSYECDIPIGAGICASYQTQTNSPRRARSVASQSIIAYTMSLGAENSVAYSNNSCAIPTNFTISVTTEILPVSMTKTSVDCTMYICGDSTECSNLLLQYGSFCTQLNRALTGIAVEQDKNTQEVFAQVKQIYKTPPIKDFGGFNFSQILPDPSKPSKRSFIEDLLFNKVTLADAGFIKQYGDCLGDIAARDLICAQKFNGLTVLPPLLTDEMIAQYTSALLAGTITSGWTFGAGAALQIPFAMQMAYRFNGIGVTQNVLYENQKLIANQFNSAIGKIQDSLSFTASALGKLQDVVNQNAQALNTLVKQLSSNFGAISSVLNDILSRLDKVEAEVQIDRLITGRLQSLQTYVTQQLIRAAEIRASANLAATKMSECVLGQSKRVDFCGKGYHLMSFPQSAPHGVVFLHVTYVPAQEKNFTCAPAICHDGKAHFPREGVFVSNGTHWFVTQRNFYEPQIITTDNTFVSGNCDVVIGIVNNTVYDPLQPELDSFKEELDKYFKNHTSPDVDLGDISGINASVVNIQKEIDRLNEVAKNLNESLIDLQELGKYEQYIKGGGGSDIIKLLNEQVNKEMQSSNLYMSMSSWCYTHSLDGAGLFLFDHAAEEYEHAKKLIIFLNENNVPVQLTSISAPEHKFEGLTQIFQKAYEHEQHISESINNIVDHAIKSKDHATFNFLQWYVAEQHEEEVLFKDILDKIELIGNENHGLYLADQYVKGIAKSRKS

SEQ ID NO: 4984 - protein, 1379 aa, Artificial Sequence; identical to SEQ ID NO: 4964
  SARS-CoV-2/Australia/NSW10/2020__EPI_ISL_413596 spike protein (1-1211)(I712C_T1077C) Ferritin construct

SEQ ID NO: 4985 - protein, 1379 aa, Artificial Sequence
  SARS-CoV-2/Switzerland/1000477797/2020__EPI_ISL_413023 spike protein (1-1211)(I712C_T1077C) Ferritin construct
MFVFLVLLPLVSSQCVNLTTRTQLPPAYTNSFTRGVYYPDKVFRSSVLHSTQDLFLPFFSNVTWFHAIHVSGTNGTKRFDNPVLPFNDGVYFASTEKSNIIRGWIFGTTLDSKTQSLLIVNNATNVVIKVCEFQFCNDPFLGVYYHKNNKSWMESEFRVYSSANNCTFEYVSQPFLMDLEGKQGNFKNLREFVFKNIDGYFNIYSKHTPINLVRDLPQGFSALEPLVDLPIGINITRFQTLLALHRSYLTPGDSSSGWTAGAAAYYVGYLQPRTFLLKYNENGTITDAVDCALDPLSETKCTLKSFTVEKGIYQTSNFRVQPTESIVRFPNITNLCPFGEVFNATRFASVYAWNRKRISNCVADYSVLYNSASFSTFKCYGVSPTKLNDLCFTNVYADSFVIRGDEVRQIAPGQTGKIADYNYKLPDDFTGCVIAWNSNNLDSKVGGNYNYLYRLFRKSNLKPFERDISTEIYQAGSTPCNGVEGFNCYFPLQSYGFQPTNGVGYQPYRVVVLSFELLHAPATVCGPKKSTNLVKNKCVNFNFNGLTGTGVLTESNKKFLPFQQFGRDIADTTDAVRDPQTLEILDITPCSFGGVSVITPGTNTSNQVAVLYQGVNCTEVPVAIHADQLTPTWRVYSTGSNVFQTRAGCLIGAEHVNNSYECDIPIGAGICASYQTQTNSPRRARSVASQSIIAYTMSLGAENSVAYSNNSCAIPTNFTISVTTEILPVSMTKTSVDCTMYICGDSTECSNLLLQYGSFCTQLNRALTGIAVEQDKNTQEVFAQVKQIYKTPPIKDFGGFNFSQILPDPSKPSKRSFIEDLLFNKVTLADAGFIKQYGDCLGDIAARDLICAQKFNGLTVLPPLLTDEMIAQYTSALLAGTITSGWTFGAGAALQIPFAMQMAYRFNGIGVTQNVLYENQKLIANQFNSAIGKIQDSLSSTASALGKLQDVVNQNAQALNTLVKQLSSNFGAISSVLNDILSRLDKVEAEVQIDRLITGRLQSLQTYVTQQLIRAAEIRASANLAATKMSECVLGQSKRVDFCGKGYHLMSFPQSAPHGVVFLHVTYVPAQEKNFTCAPAICHDGKAHFPREGVFVSNGTHWFVTQRNFYEPQIITTDNTFVSGNCDVVIGIVNNTVYDPLQPELDSFKEELDKYFKNHTSPDVDLGDISGINASVVNIQKEIDRLNEVAKNLNESLIDLQELGKYEQYIKGGGGSDIIKLLNEQVNKEMQSSNLYMSMSSWCYTHSLDGAGLFLFDHAAEEYEHAKKLIIFLNENNVPVQLTSISAPEHKFEGLTQIFQKAYEHEQHISESINNIVDHAIKSKDHATFNFLQWYVAEQHEEEVLFKDILDKIELIGNENHGLYLADQYVKGIAKSRKS

SEQ ID NO: 4986 - protein, 1379 aa, Artificial Sequence
  SARS-CoV-2/Belgium/BA-02291/2020__EPI_ISL_415159 spike protein (1-1211)(I712C_T1077C) Ferritin construct
MFVFLVLLPLVSSQCVNLTTRTQLPPAYTNSFTRGVYYPDKVFRSSVLHSTQDLFLPFFSNVTWFHAIHVSGTNGTKRFDNPVLPFNDGVYFASTEKSNIIRGWIFGTTLDSKTQSLLIVNNATNVVIKVCEFQFCNDPFLGVYYHKNNKSWMESEFRVYSSANNCTFEYVSQPFLMDLEGKQGNFKNLREFVFKNIDGYFKIYSKHTPINLVRDLPQGFSALEPLVDLPIGINITRFQTLLALHRSYLTPGDSSSGWTAGAAAYYVGYLQPRTFLLKYNENGTITDAVDCALDPLSETKCTLKSFTVEKGIYQTSNFRVQPTESIVRFPNITNLCPFGEVFNATRFASVYAWNRKRISNCVADYSVLYNSASFSTFKCYGVSPTKLNDLCFTNVYADSFVIRGDEVRQIAPGQTGKIADYNYKLPDDFTGCVIAWNSNNLDSKVGGNYNYLYRLFRRSNLKPFERDISTEIYQAGSTPCNGVEGFNCYFPLQSYGFQPTNGVGYQPYRVVVLSFELLPAPATVCGPKKSTNLVKNKCVNFNFNGLTGTGVLTESNKKFLPFQQFGRDIADTTDAVRDPQTLEILDITPCSFGGVSVITPGTNTSNQVAVLYQGVNCTEVPVAIHADQLTPTWRVYSTGSNVFQTRAGCLIGAEHVNNSYECDIPIGAGICASYQTQTNSPRRARSVASQSIIAYTMSLGAENSVAYSNNSCAIPTNFTISVTTEILPVSMTKTSVDCTMYICGDSTECSNLLLQYGSFCTQLNRALTGIAVEQDKNTQEVFAQVKQIYKTPPIKDFGGFNFSQILPDPSKPSKRSFIEDLLFNKVTLADAGFIKQYGDCLGDIAARDLICAQKFNGLTVLPPLLTDEMIAQYTSALLAGTITSGWTFGAGAALQIPFAMQMAYRFNGIGVTQNVLYENQKLIANQFNSAIGKIQDSLSSAAPALGKLQDVVNQNAQALNTLVKQLSSNFGAISSVLNDILSRLDKVEAEVQIDRLITGRLQSLQTYVTQQLIRAAEIRASANLAATKMSECVLGQSKRVDFCGKGYHLMSFPQSAPHGVVFLHVTYVPAQEKNFTCAPAICHDGKAHFPREGVFVSNGTHWFVTQRNFYEPQIITTDNTFVSGNCDVVIGIVNNTVYDPLQPELDSFKEELDKYFKNHTSPDVDLGDISGINASVVNIQKEIDRLNEVAKNLNESLIDLQELGKYEQYIKGGGGSDIIKLLNEQVNKEMQSSNLYMSMSSWCYTHSLDGAGLFLFDHAAEEYEHAKKLIIFLNENNVPVQLTSISAPEHKFEGLTQIFQKAYEHEQHISESINNIVDHAIKSKDHATFNFLQWYVAEQHEEEVLFKDILDKIELIGNENHGLYLADQYVKGIAKSRKS

SEQ ID NO: 4987 - protein, 1379 aa, Artificial Sequence
  SARS-CoV-2/USA/WA8-UW5/2020__EPI_ISL_413486 spike protein (1-1211)(I712C_T1077C) Ferritin construct
MFVFLVLLPLVSSQCVNLTTRTQLPPAYTNSFTRGVYYPDKVFRSSVLHSTQDLFLPFFSNVTWFHAIHVSGTNGTKRFDNPVLPFNDGVYFASTEKSNIIRGWIFGTTLDSKTQSLLIVNNATNVVIKVCEFQFCNDPFLGVYYHKNNKSWMESEFRVYSSANNCTFEYVSQPFLMDLEGKQGNFKNLREFVFKNIDGYFKIYSKHTPINLVRDLPQGFSALEPLVDLPIGINITRFQTLLALHRSYLTPGDSSSGWTAGAAAYYVGYLQPRTFLLKYNENGTITDAVDCALDPLSETKCTLKSFTVEKGIYQTSNFRVQPTESIVRFPNITNLCPFGEVFNATRFASVYAWNRKRISNCVADYSVLYNSASFSTFKCYGVSPTKLNDLCFTNVYADSFVIRGDEVRQIAPGQTGKIADYNYKLPDDFTGCVIAWNSNNLDSKVGGNYNYLYRLFRKSNLKPFERDISTEIYQAGSTPCNGVEGFNCYFPLQSYGFQPTNGVGYQPYRVVVLSFELLHAPATVCGPKKSTNLVKNKCVNFNFNGLTGTGVLTESNKKFLPFQQFGRDIADTTDAVRDPQTLEILDITPCSFGGVSVITPGTNTSNQVAVLYQDVNCTEVPVAIHADQLTPTWRVYSTGSNVFQTRAGCLIGAEYVNNSYECDIPIGAGICASYQTQTNSPRRARSVASQSIIAYTMSLGAENSVAYSNNSCAIPTNFTISVTTEILPVSMTKTSVDCTMYICGDSTECSNLLLQYGSFCTQLNRALTGIAVEQDKNTQEVFAQVKQIYKTPPIKDFGGFNFSQILPDPSKPSKRSFIEDLLFNKVTLADAGFIKQYGDCLGDIAARDLICAQKFNGLTVLPPLLTDEMIAQYTSALLAGTITSGWTFGAGAALQIPFAMQMAYRFNGIGVTQNVLYENQKLIANQFNSAIGKIQDSLSSTASALGKLQDVVNQNAQALNTLVKQLSSNFGAISSVLNDILSRLDKVEAEVQIDRLITGRLQSLQTYVTQQLIRAAEIRASANLAATKMSECVLGQSKRVDFCGKGYHLMSFPQSAPHGVVFLHVTYVPAQEKNFTCAPAICHDGKAHFPREGVFVSNGTHWFVTQRNFYEPQIITTDNTFVSGNCDVVIGIVNNTVYDPLQPELDSFKEELDKYFKNHTSPDVDLGDISGINASVVNIQKEIDRLNEVAKNLNESLIDLQELGKYEQYIKGGGGSDIIKLLNEQVNKEMQSSNLYMSMSSWCYTHSLDGAGLFLFDHAAEEYEHAKKLIIFLNENNVPVQLTSISAPEHKFEGLTQIFQKAYEHEQHISESINNIVDHAIKSKDHATFNFLQWYVAEQHEEEVLFKDILDKIELIGNENHGLYLADQYVKGIAKSRKS

SEQ ID NO: 4988 - protein, 1379 aa, Artificial Sequence
  SARS-CoV-2/England/20102000506/2020__EPI_ISL_415147 spike protein (1-1211)(I712C_T1077C) Ferritin construct
MFVFLVLLPLVSSQCVNLTTRTQLPPAYTNSFTRGVYYPDKVFRSSVLHSTQDLFLPFFSNVTWFHAIHVSGTNGTKRFDNPVLPFNDGVYFASTEKSNIIRGWIFGTTLDSKTQSLLIVNNATNVVIKVCEFQFCNDPFLGVYYHKNNKSWMESEFRVYSSANNCTFEYVSQPFLMDLEGKQGNFKNLREFVFKNIDGYFKIYSKHTPINLVRDLPQGFSALEPLVDLPIGINITRFQTLLALHRSYLTPGDSSSGWTAGAAAYYVGYLQPRTFLLKYNENGTITDAVDCALDPLSETKCTLKSFTVEKGIYQTSNFRVQPTESIVRFPNITNLCPFGEVFNATRFASVYAWNRKRISNCVADYSVLYNSASFSTFKCYGVSPTKLNDLCFTNVYADSFVIRGDEVRQIAPGQTGKIADYNYKLPDDFTGCVIAWNSNNLDSKVGGNYNYLYRLFRKSNLKPFERDISTEIYQAGSTPCNGVEGFNCYFPLQSYGFQPTNGVGYQPYRVVVLSFELLHAPATVCGPKKSTNLVKNKCVNFNFNGLTGTGVLTESNKKFLPFQQFGRDIADTTDAVRDPQTLEILDITPCSFGGVSVITPGTNTSNQVAVLYQGVNCTEVPVAIHADQLTPTWRVYSTGSNVFQTRAGCLIGAEHVNNSYECDIPIGAGICASYQTQTNSPRRARSVASQSIIAYTMSLGAENSVAYSNNSCAIPTNFTISVTTEILPVSMTKTSVDCTMYICGDSTECSNLLLQYGSFCTQLNRALTGIAVEQDKNTQEVFAQVKQIYKTPPIKDFGGFNFSQILPDPSKPSKRSFIEDLLFNKVTLADAGFIKQYGYCLGDIAARDLICAQKFNGLTVLPPLLTDEMIAQYTSALLAGTITSGWTFGAGAALQIPFAMQMAYRFNGIGVTQNVLYENQKLIANQFNSAIGKIQDSLSSTASALGKLQDVVNQNAQALNTLVKQLSSNFGAISSVLNDILSRLDKVEAEVQIDRLITGRLQSLQTYVTQQLIRAAEIRASANLAATKMSECVLGQSKRVDFCGKGYHLMSFPQSAPHGVVFLHVTYVPAQEKNFTCAPAICHDGKAHFPREGVFVSNGTHWFVTQRNFYEPQIITTDNTFVSGNCDVVIGIVNNTVYDPLQPELDSFKEELDKYFKNHTSPDVDLGDISGINASVVNIQKEIDRLNEVAKNLNESLIDLQELGKYEQYIKGGGGSDIIKLLNEQVNKEMQSSNLYMSMSSWCYTHSLDGAGLFLFDHAAEEYEHAKKLIIFLNENNVPVQLTSISAPEHKFEGLTQIFQKAYEHEQHISESINNIVDHAIKSKDHATFNFLQWYVAEQHEEEVLFKDILDKIELIGNENHGLYLADQYVKGIAKSRKS

SEQ ID NO: 4989 - protein, 1379 aa, Artificial Sequence
  SARS-CoV-2/Belgium/VAG-03013/2020__EPI_ISL_415155 spike protein (1-1211)(I712C_T1077C) Ferritin construct
MFVFLVLLPLVSSQCVNLTTRTQLPPAYTNSFTRGVYYPDKVFRSSVLHSTQDLFLPFFSNVTWFHAIHVSGTNGTKRFDNPVLPFNDGVYFASTEKSNIIRGWIFGTTLDSKTQSLLIVNNATNVVIKVCEFQFCNDPFLGVYYHKNNKSWMESEFRVYSSANNCTFEYVSQPFLMDLEGKQGNFKNLREFVFKNIDGYFKIYSKHTPINLVRDLPQGFSALEPLVDLPIGINITRFQTLLALHRSYLTPGDSSSGWTAGAAAYYVGYLQPRTFLLKYNENGTITDAVDCALDPLSETKCTLKSFTVEKGIYQTSNFRVQPTESIVRFPNITNLCPFGEVFNATRFASVYAWNRKRISNCVADYSVLYNSASFSTFKCYGVSPTKLNDLCFTNVYADSFVIRGDEVRQIAPGQTGKIADYNYKLPDDFTGCVIAWNSNNLDSKVGGNYNYLYRLFRKSNLKPFERDISTEIYQAGSTPCNGVEGFNCYFPLQSYGFQPTNGVGYQPYRVVVLSFELLHAPATVCGPKKSTNLVKNKCVNFNFNGLTGTGVLTESNKKFLPFQQFGRDIADTTDAVRDPQTLEILDITPCSFGGVSVITPGTNTSNQVAVLYQGVNCTEVPVAIHADQLTPTWRVYSTGSNVFQTRAGCLIGAEHVNNSYECDIPIGAGICASYQTQTNSPRRARSVASQSIIAYTMSLGAENSVAYSNNSCAIPTNFTISVTTEILPVSMTKTSVDCTMYICGDSTECSNLLLQYGSFCTQLNRALTGIAVEQDKNTQEVFAQVKQIYKTPPIKDFGGFNFSQILPDPSKPSKRSFIEDLLFNKVTLADAGFIKQYGDCLGDIAARDLICAQKFNGLTVLPPLLTDEMIAQYTSALLAGTITSGWTFGAGAALQIPFAMQMAYRFNGIGVTQNVLYENQKLIANQFNSAIGKIQDSLSSTATALGKLQDVVNQNAQALNTLVKQLSSNFGAISSVLNDILSRLDKVEAEVQIDRLITGRLQSLQTYVTQQLIRAAEIRASANLAATKMSECVLGQSKRVDFCGKGYHLMSFPQSAPHGVVFLHVTYVPAQEKNFTCAPAICHDGKAHFPREGVFVSNGTHWFVTQRNFYEPQIITTDNTFVSGNCDVVIGIVNNTVYDPLQPELDSFKEELDKYFKNHTSPDVDLGDISGINASVVNIQKEIDRLNEVAKNLNESLIDLQELGKYEQYIKGGGGSDIIKLLNEQVNKEMQSSNLYMSMSSWCYTHSLDGAGLFLFDHAAEEYEHAKKLIIFLNENNVPVQLTSISAPEHKFEGLTQIFQKAYEHEQHISESINNIVDHAIKSKDHATFNFLQWYVAEQHEEEVLFKDILDKIELIGNENHGLYLADQYVKGIAKSRKS

SEQ ID NO: 4990 - protein, 1379 aa, Artificial Sequence
  SARS-CoV-2/Belgium/BC-03016/2020__EPI_ISL_415157 spike protein (1-1211)(I712C_T1077C) Ferritin construct
MFVFLVLLPLVSSQCVNLTTRTQLPPAYTNSFTRGVYYPDKVFRSSVLHSTQDLFLPFFSNVTWFHAIHVSGTNGTKRFDNPVLPFNDGVYFASTEKSNIIRGWIFGTTLDSKTQSLLIVNNATNVVIKVCEFQFCNDPFLGVYYHKNNKSWMESEFRVYSSANNCTFEYVSQPFLMDLEGKQGNFKNLREFVFKNIDGYFKIYSKHTPINLVRDLPQGFSALEPLVDLPIGINITRFQTLLALHRSYLTPGDSSSGWTAGAAAYYVGYLQPRTFLLKYNENGTITDAVDCALDPLSETKCTLKSFTVEKGIYQTSNFRVQPTESIVRFPNITNLCPFGEVFNATRFASVYAWNRKRISNCVADYSVLYNSASFSTFKCYGVSPTKLNDLCFTNVYADSFVIRGDEVRQIAPGQTGKIADYNYKLPDDFTGCVIAWNSNNLDSKVGGNYNYLYRLFRKSNLKPFERDISTEIYQAGSTPCNGVEGFNCYFPLQSYGFQPTNGVGYQPYRVVVLSFELLHAPATVCGPKKSTNLVKNKCVNFNFNGLTGTGVLTESNKKFLPFQQFGRDIADTTDAVRDPQTLEILDITPCSFGGVSVITPGTNTSNQVAVLYQGVNCTEVPVAIHADQLTPTWRVYSTGSNVFQTRAGCLIGAEHVNNSYECDIPIGAGICASYQTQTNSPRRARSVASQSIIAYTMSLGAENSVAYSNNSCAIPTNFTISVTTEILPVSMTKTSVDCTMYICGDSTECSNLLLQYGSFCTQLNRALTGIAVEQDKNTQEVFAQVKQIYKTPPIKDFGGFNFSQILPDPSKPSKRSFIEDLLFNKVTLADAGFIKQYGDCLGDIAARDLICAQKFNGLTVLPPLLTDEMIAQYTSALLAGTITSGWTFGAGAALQIPFAMQMAYRFNGIGVTQNVLYENQKLIANQFNSAIGKIQDSLSSTAPALGKLQDVVNQNAQALNTLVKQLSSNFGAISSVLNDILSRLDKVEAEVQIDRLITGRLQSLQTYVTQQLIRAAEIRASANLAATKMSECVLGQSKRVDFCGKGYHLMSFPQSAPHGVVFLHVTYVPAQEKNFTCAPAICHDGKAHFPREGVFVSNGTHWFVTQRNFYEPQIITTDNTFVSGNCDVVIGIVNNTVYDPLQPELDSFKEELDKYFKNHTSPDVDLGDISGINASVVNIQKEIDRLNEVAKNLNESLIDLQELGKYEQYIKGGGGSDIIKLLNEQVNKEMQSSNLYMSMSSWCYTHSLDGAGLFLFDHAAEEYEHAKKLIIFLNENNVPVQLTSISAPEHKFEGLTQIFQKAYEHEQHISESINNIVDHAIKSKDHATFNFLQWYVAEQHEEEVLFKDILDKIELIGNENHGLYLADQYVKGIAKSRKS

SEQ ID NO: 4991 - protein, 1379 aa, Artificial Sequence
  SARS-CoV-2/Germany/BavPat3/2020__EPI_ISL_414521 spike protein (1-1211)(I712C_T1077C) Ferritin construct
MFVFLVLLPLVSSQCVNLTTRTQLPPAYTNSFTRGVYYPDKVFRSSVLHSTQDLFLPFFSNVTWFHAIHVSGTNGTKRFDNPVLPFNDGVYFASTEKSNIIRGWIFGTTLDSKTQSLLIVNNATNVVIKVCEFQFCNDPFLGVYYHKNNKSWMESEFRVYSSANNCTFEYVSQPFLMDLEGKQGNFKNLREFVFKNIDGYFKIYSKHTPINLVRDLPQGFSALEPLVDLPIGINITRFQTLLALHRSYLTPGDSSSGWTAGAAAYYVGYLQPRTFLLKYNENGTITDAVDCALDPLSETKCTLKSFTVEKGIYQTSNFRVQPTESIVRFPNITNLCPFGEVFNATRFASVYAWNRKRISNCVADYSVLYNSASFSTFKCYGVSPTKLNDLCFTNVYADSFVIRGDEVRQIAPGQTGKIADYNYKLPDDFTGCVIAWNSNNLDSKVGGNYNYLYRLFRKSNLKPFERDISTEIYQAGSTPCNGVEGFNCYFPLQSYGFQPTNGVGYQPYRVVVLSFELLHAPATVCGPKKSTNLVKNKCVNFNFNGLTGTGVLTESNKKFLPFQQFGRDIADTTDAVRDPQTLEILDITPCSFGGVSVITPGTNTSNQVAVLYQDVNCTEVPVAIHADQLTPTWRVYSTGSNVFQTRAGCLIGAEHVNNSYECDIPIGAGICASYQTQTNSPRRARSVASQSIIAYTMSLGAENSVAYSNNSCAIPTNFTISVTTEILPVSMTKTSVDCTMYICGDSTECSNLLLQYGSFCTQLNRALTGIAVEQDKNTQQVFAQVKQIYKTPPIKDFGGFNFSQILPDPSKPSKRSFIEDLLFNKVTLADAGFIKQYGDCLGDIAARDLICAQKFNGLTVLPPLLTDEMIAQYTSALLAGTITSGWTFGAGAALQIPFAMQMAYRFNGIGVTQNVLYENQKLIANQFNSAIGKIQDSLSSTASALGKLQDVVNQNAQALNTLVKQLSSNFGAISSVLNDILSRLDKVEAEVQIDRLITGRLQSLQTYVTQQLIRAAEIRASANLAATKMSECVLGQSKRVDFCGKGYHLMSFPQSAPHGVVFLHVTYVPAQEKNFTCAPAICHDGKAHFPREGVFVSNGTHWFVTQRNFYEPQIITTDNTFVSGNCDVVIGIVNNTVYDPLQPELDSFKEELDKYFKNHTSPDVDLGDISGINASVVNIQKEIDRLNEVAKNLNESLIDLQELGKYEQYIKGGGGSDIIKLLNEQVNKEMQSSNLYMSMSSWCYTHSLDGAGLFLFDHAAEEYEHAKKLIIFLNENNVPVQLTSISAPEHKFEGLTQIFQKAYEHEQHISESINNIVDHAIKSKDHATFNFLQWYVAEQHEEEVLFKDILDKIELIGNENHGLYLADQYVKGIAKSRKS

SEQ ID NO: 4992 - protein, 1379 aa, Artificial Sequence
  SARS-CoV-2/France/HF1805/2020__EPI_ISL_414628 spike protein (1-1211)(I712C_T1077C) Ferritin construct
MFVFLVLLPLVSSQCVNLTTRTQLPPAYTNSFTRGVYYPDKVFRSSVLHSTQDLFLPFFSNVTWFHAIHVSGTNGTKRFDNPVLPFNDGVYFASTEKSNIIRGWIFGTTLDSKTQSLLIVNNATNVVIKVCEFQFCNDPFLGVYYHKNNKSWMESEFRVYSSANNCTFEYVSQPFLMDLEGKQGNFKNLREFVFKNIDGYFKIYSKHTPINLVRDLPQGFSALEPLVDLPIGINITRFQTLLALHRSYLTPGDSSSGWTAGAAAYYVGYLQPRTFLLKYNENGTITDAVDCALDPLSETKCTLKSFTVEKGIYQTSNFRVQPTESIVRFPNITNLCPFGEVFNATRFASVYAWNRKRISNCVADYSVLYNSASFSTFKCYGVSPTKLNDLCFTNVYADSFVIRGDEVRQIAPGQTGKIADYNYKLPDDFTGCVIAWNSNNLDSKVGGNYNYLYRLFRKSNLKPFERDISTEIYQAGSTPCNGVEGFNCYFPLQSYGFQPTNGVGYQPYRVVVLSFELLHAPATVCGPKKSTNLVKNKCVNFNFNGLTGTGVLTESNKKFLPFQQFGRDIADTTDAVRDPQTLEILDITPCSFGGVSVITPGTNTSNQVAVLYQGVNCTEVPVAIHADQLTPTWRVYSTGSNVFQTRAGCLIGAEHVNNSYECDIPIGAGICASYQTQTNSPRRARSVASQSIIAYTMSLGAENSVAYSNNSCAIPTNFTISVTTEILPVSMTKTSVDCTMYICGDSTECSNLLLQYGSFCTQLNRALTGIAVEQDKNTQEVFAQVKQIYKTPPIKDFGGFNFSQILPDPSKPSKRSFIEDLLFNKVTLADAGFIKQYGDCLGDIAARDLICAQKFNGLTVLPPLLTDEMIAQYTSALLAGTITSGWTFGAGAALQIPFAMQMAYRFNGIGVTQNVLYENQKLIANQFNSAIGKIQDSLSSTASALGKLQDVVNQNAQALNTLVKQLSSNFGAISSVLNDILSRLDKVEAEVQIDRLITGRLQSLQTYVTQQLIRAAEIRASANLAATKMSECVLGQSKRVDFCGKGYHLMSFPQSAPHGVVFLHVTYVPAQEKNFTCAPAICHDGKAHFPREGVFVSNGTHWFVTQRNFYEPQIITTDNTFVSGNCDVVIGVVNNTVYDPLQPELDSFKEELDKYFKNHTSPDVDLGDISGINASVVNIQKEIDRLNEVAKNLNESLIDLQELGKYEQYIKGGGGSDIIKLLNEQVNKEMQSSNLYMSMSSWCYTHSLDGAGLFLFDHAAEEYEHAKKLIIFLNENNVPVQLTSISAPEHKFEGLTQIFQKAYEHEQHISESINNIVDHAIKSKDHATFNFLQWYVAEQHEEEVLFKDILDKIELIGNENHGLYLADQYVKGIAKSRKS

SEQ ID NO: 4993 - protein, 1379 aa, Artificial Sequence
  SARS-CoV-2/Netherlands/ZuidHolland_9/2020__EPI_ISL_414445 spike protein (1-1211)(I712C_T1077C) Ferritin construct
MFVFLVLLPLVSSQCVNLTTRTQLPPAYTNSFTRGVYYPDKVFRSSVLHSTQDLFLPFFSNVTWFHAIHVSGTNGTKRFDNPVLPFNDGVYFASTEKSNIIRGWIFGTTLDSKTQSLLIVNNATNVVIKVCEFQFCNDPFLGVYYHKNNKSWMESEFRVYSSANNCTFEYVSQPFLMDLEGKQGNFKNLREFVFKNIDGYFKIYSKHTPINLVRDLPQGFSALEPLVDLPIGINITRFQTLLALHRSYLTPGDSSSGWTAGAAAYYVGYLQPRTFLLKYNENGTITDAVDCALDPLSETKCTLKSFTVEKGIYQTSNFRVQPTESIVRFPNITNLCPFGEVFNATRFASVYAWNRKRISNCVADYSVLYNSASFSTFKCYGVSPTKLNDLCFTNVYADSFVIRGDEVRQIAPGQTGKIADYNYKLPDDFTGCVIAWNSNNLDSKVGGNYNYLYRLFRKSNLKPFERDISTEIYQAGSTPCNGVEGFNCYFPLQSYGFQPTNGVGYQPYRVVVLSFELLHAPATVCGPKKSTNLVKNKCVNFNFNGLTGTGVLTESNKKFLPFQQFGRDIADTTDAVRDPQTLEILDITPCSFGGVSVITPGTNTSNQVAVLYQGVNCTEVPVAIHADQLTPTWRVYSTGSNVFQTRAGCLIGAEHVNNSYECDIPIGAGICASYQTQTNSPRRARSVASQSIIAYTMSLGAENSVAYSNNSCAIPTNFTISVTTEILPVSMTKTSVDCTMYICGDSTECSNLLLQYGSFCTQLNRALTGIAVEQDKNTQEVFAQVKQIYKTPPIKDFGGFNFSQILPDPSKPSKRSFIEDLLFNKVTLADAGFIKQYGDCLGDIAARDLICVQKFNGLTVLPPLLTDEMIAQYTSALLAGTITSGWTFGAGAALQIPFAMQMAYRFNGIGVTQNVLYENQKLIANQFNSAIGKIQDSLSSTASALGKLQDVVNQNAQALNTLVKQLSSNFGAISSVLNDILSRLDKVEAEVQIDRLITGRLQSLQTYVTQQLIRAAEIRASANLAATKMSECVLGQSKRVDFCGKGYHLMSFPQSAPHGVVFLHVTYVPAQEKNFTCAPAICHDGKAHFPREGVFVSNGTHWFVTQRNFYEPQIITTDNTFVSGNCDVVIGIVNNTVYDPLQPELDSFKEELDKYFKNHTSPDVDLGDISGINASVVNIQKEIDRLNEVAKNLNESLIDLQELGKYEQYIKGGGGSDIIKLLNEQVNKEMQSSNLYMSMSSWCYTHSLDGAGLFLFDHAAEEYEHAKKLIIFLNENNVPVQLTSISAPEHKFEGLTQIFQKAYEHEQHISESINNIVDHAIKSKDHATFNFLQWYVAEQHEEEVLFKDILDKIELIGNENHGLYLADQYVKGIAKSRKS

SEQ ID NO: 4994 - protein, 1379 aa, Artificial Sequence
  SARS-CoV-2/Finland/FIN03032020A/2020__EPI_ISL_413602 spike protein (1-1211)(I712C_T1077C) Ferritin construct
MFVFLVLLPLVSSQCVNLTTRTQLPPAYTNSFTRGVYYPDKVFRSSVLHSTQDLFLPFFSNVTWFHAIHVSGTNGTKRFDNPVLPFNDGVYFASTEKSNIIRGWIFGTTLDSKTQSLLIVNNATNVVIKVCEFQFCNDPFLGVYYHKNNKSWMESEFRVYSSANNCTFEYVSQPFLMDLEGKQGNFKNLREFVFKNIDGYFKIYSKHTPINLVRDLPQGFSALEPLVDLPIGINITRFQTLLALHRSYLTPGDSSSGWTAGAAAYYVGYLQPRTFLLKYNENGTITDAVDCALDPLSETKCTLKSFTVEKGIYQTSNFRVQPTESIVRFPNITNLCPFGEVFNATRFASVYAWNRKRISNCVADYSVLYNSASFSTFKCYGVSPTKLNDLCFTNVYADSFVIRGDEVRQIAPGQTGKIADYNYKLPDDFTGCVISWNSNNLDSKVGGNYNYLYRLFRKSNLKPFERDISTEIYQAGSTPCNGVEGFNCYFPLQSYGFQPTNGVGYQPYRVVVLSFELLHAPATVCGPKKSTNLVKNKCVNFNFNGLTGTGVLTESNKKFLPFQQFGRDIADTTDAVRDPQTLEILDITPCSFGGVSVITPGTNTSNQVAVLYQGVNCTEVPVAIHADQLTPTWRVYSTGSNVFQTRAGCLIGAEHVNNSYECDIPIGAGICASYQTQTNSPRRARSVASQSIIAYTMSLGAENSVAYSNNSCAIPTNFTISVTTEILPVSMTKTSVDCTMYICGDSTECSNLLLQYGSFCTQLNRALTGIAVEQDKNTQEVFAQVKQIYKTPPIKDFGGFNFSQILPDPSKPSKRSFIEDLLFNKVTLADAGFIKQYGDCLGDIAARDLICAQKFNGLTVLPPLLTDEMIAQYTSALLAGTITSGWTFGAGAALQIPFAMQMAYRFNGIGVTQNVLYENQKLIANQFNSAIGKIQDSLSSTASALGKLQDVVNQNAQALNTLVKQLSSNFGAISSVLNDILSRLDKVEAEVQIDRLITGRLQSLQTYVTQQLIRAAEIRASANLAATKMSECVLGQSKRVDFCGKGYHLMSFPQSAPHGVVFLHVTYVPAQEKNFTCAPAICHDGKAHFPREGVFVSNGTHWFVTQRNFYEPQIITTDNTFVSGNCDVVIGIVNNTVYDPLQPELDSFKEELDKYFKNHTSPDVDLGDISGINASVVNIQKEIDRLNEVAKNLNESLIDLQELGKYEQYIKGGGGSDIIKLLNEQVNKEMQSSNLYMSMSSWCYTHSLDGAGLFLFDHAAEEYEHAKKLIIFLNENNVPVQLTSISAPEHKFEGLTQIFQKAYEHEQHISESINNIVDHAIKSKDHATFNFLQWYVAEQHEEEVLFKDILDKIELIGNENHGLYLADQYVKGIAKSRKS

SEQ ID NO: 4995 - protein, 1379 aa, Artificial Sequence
  SARS-CoV-2/France/GE1977/2020__EPI_ISL_414632 spike protein (1-1211)(I712C_T1077C) Ferritin construct
MFVFLVLLPLVSSQCVNLTTRTQLPPAYTNSFTRGVYYPDKVFRSSVLHSTQDLFLPFFSNVTWFHAIHVSGTNGTKRFDNPVLPFNDGVYFASTEKSNIIRGWIFGTTLDSKTQSLLIVNNATNVVIKVCEFQFCNDPFLGVYYHKNNKSWMESEFRVYSSANNCTFEYVSQPFLMDLEGKQGNFKNLREFVFKNIDGYFKIYSKHTPINLVRDLPQGFSALEPLVDLPIGINITRFQTLLALHRSYLTPGDSSSGWTAGAAAYYVGYLQPRTFLLKYNENGTITDAVDCALDPLSETKCTLKSFTVEKGIYQTSNFRVQPTESIVRFPNITNLCPFGEVFNATRFASVYAWNRKRISNCVADYSVLYNSASFSTFKCYGVSPTKLNDLCFTNVYADSFVIRGDEVRQIAPGQTGKIADYNYKLPDDFTGCVIAWNSNNLDSKVGGNYNYLYRLFRKSNLKPFERDISTEIYQAGSTPCNGVEGFNCYFPLQSYGFQPTNGVGYQPYRVVVLSFELLHAPATVCGPKKSTNLVKNKCVNFNFNGLTGTGVLTESNKKFLPFQQFGRDIADTTDAVRDPQTLEILDITPCSFGGVSVITPGTNTSNQVAVLYQGVNCTEVPVAIHADQLTPTWRVYSTGSNVFQTRAGCLIGAEHVNNSYECDIPIGAGICASYQTQTNSPRRARSVASQSIIAYTMSLGAENSVAYSNNSCAIPTNFTISVTTEILPVSMTKTSVDCTMYICGDSTECSNLLLQYGSFCTQLNRALTGIAVEQDKNTQEVFAQVKQIYKTPPIKDFGGFNFSQILPDPSKPSKRSFIEDLLFNKVTLADAGFIKQYGDCLGDIAARDLICAQKFNGLTVLPPLLTDEMIAQYTSALLAGTITSGWTFGAGAALQIPFAMQMAYRFNGIGVTQNVLYENQKLIANQFNSAIGKIQDSLFSTASALGKLQDVVNQNAQALNTLVKQLSSNFGAISSVLNDILSRLDKVEAEVQIDRLITGRLQSLQTYVTQQLIRAAEIRASANLAATKMSECVLGQSKRVDFCGKGYHLMSFPQSAPHGVVFLHVTYVPAQEKNFTCAPAICHDGKAHFPREGVFVSNGTHWFVTQRNFYEPQIITTDNTFVSGNCDVVIGIVNNTVYDPLQPELDSFKEELDKYFKNHTSPDVDLGDISGINASVVNIQKEIDRLNEVAKNLNESLIDLQELGKYEQYIKGGGGSDIIKLLNEQVNKEMQSSNLYMSMSSWCYTHSLDGAGLFLFDHAAEEYEHAKKLIIFLNENNVPVQLTSISAPEHKFEGLTQIFQKAYEHEQHISESINNIVDHAIKSKDHATFNFLQWYVAEQHEEEVLFKDILDKIELIGNENHGLYLADQYVKGIAKSRKS

SEQ ID NO: 4996 - protein, 1379 aa, Artificial Sequence
  SARS-CoV-2/Finland/FIN-313/2020__EPI_ISL_414641 spike protein (1-1211)(I712C_T1077C) Ferritin construct
MFVFLVLLPLVSSQCVNLTTRTQLPPAYTNSFTRGVYYPDKVFRSSVLHSTQDLFLPFFSNVTWFHAIHVSGTNGTKRFDNPVLPFNDGVYFASTEKSNIIRGWIFGTTLDSKTQSLLIVNNATNVVIKVCEFQFCNDPFLGVYYHKNNKSWMESEFRVYSSANNCTFEYVSQPFLMDLEGKQGNFKNLREFVFKNIDGYFKIYSKHTPINLVRDLPQGFSALEPLVDLPIGINITRFKTLLALHRSYLTPGDSSSGWTAGAAAYYVGYLQPRTFLLKYNENGTITDAVDCALDPLSETKCTLKSFTVEKGIYQTSNFRVQPTESIVRFPNITNLCPFGEVFNATRFASVYAWNRKRISNCVADYSVLYNSASFSTFKCYGVSPTKLNDLCFTNVYADSFVIRGDEVRQIAPGQTGKIADYNYKLPDDFTGCVIAWNSNNLDSKVGGNYNYLYRLFRKSNLKPFERDISTEIYQAGSTPCNGVEGFNCYFPLQSYGFQPTNGVGYQPYRVVVLSFELLHAPATVCGPKKSTNLVKNKCVNFNFNGLTGTGVLTESNKKFLPFQQFGRDIADTTDAVRDPQTLEILDITPCSFGGVSVITPGTNTSNQVAVLYQGVNCTEVPVAIHADQLTPTWRVYSTGSNVFQTRAGCLIGAEHVNNSYECDIPIGAGICASYQTQTNSPRRARSVASQSIIAYTMSLGAENSVAYSNNSCAIPTNFTISVTTEILPVSMTKTSVDCTMYICGDSTECSNLLLQYGSFCTQLNRALTGIAVEQDKNTQEVFAQVKQIYKTPPIKDFGGFNFSQILPDPSKPSKRSFIEDLLFNKVTLADAGFIKQYGDCLGDIAARDLICAQKFNGLTVLPPLLTDEMIAQYTSALLAGTITSGWTFGAGAALQIPFAMQMAYRFNGIGVTQNVLYENQKLIANQFNSAIGKIQDSLSSTASALGKLQDVVNQNAQALNTLVKQLSSNFGAISSVLNDILSRLDKVEAEVQIDRLITGRLQSLQTYVTQQLIRAAEIRASANLAATKMSECVLGQSKRVDFCGKGYHLMSFPQSAPHGVVFLHVTYVPAQEKNFTCAPAICHDGKAHFPREGVFVSNGTHWFVTQRNFYEPQIITTDNTFVSGNCDVVIGIVNNTVYDPLQPELDSFKEELDKYFKNHTSPDVDLGDISGINASVVNIQKEIDRLNEVAKNLNESLIDLQELGKYEQYIKGGGGSDIIKLLNEQVNKEMQSSNLYMSMSSWCYTHSLDGAGLFLFDHAAEEYEHAKKLIIFLNENNVPVQLTSISAPEHKFEGLTQIFQKAYEHEQHISESINNIVDHAIKSKDHATFNFLQWYVAEQHEEEVLFKDILDKIELIGNENHGLYLADQYVKGIAKSRKS

SEQ ID NO: 4997 - protein, 1379 aa, Artificial Sequence
  SARS-CoV-2/Netherlands/ZuidHolland_2/2020__EPI_ISL_414556 spike protein (1-1211)(I712C_T1077C) Ferritin construct
MFVFLVLLPLVSSQCVNLTTRTQLPPAYTNSFTRGVYYPDKVFRSSVLHSTQDLFLPFFSNVTWFHAIHVSGTNGTKRFDNPVLPFNDGVYFASTEKSNIIRGWIFGTTLDSKTQSLLIVNNATNVVIKVCEFQFCNDPFLGVYYHKNNKSWMESEFRVYSSANNCTFEYVSQPFLMDLEGKQGNFKNLREFVFKNIDGYFKIYSKHTPINLVRDLPQGFSALEPLVDLPIGINITRFQTLLALHRSYLTPGDSSSGWTAGAAAYYVGYLQPRTFLLKYNENGTITDAVDCALDPLSETKCTLKSFTVEKGIYQTSNFRVQPTESIVRFPNITNLCPFGEVFNATRFASVYAWNRKRISNCVADYSVLYNSASFSTFKCYGVSPTKLNDLCFTNVYADSFVIRGDEVRQIAPGQTGKIADYNYKLPDDFTGCVIAWNSNNLDSKVGGNYNYLYRLFRKSNLKPFERDISTEIYQAGSTPCNGVEGFNCYFPLQSYGFQPTNGVGYQPYRVVVLSFELLHAPATVCGPKKSTNLVKNKCVNFNFNGLTGTGVLTESNKKFLPFQQFGRDIADTTDAVRDPQTLEILDITPCSFGGVSVITPGTNTSNQVAVLYQGVNCTEVPVAIHADQLTPTWRVYSTGSNVFQTRAGCLIGAEHVNNSYECDIPIGAGICASYQTQTNSPRRARSVASQSIIAYTMSLGAENSVAYSNNSCAIPTNFTISVTTEILPVSMTKTSVDCTMYICGDSTECSNLLLQYGSFCTQLNRALTGIALEQDKNTQEVFAQVKQIYKTPPIKDFGGFNFSQILPDPSKPSKRSFIEDLLFNKVTLADAGFIKQYGDCLGDIAARDLICAQKFNGLTVLPPLLTDEMIAQYTSALLAGTITSGWTFGAGAALQIPFAMQMAYRFNGIGVTQNVLYENQKLIANQFNSAIGKIQDSLSSTASALGKLQDVVNQNAQALNTLVKQLSSNFGAISSVLNDILSRLDKVEAEVQIDRLITGRLQSLQTYVTQQLIRAAEIRASANLAATKMSECVLGQSKRVDFCGKGYHLMSFPQSAPHGVVFLHVTYVPAQEKNFTCAPAICHDGKAHFPREGVFVSNGTHWFVTQRNFYEPQIITTDNTFVSGNCDVVIGIVNNTVYDPLQPELDSFKEELDKYFKNHTSPDVDLGDISGINASVVNIQKEIDRLNEVAKNLNESLIDLQELGKYEQYIKGGGGSDIIKLLNEQVNKEMQSSNLYMSMSSWCYTHSLDGAGLFLFDHAAEEYEHAKKLIIFLNENNVPVQLTSISAPEHKFEGLTQIFQKAYEHEQHISESINNIVDHAIKSKDHATFNFLQWYVAEQHEEEVLFKDILDKIELIGNENHGLYLADQYVKGIAKSRKS

SEQ ID NO: 4998 - protein, 1379 aa, Artificial Sequence
  SARS-CoV-2/USA/WA-UW31/2020__EPI_ISL_414618 spike protein (1-1211)(I712C_T1077C) Ferritin construct
MFVFLVLLPLVSSQCVNLTTRTQLPPAYTNSFTRGVYYPDKVFRSSVLHSTQDLFLPFFSNVTWFHAIHVSGTNGTKRFDNPVLPFNDGVYFASTEKSNIIRGWIFGTTLDSKTQSLLIVNNATNVVIKVCEFQFCNDPFLGVYYHKNNKSWMESEFRVYSSANNCTFEYVSQPFLMDLEGKQGNFKNLREFVFKNIDGYFKIYSKHTPINLVRDLPQGFSALEPLVDLPIGINITRFQTLLALHRSYLTPGDSSSGWTAGAAAYYVGYLQPRTFLLKYNENGTITDAVDCALDPLSETKCTLKSFTVEKGIYQTSNFRVQPTESIVRFPNITNLCPFGEVFNATRFASVYAWNRKRISNCVADYSVLYNSASFSTFKCYGVSPTKLNDLCFTNVYADSFVIRGDEVRQIAPGQTGKIADYNYKLPDDFTGCVIAWNSNNLDSKVGGNYNYLYRLFRKSNLKPFERDISTEIYQAGSTPCNGAEGFNCYFPLQSYGFQPTNGVGYQPYRVVVLSFELLHAPATVCGPKKSTNLVKNKCVNFNFNGLTGTGVLTESNKKFLPFQQFGRDIADTTDAVRDPQTLEILDITPCSFGGVSVITPGTNTSNQVAVLYQDVNCTEVPVAIHADQLTPTWRVYSTGSNVFQTRAGCLIGAEHVNNSYECDIPIGAGICASYQTQTNSPRRARSVASQSIIAYTMSLGAENSVAYSNNSCAIPTNFTISVTTEILPVSMTKTSVDCTMYICGDSTECSNLLLQYGSFCTQLNRALTGIAVEQDKNTQEVFAQVKQIYKTPPIKDFGGFNFSQILPDPSKPSKRSFIEDLLFNKVTLADAGFIKQYGDCLGDIAARDLICAQKFNGLTVLPPLLTDEMIAQYTSALLAGTITSGWTFGAGAALQIPFAMQMAYRFNGIGVTQNVLYENQKLIANQFNSAIGKIQDSLSSTASALGKLQDVVNQNAQALNTLVKQLSSNFGAISSVLNDILSRLDKVEAEVQIDRLITGRLQSLQTYVTQQLIRAAEIRASANLAATKMSECVLGQSKRVDFCGKGYHLMSFPQSAPHGVVFLHVTYVPAQEKNFTCAPAICHDGKAHFPREGVFVSNGTHWFVTQRNFYEPQIITTDNTFVSGNCDVVIGIVNNTVYDPLQPELDSFKEELDKYFKNHTSPDVDLGDISGINASVVNIQKEIDRLNEVAKNLNESLIDLQELGKYEQYIKGGGGSDIIKLLNEQVNKEMQSSNLYMSMSSWCYTHSLDGAGLFLFDHAAEEYEHAKKLIIFLNENNVPVQLTSISAPEHKFEGLTQIFQKAYEHEQHISESINNIVDHAIKSKDHATFNFLQWYVAEQHEEEVLFKDILDKIELIGNENHGLYLADQYVKGIAKSRKS

SEQ ID NO: 4999 - protein, 1379 aa, Artificial Sequence
  SARS-CoV-2/South Korea/SNU01/2020__EPI_ISL_411929 spike protein (1-1211)(I712C_T1077C) Ferritin construct
MFVFLVLLPLVSSQCVNLTTRTQLPPAYTNSFTRGVYYPDKVFRSSVLHSTQDLFLPFFSNVTWFHAIHVSGTNGTKRFDNPVLPFNDGVYFASTEKSNIIRGWIFGTTLDSKTQSLLIVNNATNVVIKVCEFQFCNDPFLGVYYHKNNKSWMESEFRVYSSANNCTFEYVSQPFLMDLEGKQGNFKNLREFVFKNIDGYFKIYSKHTPINLVRDLPQGFWALEPLVDLPIGINITRFQTLLALHRSYLTPGDSSSGWTAGAAAYYVGYLQPRTFLLKYNENGTITDAVDCALDPLSETKCTLKSFTVEKGIYQTSNFRVQPTESIVRFPNITNLCPFGEVFNATRFASVYAWNRKRISNCVADYSVLYNSASFSTFKCYGVSPTKLNDLCFTNVYADSFVIRGDEVRQIAPGQTGKIADYNYKLPDDFTGCVIAWNSNNLDSKVGGNYNYLYRLFRKSNLKPFERDISTEIYQAGSTPCNGVEGFNCYFPLQSYGFQPTNGVGYQPYRVVVLSFELLHAPATVCGPKKSTNLVKNKCVNFNFNGLTGTGVLTESNKKFLPFQQFGRDIADTTDAVRDPQTLEILDITPCSFGGVSVITPGTNTSNQVAVLYQDVNCTEVPVAIHADQLTPTWRVYSTGSNVFQTRAGCLIGAEHVNNSYECDIPIGAGICASYQTQTNSPRRARSVASQSIIAYTMSLGAENSVAYSNNSCAIPTNFTISVTTEILPVSMTKTSVDCTMYICGDSTECSNLLLQYGSFCTQLNRALTGIAVEQDKNTQEVFAQVKQIYKTPPIKDFGGFNFSQILPDPSKPSKRSFIEDLLFNKVTLADAGFIKQYGDCLGDIAARDLICAQKFNGLTVLPPLLTDEMIAQYTSALLAGTITSGWTFGAGAALQIPFAMQMAYRFNGIGVTQNVLYENQKLIANQFNSAIGKIQDSLSSTASALGKLQDVVNQNAQALNTLVKQLSSNFGAISSVLNDILSRLDKVEAEVQIDRLITGRLQSLQTYVTQQLIRAAEIRASANLAATKMSECVLGQSKRVDFCGKGYHLMSFPQSAPHGVVFLHVTYVPAQEKNFTCAPAICHDGKAHFPREGVFVSNGTHWFVTQRNFYEPQIITTDNTFVSGNCDVVIGIVNNTVYDPLQPELDSFKEELDKYFKNHTSPDVDLGDISGINASVVNIQKEIDRLNEVAKNLNESLIDLQELGKYEQYIKGGGGSDIIKLLNEQVNKEMQSSNLYMSMSSWCYTHSLDGAGLFLFDHAAEEYEHAKKLIIFLNENNVPVQLTSISAPEHKFEGLTQIFQKAYEHEQHISESINNIVDHAIKSKDHATFNFLQWYVAEQHEEEVLFKDILDKIELIGNENHGLYLADQYVKGIAKSRKS

SEQ ID NO: 5000 - protein, 1379 aa, Artificial Sequence
  SARS-CoV-2/China/WF0004/2020__EPI_ISL_413694 spike protein (1-1211)(I712C_T1077C) Ferritin construct
MFVFLVLLPLVSSQCVNLTTRTQLPPAYTNSFTRGVYYPDKVFRSSVLHSTQDLFLPFFSNVTWFHAIHVSGTNGTKRFDNPVLPFNDGVYFASTEKSNIIRGWIFGTTLDSKTQSLLIVNNATNVVIKVCEFQFCNDPFLGVYYHKNNKSWTESEFRVYSSANNCTFEYVSQPFLMDLEGKQGNFKNLREFVFKNIDGYFKIYSKHTPINLVRDLPQGFSALEPLVDLPIGINITRFQTLLALHRSYLTPGDSSSGWTAGAAAYYVGYLQPRTFLLKYNENGTITDAVDCALDPLSETKCTLKSFTVEKGIYQTSNFRVQPTESIVRFPNITNLCPFGEVFNATRFASVYAWNRKRISNCVADYSVLYNSASFSTFKCYGVSPTKLNDLCFTNVYADSFVIRGDEVRQIAPGQTGKIADYNYKLPDDFTGCVIAWNSNNLDSKVGGNYNYLYRLFRKSNLKPFERDISTEIYQAGSTPCNGVEGFNCYFPLQSYGFQPTNGVGYQPYRVVVLSFELLHAPATVCGPKKSTNLVKNKCVNFNFNGLTGTGVLTESNKKFLPFQQFGRDIADTTDAVRDPQTLEILDITPCSFGGVSVITPGTNTSNQVAVLYQDVNCTEVPVAIHADQLTPTWRVYSTGSNVFQTRAGCLIGAEHVNNSYECDIPIGAGICASYQTQTNSPRRARSVASQSIIAYTMSLGAENSVAYSNNSCAIPTNFTISVTTEILPVSMTKTSVDCTMYICGDSTECSNLLLQYGSFCTQLNRALTGIAVEQDKNTQEVFAQVKQIYKTPPIKDFGGFNFSQILPDPSKPSKRSFIEDLLFNKVTLADAGFIKQYGDCLGDIAARDLICAQKFNGLTVLPPLLTDEMIAQYTSALLAGTITSGWTFGAGAALQIPFAMQMAYRFNGIGVTQNVLYENQKLIANQFNSAIGKIQDSLSSTASALGKLQDVVNQNAQALNTLVKQLSSNFGAISSVLNDILSRLDKVEAEVQIDRLITGRLQSLQTYVTQQLIRAAEIRASANLAATKMSECVLGQSKRFDFCGKGYHLMSFPQSAPHGVVFLHVTYVPAQEKNFTCAPAICHDGKAHFPREGVFVSNGTHWFVTQRNFYEPQIITTDNTFVSGNCDVVIGIVNNTVYDPLQPELDSFKEELDKYFKNHTSPDVDLGDISGINASVVNIQKEIDRLNEVAKNLNESLIDLQELGKYEQYIKGGGGSDIIKLLNEQVNKEMQSSNLYMSMSSWCYTHSLDGAGLFLFDHAAEEYEHAKKLIIFLNENNVPVQLTSISAPEHKFEGLTQIFQKAYEHEQHISESINNIVDHAIKSKDHATFNFLQWYVAEQHEEEVLFKDILDKIELIGNENHGLYLADQYVKGIAKSRKS

SEQ ID NO: 5001 - protein, 1379 aa, Artificial Sequence
  SARS-CoV-2/China/WF0028/2020__EPI_ISL_413791 spike protein (1-1211)(I712C_T1077C) Ferritin construct
MFVFLVLLPLVSSQCVNLTTRTQLPPAYTNSFTRGVYYPDKVFRSSVLHSTQDLFLPFFSNVTWFHAIHVSGTNGTKRFDNPVLPFNDGVYFASTEKSNIIRGWIFGTTLDSKTQSLLIVNNATNVVIKVCEFQFCNDPFLGVYYHKNNKSWMESEFRVYSSANNCTFEYVSQPFLMDLEGKQGNFKNLREFVFKNIDGYFKIYSKHTPINLVRDLPQGFSALEPLVDLPIGINITRFQTLLALHRSYLTPGDSSSGWTAGAAAYYVGYLQPRTFLLKYNENGTITDAVDCALDPLSETKCTLKSFTVEKGIYQTSNFRVQPTESIVRFPNITNLCPFGEVFNATRFASVYAWNRKRISNCVADYSVLYNSASFSTFKCYGVSPTKLNDLCFTNVYADSFVIRGDEVRQIAPGQTGKIADYNYKLPDDFTGCVIAWNSNNLDSKVGGNYNYLYRLFRKSNLKPFERDISTEIYQAGSTPCNGVEGFNCYFPLQSYGFQPTNGVGYQPYRVVVLSFELLHAPATVCGPKKSTNLVKNKCVNFNFNGLTGTGVLTESNKKFLPFQQFGRDIADTTDAVRDPQTLEILDITPCSFGGVSVITPGTNTSNQVAVLYQDVNCTEVPVAIHADQLTPTWRVYSTGSNVFQTRAGCLIGAEHVNNSYECDIPIGAGICASYQTQTNSPRRARSVASQSIIAYTMSLGAENSVAYSNNSCAIPTNFTISVTTEILPVSMTKTSVDCTMYICGDSTECSNLLLQYGSFCTQLNRALTGIAVEQDKNTQEVFAQVKQIYKTPPIKDFGGFNFSQILPDPSKPSKRSFIEDLLFNKVTLADAGFIKQYGDCLGDIAARDLICAQKFNGLTVLPPLLTDEMIAQYTSALLAGTITSGWTFGAGAALQIPFAMQMAYRFNGIGVTQNVLYENQKLIANQFNSAIGKIQDSLSSTASALGKLQDVVNQNAQALNTLVKQLSSNFGAISSVLNDILSRLDKVEAEVQIDRLITGRLQSLQTYVTQQLIRAAEIRASANLAATKMSECVLGQSKRVDFCGKGYHLMSFPQSAPHGVVFLHVTYVPAQEKNFTCAPAICHDGKAHFPREGVFVSNGTHWFVTQRNFYEPQIITTDNTFVSGNCDVVIGIVNNTVYDPLQPELESFKEELDKYFKNHTSPDVDLGDISGINASVVNIQKEIDRLNEVAKNLNESLIDLQELGKYEQYIKGGGGSDIIKLLNEQVNKEMQSSNLYMSMSSWCYTHSLDGAGLFLFDHAAEEYEHAKKLIIFLNENNVPVQLTSISAPEHKFEGLTQIFQKAYEHEQHISESINNIVDHAIKSKDHATFNFLQWYVAEQHEEEVLFKDILDKIELIGNENHGLYLADQYVKGIAKSRKS

SEQ ID NO: 5002 - protein, 1379 aa, Artificial Sequence
  SARS-CoV-2/2019-nCoV/USA-CruiseA-18/2020__MT159716.1 spike protein (1-1211)(I712C_T1077C) Ferritin construct
MFVFLVLLPLVSSQCVNLTTRTQLPPAYTNSFTRGVYYPDKVFRSSVLHSTQDLFLPFFSNVTWFHAIHVSGTNGTKRFDNPVLPFNDGVYFASTEKSNIIRGWIFGTTLDSKTQSLLIVNNATNVVIKVCEFQFCNDPFLGVYYHKNNKSWMESELRVYSSANNCTFEYVSQPFLMDLEGKQGNFKNLREFVFKNIDGYFKIYSKHTPINLVRDLPQGFSALEPLVDLPIGINITRFQTLLALHRSYLTPGDSSSGWTAGAAAYYVGYLQPRTFLLKYNENGTITDAVDCALDPLSETKCTLKSFTVEKGIYQTSNFRVQPTESIVRFPNITNLCPFGEVFNATRFASVYAWNRKRISNCVADYSVLYNSASFSTFKCYGVSPTKLNDLCFTNVYADSFVIRGDEVRQIAPGQTGKIADYNYKLPDDFTGCVIAWNSNNLDSKVGGNYNYLYRLFRKSNLKPFERDISTEIYQAGSTPCNGVEGFNCYFPLQSYGFQPTNGVGYQPYRVVVLSFELLHAPATVCGPKKSTNLVKNKCVNFNFNGLTGTGVLTESNKKFLPFQQFGRDIADTTDAVRDPQTLEILDITPCSFGGVSVITPGTNTSNQVAVLYQDVNCTEVPVAIHADQLTPTWRVYSTGSNVFQTRAGCLIGAEHVNNSYECDIPIGAGICASYQTQTNSPRRARSVASQSIIAYTMSLGAENSVAYSNNSCAIPTNFTISVTTEILPVSMTKTSVDCTMYICGDSTECSNLLLQYGSFCTQLNRALTGIAVEQDKNTQEVFAQVKQIYKTPPIKDFGGFNFSQILPDPSKPSKRSFIEDLLFNKVTLADAGFIKQYGDCLGDIAARDLICAQKFNGLTVLPPLLTDEMIAQYTSALLAGTITSGWTFGAGAALQIPFAMQMAYRFNGIGVTQNVLYENQKLIANQFNSAIGKIQDSLSSTASALGKLQDVVNQNAQALNTLVKQLSSNFGAISSVLNDILSRLDKVEAEVQIDRLITGRLQSLQTYVTQQLIRAAEIRASANLAATKMSECVLGQSKRVDFCGKGYHLMSFPQSAPHGVVFLHVTYVPAQEKNFTCAPAICHDGKAHFPREGVFVSNGTHWFVTQRNFYEPQIITTDNTFVSGNCDVVIGIVNNTVYDPLQPELDSFKEELDKYFKNHTSPDVDLGDISGINASVVNIQKEIDRLNEVAKNLNESLIDLQELGKYEQYIKGGGGSDIIKLLNEQVNKEMQSSNLYMSMSSWCYTHSLDGAGLFLFDHAAEEYEHAKKLIIFLNENNVPVQLTSISAPEHKFEGLTQIFQKAYEHEQHISESINNIVDHAIKSKDHATFNFLQWYVAEQHEEEVLFKDILDKIELIGNENHGLYLADQYVKGIAKSRKS

SEQ ID NO: 5003 - protein, 1379 aa, Artificial Sequence
  SARS-CoV-2/SARS-CoV-2/Yunnan-01/human/2020/CHN__MT049951.1 spike protein (1-1211)(I712C_T1077C) Ferritin construct
MFVFLVLLPLVSSQCVNLTTRTQLPPANTNSFTRGVYYPDKVFRSSVLHSTQDLFLPFFSNVTWFHAIHVSGTNGTKRFDNPVLPFNDGVYFASTEKSNIIRGWIFGTTLDSKTQSLLIVNNATNVVIKVCEFQFCNDPFLGVYYHKNNKSWMESEFRVYSSANNCTFEYVSQPFLMDLEGKQGNFKNLREFVFKNIDGYFKIYSKHTPINLVRDLPQGFSALEPLVDLPIGINITRFQTLLALHRSYLTPGDSSSGWTAGAAAYYVGYLQPRTFLLKYNENGTITDAVDCALDPLSETKCTLKSFTVEKGIYQTSNFRVQPTESIVRFPNITNLCPFGEVFNATRFASVYAWNRKRISNCVADYSVLYNSASFSTFKCYGVSPTKLNDLCFTNVYADSFVIRGDEVRQIAPGQTGKIADYNYKLPDDFTGCVIAWNSNNLDSKVGGNYNYLYRLFRKSNLKPFERDISTEIYQAGSTPCNGVEGFNCYFPLQSYGFQPTNGVGYQPYRVVVLSFELLHAPATVCGPKKSTNLVKNKCVNFNFNGLTGTGVLTESNKKFLPFQQFGRDIADTTDAVRDPQTLEILDITPCSFGGVSVITPGTNTSNQVAVLYQDVNCTEVPVAIHADQLTPTWRVYSTGSNVFQTRAGCLIGAEHVNNSYECDIPIGAGICASYQTQTNSPRRARSVASQSIIAYTMSLGAENSVAYSNNSCAIPTNFTISVTTEILPVSMTKTSVDCTMYICGDSTECSNLLLQYGSFCTQLNRALTGIAVEQDKNTQEVFAQVKQIYKTPPIKDFGGFNFSQILPDPSKPSKRSFIEDLLFNKVTLADAGFIKQYGDCLGDIAARDLICAQKFNGLTVLPPLLTDEMIAQYTSALLAGTITSGWTFGAGAALQIPFAMQMAYRFNGIGVTQNVLYENQKLIANQFNSAIGKIQDSLSSTASALGKLQDVVNQNAQALNTLVKQLSSNFGAISSVLNDILSRLDKVEAEVQIDRLITGRLQSLQTYVTQQLIRAAEIRASANLAATKMSECVLGQSKRVDFCGKGYHLMSFPQSAPHGVVFLHVTYVPAQEKNFTCAPAICHDGKAHFPREGVFVSNGTHWFVTQRNFYEPQIITTDNTFVSGNCDVVIGIVNNTVYDPLQPELDSFKEELDKYFKNHTSPDVDLGDISGINASVVNIQKEIDRLNEVAKNLNESLIDLQELGKYEQYIKGGGGSDIIKLLNEQVNKEMQSSNLYMSMSSWCYTHSLDGAGLFLFDHAAEEYEHAKKLIIFLNENNVPVQLTSISAPEHKFEGLTQIFQKAYEHEQHISESINNIVDHAIKSKDHATFNFLQWYVAEQHEEEVLFKDILDKIELIGNENHGLYLADQYVKGIAKSRKS

SEQ ID NO: 5004 - protein, 1379 aa, Artificial Sequence
  SARS-CoV-2/USA/WA-UW292/2020__EPI_ISL_418077 spike protein (1-1211)(I712C_T1077C) Ferritin construct
MFVFLVLLPLVSSQCVNLTTRTQLPPAYTNSFTRGVYYPDKVFRSSVLHSTQDLFLPFFSNVTWFHAIHVSGTNGTKRFDNPVLPFNDGVYFASTEKSNIIRGWIFGTTLDSKTQSLLIVNNATNVVIKVCEFQFCNDPFLGVYYHKNNKSWMESEFRVYSSANNCTFEYVSQPFLMDLEGKQGNFKNLREFVFKNIDGYFKIYSKHTPINLVRDLPQGFSALEPLVDLPIGINITRFQTLLALHRSYLTPGDSSSGWTAGAAAYYVGYLQPRTFLLKYNENGTITDAVDCALDPLSETKCTLKSFTVEKGIYQTSNFRVQPTESIVRFPNITNLCPFGEVFNATRFASVYAWNRKRISNCVADYSVLYNSASFSTFKCYGVSPTKLNDLCFTNVYADSFVIRGDEVRQIAPGQTGKIADYNYKLPDDFTGCVIAWNSNNLDSKVGGNYNYLYRLFRKSNLKPFERDISTEIYQASSTPCNGVEGFNCYFPLQSYGFQPTNGVGYQPYRVVVLSFELLHAPATVCGPKKSTNLVKNKCVNFNFNGLTGTGVLTESNKKFLPFQQFGRDIADTTDAVRDPQTLEILDITPCSFGGVSVITPGTNTSNQVAVLYQDVNCTEVPVAIHADQLTPTWRVYSTGSNVFQTRAGCLIGAEHVNNSYECDIPIGAGICASYQTQTNSPRRARSVASQSIIAYTMSLGAENSVAYSNNSCAIPTNFTISVTTEILPVSMTKTSVDCTMYICGDSTECSNLLLQYGSFCTQLNRALTGIAVEQDKNTQEVFAQVKQIYKTPPIKDFGGFNFSQILPDPSKPSKRSFIEDLLFNKVTLADAGFIKQYGDCLGDIAARDLICAQKFNGLTVLPPLLTDEMIAQYTSALLAGTITSGWTFGAGAALQIPFAMQMAYRFNGIGVTQNVLYENQKLIANQFNSAIGKIQDSLSSTASALGKLQDVVNQNAQALNTLVKQLSSNFGAISSVLNDILSRLDKVEAEVQIDRLITGRLQSLQTYVTQQLIRAAEIRASANLAATKMSECVLGQSKRVDFCGKGYHLMSFPQSAPHGVVFLHVTYVPAQEKNFTCAPAICHDGKAHFPREGVFVSNGTHWFVTQRNFYEPQIITTDNTFVSGNCDVVIGIVNNTVYDPLQPELDSFKEELDKYFKNHTSPDVDLGDISGINASVVNIQKEIDRLNEVAKNLNESLIDLQELGKYEQYIKGGGGSDIIKLLNEQVNKEMQSSNLYMSMSSWCYTHSLDGAGLFLFDHAAEEYEHAKKLIIFLNENNVPVQLTSISAPEHKFEGLTQIFQKAYEHEQHISESINNIVDHAIKSKDHATFNFLQWYVAEQHEEEVLFKDILDKIELIGNENHGLYLADQYVKGIAKSRKS

SEQ ID NO: 5005 - protein, 1379 aa, Artificial Sequence
  SARS-CoV-2/Iceland/192/2020__EPI_ISL_417819 spike protein (1-1211)(I712C_T1077C) Ferritin construct
MFVFFVLLPLVSSQCVNLTTRTQLPPAYTNSFTRGVYYPDKVFRSSVLHSTQDLFLPFFSNVTWFHAIHVSGTNGTKRFDNPVLPFNDGVYFASTEKSNIIRGWIFGTTLDSKTQSLLIVNNATNVVIKVCEFQFCNDPFLGVYYHKNNKSWMESEFRVYSSANNCTFEYVSQPFLMDLEGKQGNFKNLREFVFKNIDGYFKIYSKHTPINLVRDLPQGFSALEPLVDLPIGINITRFQTLLALHRSYLTPGDSSSGWTAGAAAYYVGYLQPRTFLLKYNENGTITDAVDCALDPLSETKCTLKSFTVEKGIYQTSNFRVQPTESIVRFPNITNLCPFGEVFNATRFASVYAWNRKRISNCVADYSVLYNSASFSTFKCYGVSPTKLNDLCFTNVYADSFVIRGDEVRQIAPGQTGKIADYNYKLPDDFTGCVIAWNSNNLDSKVGGNYNYLYRLFRKSNLKPFERDISTEIYQAGSTPCNGVEGFNCYFPLQSYGFQPTNGVGYQPYRVVVLSFELLHAPATVCGPKKSTNLVKNKCVNFNFNGLTGTGVLTESNKKFLPFQQFGRDIADTTDAVRDPQTLEILDITPCSFGGVSVITPGTNTSNQVAVLYQGVNCTEVPVAIHADQLTPTWRVYSTGSNVFQTRAGCLIGAEHVNNSYECDIPIGAGICASYQTQTNSPRRARSVASQSIIAYTMSLGAENSVAYSNNSCAIPTNFTISVTTEILPVSMTKTSVDCTMYICGDSTECSNLLLQYGSFCTQLNRALTGIAVEQDKNTQEVFAQVKQIYKTPPIKDFGGFNFSQILPDPSKPSKRSFIEDLLFNKVTLADAGFIKQYGDCLGDIAARDLICAQKFNGLTVLPPLLTDEMIAQYTSALLAGTITSGWTFGAGAALQIPFAMQMAYRFNGIGVTQNVLYENQKLIANQFNSAIGKIQDSLSSTASALGKLQDVVNQNAQALNTLVKQLSSNFGAISSVLNDILSRLDKVEAEVQIDRLITGRLQSLQTYVTQQLIRAAEIRASANLAATKMSECVLGQSKRVDFCGKGYHLMSFPQSAPHGVVFLHVTYVPAQEKNFTCAPAICHDGKAHFPREGVFVSNGTHWFVTQRNFYEPQIITTDNTFVSGNCDVVIGIVNNTVYDPLQPELDSFKEELDKYFKNHTSPDVDLGDISGINASVVNIQKEIDRLNEVAKNLNESLIDLQELGKYEQYIKGGGGSDIIKLLNEQVNKEMQSSNLYMSMSSWCYTHSLDGAGLFLFDHAAEEYEHAKKLIIFLNENNVPVQLTSISAPEHKFEGLTQIFQKAYEHEQHISESINNIVDHAIKSKDHATFNFLQWYVAEQHEEEVLFKDILDKIELIGNENHGLYLADQYVKGIAKSRKS

SEQ ID NO: 5006 - protein, 1379 aa, Artificial Sequence
  SARS-CoV-2/Belgium/ULG-6939/2020__EPI_ISL_417020 spike protein (1-1211)(I712C_T1077C) Ferritin construct
MFVFLVLLPLVSSQCVNLTTRTQLPPAYTNSFTRGVYYPDKVFRSSVLHSTQDLFLPFFSNVTWFHAIHVSGTNGTKRFDNPVLPFNDGVYFASTEKSNIIRGWIFGTTLDSKTQSLLIVNNATNVVIKVCEFQFCNDPFLGVYYHKNNKSWMESEFRVYSSANNCTFEYVSQPFLMDLEGKQGNFKNLREFVFKNIDGYFKIYSKHTPINLVRDLPQGFSALEPLVDLPIGINITRFQTLLALHRSYLTPGDSSSGWTAGAAAYYVGYLQPRTFLLKYNENGTITDAVDCALDPLSETKCTLKSFTVEKGIYQTSNFRVQPTESIVRFPNITNLCPFGEVFNATRFASVYAWNRKRISNCVADYSVLYNSASFSTFKCYGVSPTKLNDLCFTNVYADSFVIRGDEVRQIAPGQTGKIADYNYKLPDDFTGCVIAWNSNNLDSKVGGNYNYLYRLFRKSNLKPFERDISTEIYQAGSTPCNGVEGFNCYFPLQSYGFQPTNGVGYQPYRVVVLSFELLHAPATVCGPKKSTNLVKNKCVNFNFNGLTGTGVLTESNKKFLPFQQFGRDIADTTDAVRDPQTLEILDITPCSFGGVSVITPGTNTSNQVAVLYQGVNCTEVPVAIHADQLTPTWRVYSTGSNVFQTRAGCLIGAEHVNNSYECDIPIGAGICASYQTQTNSPRRARSVASQSIIAYTMSLGAENSVVYSNNSCAIPTNFTISVTTEILPVSMTKTSVDCTMYICGDSTECSNLLLQYGSFCTQLNRALTGIAVEQDKNTQEVFAQVKQIYKTPPIKDFGGFNFSQILPDPSKPSKRSFIEDLLFNKVTLADAGFIKQYGDCLGDIAARDLICAQKFNGLTVLPPLLTDEMIAQYTSALLAGTITSGWTFGAGAALQIPFAMQMAYRFNGIGVTQNVLYENQKLIANQFNSAIGKIQDSLSSTASALGKLQDVVNQNAQALNTLVKQLSSNFGAISSVLNDILSRLDKVEAEVQIDRLITGRLQSLQTYVTQQLIRAAEIRASANLAATKMSECVLGQSKRVDFCGKGYHLMSFPQSAPHGVVFLHVTYVPAQEKNFTCAPAICHDGKAHFPREGVFVSNGTHWFVTQRNFYEPQIITTDNTFVSGNCDVVIGIVNNTVYDPLQPELDSFKEELDKYFKNHTSPDVDLGDISGINASVVNIQKEIDRLNEVAKNLNESLIDLQELGKYEQYIKGGGGSDIIKLLNEQVNKEMQSSNLYMSMSSWCYTHSLDGAGLFLFDHAAEEYEHAKKLIIFLNENNVPVQLTSISAPEHKFEGLTQIFQKAYEHEQHISESINNIVDHAIKSKDHATFNFLQWYVAEQHEEEVLFKDILDKIELIGNENHGLYLADQYVKGIAKSRKS

SEQ ID NO: 5007 - protein, 1379 aa, Artificial Sequence
  SARS-CoV-2/France/HF2496/2020__EPI_ISL_418231 spike protein (1-1211)(I712C_T1077C) Ferritin construct
MFVFLVLLPLVSSQCVNLTTRTQLPPAYTNSFTRGVYYPDKVFRSSVLHSTQDLFLPFFSNVTWFHAIHVSGTNGTKRFDNPVLPFNDGVYFASTEKSNIIRGWIFGTTLDSKTQSLLIVNNATNVVIKVCEFQFCNDPFLGVYYHKNNKSWMESEFRVYSSANNCTFEYVSQPFLMDLEGKQGNFKNLREFVFKNIDGYFKIYSKHTPINLVRDLPQGFSALEPLVDLPIGINITRFQTLLALHRSYLTPGDSSSGWTAGAAAYYVGYLQPRTFLLKYNENGTITDAVDCALDPLSETKCTLKSFTVEKGIYQTSNFRVQPTESIVRFPNITNLCPFGEVFNATRFASVYAWNRKRISNCVADYSVLYNSASFSTFKCYGVSPTKLNDLCFTNVYADSFVIRGDEVRQIAPGQTGKIADYNYKLPDDFTGCVIAWNSNNLDSKVGGNYNYLYRLFRKSNLKPFERDISTEIYQAGSTPCNGVEGFNCYFPLQSYGFQPTNGVGYQPYRVVVLSFELLHAPATVCGPKKSTNLVKNKCVNFNFNGLTGTGVLTESNKKFLPFQQFGRDIADTTDAVRDPQTLEILDITPCSFGGVSVITPGTNTSNQVAVLYQGVNCTEVPVAIHADQLTPTWRVYSTGSNVFQTRAGCLIGAEHVNNSYECDIPIGAGICASYQTQTNSPRRARSVASQSIIAYTMSLGAENSVAYSNNSCAIPTNFTISVTTEILPVSMTKTSVDCTMYICGDSTECSNLLLQYGSFCTQLNRALTGIAVEQDKNTQEVFAQVKQIYKTPPIKDFGGFNFSQILPDPSKPSKRSFIEDLLFNKVTLADAGFIKQYGDCLGDIVARDLICAQKFNGLTVLPPLLTDEMIAQYTSALLAGTITSGWTFGAGAALQIPFAMQMAYRFNGIGVTQNVLYENQKLIANQFNSAIGKIQDSLSSTASALGKLQDVVNQNAQALNTLVKQLSSNFGAISSVLNDILSRLDKVEAEVQIDRLITGRLQSLQTYVTQQLIRAAEIRASANLAATKMSECVLGQSKRVDFCGKGYHLMSFPQSAPHGVVFLHVTYVPAQEKNFTCAPAICHDGKAHFPREGVFVSNGTHWFVTQRNFYEPQIITTDNTFVSGNCDVVIGIVNNTVYDPLQPELDSFKEELDKYFKNHTSPDVDLGDISGINASVVNIQKEIDRLNEVAKNLNESLIDLQELGKYEQYIKGGGGSDIIKLLNEQVNKEMQSSNLYMSMSSWCYTHSLDGAGLFLFDHAAEEYEHAKKLIIFLNENNVPVQLTSISAPEHKFEGLTQIFQKAYEHEQHISESINNIVDHAIKSKDHATFNFLQWYVAEQHEEEVLFKDILDKIELIGNENHGLYLADQYVKGIAKSRKS

SEQ ID NO: 5008 - protein, 1379 aa, Artificial Sequence
  SARS-CoV-2/USA/WA-UW291/2020__EPI_ISL_418076 spike protein (1-1211)(I712C_T1077C) Ferritin construct
MFVFLVLLPLVSSQCVNLTTRTQLPPAYTNSFTRGVYYPDKVFRSSVLHSTQDLFLPFFSNVTWFHAIHVSGTNGTKRFDNPVLPFNDGVYFASTEKSNIIRGWIFGTTLDSKTQSLLIVNNATNVVIKVCEFQFCNDPFLGVYYHKNNKSWMESEFRVYSSANNCTFEYVSQPFLMDLEGKQGNFKNLREFVFKNIDGYFKIYSKHTPINLVRDLPQGFSALEPLVDLPIGINITRFQTLLALHRSYLTPGDSSSGWTAGAAAYYVGYLQPRTFLLKYNENGTITDAVDCALDPLSETKCTLKSFTVEKGIYQTSNFRVQPTESIVRFPNITNLCPFGEVFNATRFASVYAWNRKRISNCVADYSVLYNSASFSTFKCYGVSPTKLNDLCFTNVYADSFVIRGDEVRQIAPGQTGKIADYNYKLPDDFTGCVIAWNSNNLDSKVGGNYNYLYRLFRKSNLKPFERDISTEIYQAGSTPCNGVEGFNCYFPLQSYGFQPTNGVGYQPYRVVVLSFELLHAPATVCGPKKSTNLVKNKCVNFNFNGLTGTGVLTESNKKFLPFQQFGRDIADTTDAVRDPQTLEILDITPCSFGGVSVITPGTNTSNQVAVLYQGVNCTEVPVAIHADQLTPTWRVYSTGSNVFQTRAGCLIGAEHVNNSYECDIPIGAGICASYQTQTNSPRRARSVASQSIIAYTMSLGAENSVAYSNNSCAIPTNFTISVTTEILPVSMTKTSVDCTMYICGDSTECSNLLLQYGSFCTQLNRALTGIAVEQDKNTQEVFAQVKQIYKTPPIKDFGGFNFSQILPDPSKPSKRSFIEDLLFNKVTLADAGFIKQYGDCLGDIAARDLICAQKFNGLTVLPPLLTDEMIAQYTSALLAGTITSGWTFGAGAALQIPFAMQMAYRFNGIGVTQNVLYENQKLIANQFNSAIGKIQYSLSSTASALGKLQDVVNQNAQALNTLVKQLSSNFGAISSVLNDILSRLDKVEAEVQIDRLITGRLQSLQTYVTQQLIRAAEIRASANLAATKMSECVLGQSKRVDFCGKGYHLMSFPQSAPHGVVFLHVTYVPAQEKNFTCAPAICHDGKAHFPREGVFVSNGTHWFVTQRNFYEPQIITTDNTFVSGNCDVVIGIVNNTVYDPLQPELDSFKEELDKYFKNHTSPDVDLGDISGINASVVNIQKEIDRLNEVAKNLNESLIDLQELGKYEQYIKGGGGSDIIKLLNEQVNKEMQSSNLYMSMSSWCYTHSLDGAGLFLFDHAAEEYEHAKKLIIFLNENNVPVQLTSISAPEHKFEGLTQIFQKAYEHEQHISESINNIVDHAIKSKDHATFNFLQWYVAEQHEEEVLFKDILDKIELIGNENHGLYLADQYVKGIAKSRKS

SEQ ID NO: 5009 - protein, 1379 aa, Artificial Sequence; identical to SEQ ID NO: 4972
  SARS-CoV-2/Portugal/PT0034/2020__EPI_ISL_418019 spike protein (1-1211)(I712C_T1077C) Ferritin construct

SEQ ID NO: 5010 - protein, 1379 aa, Artificial Sequence
  SARS-CoV-2/Iceland/202/2020__EPI_ISL_417750 spike protein (1-1211)(I712C_T1077C) Ferritin construct
MFVFLVLLPLVSSQCVNLTTRTQLPPAYTNSFTRGVYYPDKVFRSSVLHSTQDLFLPFFSNVTWFHAIHVSGTNGTKRFDNPVLPFNDGVYFASTEKSNIIRGWIFGTTLDSKTQSLLIVNNATNVVIKVCEFQFCNDPFLGVYYHKNNKSWMESEFRVYSSANNCTFEYVSQPFLMDLEGKQGNFKNLREFVFKNIDGYFKIYSKHTPINLVRDLPQGFSALEPLVDLPIGINITRFQTLLALHRSYLTPGDSSSGWTAGAAAYYVGYLQPRTFLLKYNENGTITDAVDCALDPLSETKCTLKSFTVEKGIYQTSNFRVQPTESIVRFPNITNLCPFGEVFNATRFASVYAWNRKRISNCVADYSVLYNSASFSTFKCYGVSPTKLNDLCFTNVYADSFVIRGDEVRQIAPGQTGKIADYNYKLPDDFTGCVIAWNSNNLDSKVGGNYNYLYRLFRKSNLKPFERDISTEIYQAGSTPCNGVEGFNCYFPLQSYGFQPTNGVGYQPYRVVVLSFELLHAPATVCGPKKSTNLVKNKCVNFNFNGLTGTGVLTESNKKFLPFQQFGRDIADTTDAVRDPQTLEILDITPCSFGGVSVITPGTNTSNQVAVLYQDVNCTEVPVAIHADQLTPTWRVYSTGSNVFQTRAGCLIGAEHVNNSYECDIPIGAGICASYQTQTNSPRRARSVASQSIIAYTMSLGAENSVAYSNNSCAIPTNFTISVTTEILPVSMTKTSVDCTMYICGDSTECSNLLLQYGSFCTQLNRALTGIAVEQDKNTQEVFAQVKQIYKTPPIKDFGGFNFSQILPDPSKPSKRSFIEDLLFNKVTLADAGFIKQYGDCLGDIAARDLICAQKFNGLTVLPPLLTDEMIAQYTSALLAGTITSGWTFGAGAALQIPFAMQMAYRFNGIGVTQNVLYENQKLIANQFNSAIGKIQDSLSSTASALGKLQDVVNQNAQALNTLVKQLSSNFGAISSVLNDILSRLDKVEAEVQIDRLITGRLQSLQTYVTQQLIRAAEIRASANLAATKMSECVLGQSKRVDFCGKGYHLMSFPQSAPHGVVFLHVTYVPAQEKNFTCAPAICHDGKAHFPREGVFVSNGTHWFVTQRNFYEPQIITTDNTFVSGNCDVVIGIVNNTVYDPLQPELDSFKEELDKYFKNHTSPDVDLGDIPGINASVVNIQKEIDRLNEVAKNLNESLIDLQELGKYEQYIKGGGGSDIIKLLNEQVNKEMQSSNLYMSMSSWCYTHSLDGAGLFLFDHAAEEYEHAKKLIIFLNENNVPVQLTSISAPEHKFEGLTQIFQKAYEHEQHISESINNIVDHAIKSKDHATFNFLQWYVAEQHEEEVLFKDILDKIELIGNENHGLYLADQYVKGIAKSRKS

SEQ ID NO: 5011 - protein, 1379 aa, Artificial Sequence
  SARS-CoV-2/USA/WA-UW261/2020__EPI_ISL_418046 spike protein (1-1211)(I712C_T1077C) Ferritin construct
MFVFLVLLPLVSSQCVNLTTRTQLPPAYTNSFTRGVYYPDKVFRSSVLHSTQDLFLPFFSNVTWFHAIHVSGTNGTKRFDNPVLPFNDGVYFASTEKSNIIRGWIFGTTLDSKTQSLLIVNNATNVVIKVCEFQFCNDPFLGVYYHKNNKSWMESEFRVYSSANNCTFEYVSQPFLMDLEGKQGNFKNLREFVFKNIDGYFKIYSKHTPINLVRDLPQGFSALEPLVDLPIGINITRFQTLLALHRSYLTPGDSSSGWTAGAAAYYVGYLQPRTFLLKYNENGTITDAVDCALDPLSETKCTLKSFTVEKGIYQTSNFRVQPTESIVRFPNITNLCPFGEVFNATRFTSVYAWNRKRISNCVADYSVLYNSASFSTFKCYGVSPTKLNDLCFTNVYADSFVIRGDEVRQIAPGQTGKIADYNYKLPDDFTGCVIAWNSNNLDSKVGGNYNYLYRLFRKSNLKPFERDISTEIYQAGSTPCNGVEGFNCYFPLQSYGFQPTNGVGYQPYRVVVLSFELLHAPATVCGPKKSTNLVKNKCVNFNFNGLTGTGVLTESNKKFLPFQQFGRDIADTTDAVRDPQTLEILDITPCSFGGVSVITPGTNTSNQVAVLYQDVNCTEVPVAIHADQLTPTWRVYSTGSNVFQTRAGCLIGAEHVNNSYECDIPIGAGICASYQTQTNSPRRARSVASQSIIAYTMSLGAENSVAYSNNSCAIPTNFTISVTTEILPVSMTKTSVDCTMYICGDSTECSNLLLQYGSFCTQLNRALTGIAVEQDKNTQEVFAQVKQIYKTPPIKDFGGFNFSQILPDPSKPSKRSFIEDLLFNKVTLADAGFIKQYGDCLGDIAARDLICAQKFNGLTVLPPLLTDEMIAQYTSALLAGTITSGWTFGAGAALQIPFAMQMAYRFNGIGVTQNVLYENQKLIANQFNSAIGKIQDSLSSTASALGKLQDVVNQNAQALNTLVKQLSSNFGAISSVLNDILSRLDKVEAEVQIDRLITGRLQSLQTYVTQQLIRAAEIRASANLAATKMSECVLGQSKRVDFCGKGYHLMSFPQSAPHGVVFLHVTYVPAQEKNFTCAPAICHDGKAHFPREGVFVSNGTHWFVTQRNFYEPQIITTDNTFVSGNCDVVIGIVNNTVYDPLQPELDSFKEELDKYFKNHTSPDVDLGDISGINASVVNIQKEIDRLNEVAKNLNESLIDLQELGKYEQYIKGGGGSDIIKLLNEQVNKEMQSSNLYMSMSSWCYTHSLDGAGLFLFDHAAEEYEHAKKLIIFLNENNVPVQLTSISAPEHKFEGLTQIFQKAYEHEQHISESINNIVDHAIKSKDHATFNFLQWYVAEQHEEEVLFKDILDKIELIGNENHGLYLADQYVKGIAKSRKS

SEQ ID NO: 5012 - protein, 1379 aa, Artificial Sequence
  SARS-CoV-2/Portugal/PT0035/2020__EPI_ISL_418020 spike protein (1-1211)(I712C_T1077C) Ferritin construct
MFVFLVLLPLVSSQCVNLTTRTQLPPAYTNSFTRGVYYPDKVFRSSVLHSTQDLFLPFFSNVTWFHAIHVSGTNGTKRFDNPVLPFNDGVYFASTEKSNIIRGWIFGTTLDSKTQSLLIVNNATNVVIKVCEFQFCNDPFLGVYYHKNNKSWMESEFRVYSSANNCTFEYVSQPFLMDLEGKQGNFKNLREFVFKNIDGYFKIYSKHTPINLVRDLPQGFSALEPLVDLPIGINITRFQTLLALHRSYLTPGDSSSGWTAGAAAYYVGYLQPRTFLLKYNENGTITDAVDCALDPLSETKCTLKSFTVEKGIYQTSNFRVQPTESIVRFPNITNLCPFGEVFNATRFASVYAWNRKRISNCVADYSVLYNSASFSTFKCYGVSPTKLNDLCFTNVYADSFVIRGDEVRQIAPGQTGKIADYNYKLPDDFTGCVIAWNSNNLDSKVGGNYNYLYRLFRKSNLKPFERDISTEIYQAGSTPCNGVEGFNCYFPLQSYGFQPTNGVGYQPYRVVVLSFELLHAPATVCGPKKSTNLVKNKCVNFNFNGLTGTGVLTESNKKFLPFQQFGRDIADTTDAVRDPQTLEILDITPCSFGGVSVITPGTNTSNQVAVLYQDVNCTEVPVAIHADQLTPTWRVYSTGSNVFQTRAGCLIGAEHVNNSYECDIPIGAGICASYQTQTNSPRRARSVASQSIIAYTMSLGAENSVAYSNNSCAIPTNFTISVTTEILPVSMTKTSVDCTMYICGDSTECSNLLLQYGSFCTQLNRALTGIAVEQDKNTQEVFAQVKQIYKTPPIKDFGGFNFSQILPDPSKPSKRSFIEDLLFNKVTLADAGFIKQYGDCLGDISARDLICAQKFNGLTVLPPLLTDEMIAQYTSALLAGTITSGWTFGAGAALQIPFAMQMAYRFNGIGVTQNVLYENQKLIANQFNSAIGKIQDSLSSTASALGKLQDVVNQNAQALNTLVKQLSSNFGAISSVLNDILSRLDKVEAEVQIDRLITGRLQSLQTYVTQQLIRAAEIRASANLAATKMSECVLGQSKRVDFCGKGYHLMSFPQSAPHGVVFLHVTYVPAQEKNFTCAPAICHDGKAHFPREGVFVSNGTHWFVTQRNFYEPQIITTDNTFVSGNCDVVIGIVNNTVYDPLQPELDSFKEELDKYFKNHTSPDVDLGDISGINASVVNIQKEIDRLNEVAKNLNESLIDLQELGKYEQYIKGGGGSDIIKLLNEQVNKEMQSSNLYMSMSSWCYTHSLDGAGLFLFDHAAEEYEHAKKLIIFLNENNVPVQLTSISAPEHKFEGLTQIFQKAYEHEQHISESINNIVDHAIKSKDHATFNFLQWYVAEQHEEEVLFKDILDKIELIGNENHGLYLADQYVKGIAKSRKS

SEQ ID NO: 5013 - protein, 1379 aa, Artificial Sequence
  SARS-CoV-2/USA/NY-NYUMC7/2020__EPI_ISL_418192 spike protein (1-1211)(I712C_T1077C) Ferritin construct
MFVFLVLLPLVSSQCVNLTTRTQLPPAYTNSFTRGVYYPDKVFRSSVLHSTQDLFLPFFSNVTWFHAIHVSGTNGTKRFDNPVLPFNDGVYFASTEKSNIIRGWIFGTTLDSKTQSLLIVNNATNVVIKVCEFQFCNDPFLGVYHHKNNKSWMESEFRVYSSANNCTFEYVSQPFLMDLEGKQGNFKNLREFVFKNIDGYFKIYSKHTPINLVRDLPQGFSALEPLVDLPIGINITRFQTLLALHRSYLTPGDSSSGWTAGAAAYYVGYLQPRTFLLKYNENGTITDAVDCALDPLSETKCTLKSFTVEKGIYQTSNFRVQPTESIVRFPNITNLCPFGEVFNATRFASVYAWNRKRISNCVADYSVLYNSASFSTFKCYGVSPTKLNDLCFTNVYADSFVIRGDEVRQIAPGQTGKIADYNYKLPDDFTGCVIAWNSNNLDSKVGGNYNYLYRLFRKSNLKPFERDISTEIYQAGSTPCNGVEGFNCYFPLQSYGFQPTNGVGYQPYRVVVLSFELLHAPATVCGPKKSTNLVKNKCVNFNFNGLTGTGVLTESNKKFLPFQQFGRDIADTTDAVRDPQTLEILDITPCSFGGVSVITPGTNTSNQVAVLYQGVNCTEVPVAIHADQLTPTWRVYSTGSNVFQTRAGCLIGAEHVNNSYECDIPIGAGICASYQTQTNSPRRARSVASQSIIAYTMSLGAENSVAYSNNSCAIPTNFTISVTTEILPVSMTKTSVDCTMYICGDSTECSNLLLQYGSFCTQLNRALTGIAVEQDKNTQEVFAQVKQIYKTPPIKDFGGFNFSQILPDPSKPSKRSFIEDLLFNKVTLADAGFIKQYGDCLGDIAARDLICAQKFNGLTVLPPLLTDEMIAQYTSALLAGTITSGWTFGAGAALQIPFAMQMAYRFNGIGVTQNVLYENQKLIANQFNSAIGKIQDSLSSTASALGKLQDVVNQNAQALNTLVKQLSSNFGAISSVLNDILSRLDKVEAEVQIDRLITGRLQSLQTYVTQQLIRAAEIRASANLAATKMSECVLGQSKRVDFCGKGYHLMSFPQSAPHGVVFLHVTYVPAQEKNFTCAPAICHDGKAHFPREGVFVSNGTHWFVTQRNFYEPQIITTDNTFVSGNCDVVIGIVNNTVYDPLQPELDSFKEELDKYFKNHTSPDVDLGDISGINASVVNIQKEIDRLNEVAKNLNESLIDLQELGKYEQYIKGGGGSDIIKLLNEQVNKEMQSSNLYMSMSSWCYTHSLDGAGLFLFDHAAEEYEHAKKLIIFLNENNVPVQLTSISAPEHKFEGLTQIFQKAYEHEQHISESINNIVDHAIKSKDHATFNFLQWYVAEQHEEEVLFKDILDKIELIGNENHGLYLADQYVKGIAKSRKS

SEQ ID NO: 5014 - protein, 1379 aa, Artificial Sequence
  SARS-CoV-2/Iceland/189/2020__EPI_ISL_417709 spike protein (1-1211)(I712C_T1077C) Ferritin construct
MFVFLVLLPLVSSQCVNLTTRTQLPPAYTNSFTRGVYYPDKVFRSSVLHSTQDLFLPFFSNVTWFHAIHVSGTNGTKRFDNPVLPFNDGVYFASTEKSNIIRGWIFGTTLDSKTQSLLIVNNATNVVIKVCEFQFCNDPFLGVYYHKNNKSWMESEFRVYSSANNCTFEYVSQPFLMDLEGKQGNFKNLREFVFKNIDGYFKIYSKHTPINLVRDLPQGFSALEPLVDLPIGINITRFQTLLALHRSYLTPGDSSSGWTAGAAAYYVGYLQPRTFLLKYNENGTITDAVDCALDPLSETKCTLKSFTVEKGIYQTSNFRVQPTESIVRFPNITNLCPFGEVFNATRFASVYAWNRKRISNCVADYSVLYNSASFSTFKCYGVSPTKLNDLCFTNVYADSFVIRGDEVRQIAPGQTGKIADYNYKLPDDFTGCVIAWNSNNLDSKVGGNYNYLYRLFRKSNLKPFERDISTEIYQAGSTPCNGVEGFNCYFPLQSYGFQPTNGVGYQPYRVVVLSFELLHAPATVCGPKKSTNLVKNKCVNFNFNGLTGTGVLTESNKKFLPFQQFGRDIADTTDAVRDPQTLEILDITPCSFGGVSVITPGTNTSNQVAVLYQGVNCTEVPVAIHADQLTPTWRVYSTGSNVFQTRAGCLIGAEHVNNSYECDIPIGAGICASYQTQTNSPRRARSVASQSIIAYTMSLGAENSVAYSNNSCAIPTNFTISVTTEILPVSMTKTSVDCTMYICGDSTECSNLLLQYGSFCTQLNRALTGIAVEQDKNTQEVFAQVKQIYKTPPIKDFGGFNFSQILPDPSKPSKRSFIEDLLFNKVTLADAGFTKQYGDCLGDIAARDLICAQKFNGLTVLPPLLTDEMIAQYTSALLAGTITSGWTFGAGAALQIPFAMQMAYRFNGIGVTQNVLYENQKLIANQFNSAIGKIQDSLSSTASALGKLQDVVNQNAQALNTLVKQLSSNFGAISSVLNDILSRLDKVEAEVQIDRLITGRLQSLQTYVTQQLIRAAEIRASANLAATKMSECVLGQSKRVDFCGKGYHLMSFPQSAPHGVVFLHVTYVPAQEKNFTCAPAICHDGKAHFPREGVFVSNGTHWFVTQRNFYEPQIITTDNTFVSGNCDVVIGIVNNTVYDPLQPELDSFKEELDKYFKNHTSPDVDLGDISGINASVVNIQKEIDRLNEVAKNLNESLIDLQELGKYEQYIKGGGGSDIIKLLNEQVNKEMQSSNLYMSMSSWCYTHSLDGAGLFLFDHAAEEYEHAKKLIIFLNENNVPVQLTSISAPEHKFEGLTQIFQKAYEHEQHISESINNIVDHAIKSKDHATFNFLQWYVAEQHEEEVLFKDILDKIELIGNENHGLYLADQYVKGIAKSRKS

SEQ ID NO: 5015 - protein, 1379 aa, Artificial Sequence
  SARS-CoV-2/Australia/NSW56/2020__EPI_ISL_417408 spike protein (1-1211)(I712C_T1077C) Ferritin construct
MFVFLVLLPLVSSQCVNLTTRTQLPPAYTNSFTRGVYYPDKVFRSSVLHSTQDLFLPFFSNVTWFHAIHVSGTNGTKRFDNPVLPFNDGVYFASTEKSNIIRGWIFGTTLDSKTQSLLIVNNATNVVIKVCEFQFCNDPFLGVYYHKNNKSWMESEFRVYSSANNCTFEYVSQPFLMDLEGKQGNFKNLREFVFKNIDGYFKIYSKHTPINLVRDLPQGFSALEPLVDLPIGINITRFQTLLALHRSYLTPGDSSSGWTAGAAAYYVGYLQPRTFLLKYNENGTITDAVDCALDPLSETKCTLKSFTVEKGIYQTSNFRVQPTESIVRFPNITNLCPFGEVFNATRFASVYAWNRKRISNCVADYSVLYNSASFSTFKCYGVSPTKLNDLCFTNVYADSFVIRGDEVRQIAPGQTGKIADYNYKLPDDFTGCVIAWNSNNLDSKVGGNYNYLYRLFRKSNLKPFERDISTEIYQAGSTPCNGVEGFNCYFPLQSYGFQPTNGVGYQPYRVVVLSFELLHAPATVCGPKKSTNLVKNKCVNFNFNGLTGTGVLTESNKKFLPFQQFGRDIADTTDAVRDPQTLEILDITPCSFGGVSVITPGTNTSNQVAVLYQDVNCTEVPVAIHADQLTPTWRVYSTGSNVFQTRAGCLIGAEHVNNSYECDIPIGAGICASYQTQTNSPRRARSVASQSIIAYTMSLGAENSVAYSNNSCAIPTNFTISVTTEILPVSMTKTSVDCTMYICGDSTECSNLLLQYGSFCTQLNRALTGIAVEQDKNTQEVFAQVKQIYKTPPIKDFGGFNFSQILPDSSKPSKRSFIEDLLFNKVTLADAGFIKQYGDCLGDIAARDLICAQKFNGLTVLPPLLTDEMIAQYTSALLAGTITSGWTFGAGAALQIPFAMQMAYRFNGIGVTQNVLYENQKLIANQFNSAIGKIQDSLSSTASALGKLQDVVNQNAQALNTLVKQLSSNFGAISSVLNDILSRLDKVEAEVQIDRLITGRLQSLQTYVTQQLIRAAEIRASANLAATKMSECVLGQSKRVDFCGKGYHLMSFPQSAPHGVVFLHVTYVPAQEKNFTCAPAICHDGKAHFPREGVFVSNGTHWFVTQRNFYEPQIITTDNTFVSGNCDVVIGIVNNTVYDPLQPELDSFKEELDKYFKNHTSPDVDLGDISGINASVVNIQKEIDRLNEVAKNLNESLIDLQELGKYEQYIKGGGGSDIIKLLNEQVNKEMQSSNLYMSMSSWCYTHSLDGAGLFLFDHAAEEYEHAKKLIIFLNENNVPVQLTSISAPEHKFEGLTQIFQKAYEHEQHISESINNIVDHAIKSKDHATFNFLQWYVAEQHEEEVLFKDILDKIELIGNENHGLYLADQYVKGIAKSRKS

SEQ ID NO: 5016 - protein, 1379 aa, Artificial Sequence
  SARS-CoV-2/Iceland/280/2020__EPI_ISL_417608 spike protein (1-1211)(I712C_T1077C) Ferritin construct
MFVFLVLLPLVSSQCVNLTTRTQLPPAYTNSFTRGVYYPDKVFRSSVLHSTQDLFLPFFSNVTWFHAIHVSGTNGTKRFDNPVLPFNDGVYFASTEKSNIIRGWIFGTTLDSKTQSLLIVNNATNVVIKVCEFQFCNDPFLGVYYHKNNKSWMESEFRVYSSANNCTFEYVSQPFLMDLEGKQGNFKNLREFVFKNIDGYFKIYSKHTPINLVRDLPQGFSALEPLVDLPIGINITRFQTLLALHRSYLTPGDSSSGWTAGAAAYYVGYLQPRTFLLKYNENGTITDAVDCALDPLSETKCTLKSFTVEKGIYQTSNFRVQPTESIVRFPNITNLCPFGEVFNATRFASVYAWNRKRISNCVADYSVLYNSASFSTFKCYGVSPTKLNDLCFTNVYADSFVIRGDEVRQIAPGQTGKIADYNYKLPDDFTGCVIAWNSNNLDSKVGGNYNYLYRLFRKSNLKPFERDISTEIYQAGSTPCNGVEGFNCYFPLQSYGFQPTNGVGYQPYRVVVLSFELLHAPATVCGPKKSTNLVKNKCVNFNFNGLTGTGVLTESNKKFLPFQQFGRDIADTTDAVRDPQTLEILDITPCSFGGVSVITPGTNTSNQVAVLYQGVNCTEVPVAIHADQLTPTWRVYSTGSNVFQTRAGCLIGAEHVNNSYECDIPIGAGICASYHTQTNSPRRARSVASQSIIAYTMSLGAENSVAYSNNSCAIPTNFTISVTTEILPVSMTKTSVDCTMYICGDSTECSNLLLQYGSFCTQLNRALTGIAVEQDKNTQEVFAQVKQIYKTPPIKDFGGFNFSQILPDPSKPSKRSFIEDLLFNKVTLADAGFIKQYGDCLGDIAARDLICAQKFNGLTVLPPLLTDEMIAQYTSALLAGTITSGWTFGAGAALQIPFAMQMAYRFNGIGVTQNVLYENQKLIANQFNSAIGKIQDSLSSTASALGKLQDVVNQNAQALNTLVKQLSSNFGAISSVLNDILSRLDKVEAEVQIDRLITGRLQSLQTYVTQQLIRAAEIRASANLAATKMSECVLGQSKRVDFCGKGYHLMSFPQSAPHGVVFLHVTYVPAQEKNFTCAPAICHDGKAHFPREGVFVSNGTHWFVTQRNFYEPQIITTDNTFVSGNCDVVIGIVNNTVYDPLQPELDSFKEELDKYFKNHTSPDVDLGDISGINASVVNIQKEIDRLNEVAKNLNESLIDLQELGKYEQYIKGGGGSDIIKLLNEQVNKEMQSSNLYMSMSSWCYTHSLDGAGLFLFDHAAEEYEHAKKLIIFLNENNVPVQLTSISAPEHKFEGLTQIFQKAYEHEQHISESINNIVDHAIKSKDHATFNFLQWYVAEQHEEEVLFKDILDKIELIGNENHGLYLADQYVKGIAKSRKS

SEQ ID NO: 5017 - protein, 1379 aa, Artificial Sequence; identical to SEQ ID NO: 4972
  SARS-CoV-2/Iceland/247/2020__EPI_ISL_417575 spike protein (1-1211)(I712C_T1077C) Ferritin construct

SEQ ID NO: 5018 - protein, 1379 aa, Artificial Sequence
  SARS-CoV-2/Iceland/238/2020__EPI_ISL_417566 spike protein (1-1211)(I712C_T1077C) Ferritin construct
MFVFLVLLPLVSSQCVNLTTRTQLPPAYTNSFTRGVYYPDKVFRSSVLHSTQDLFLPFFSNVTWFHAIHVSGTNGTKRFDNPVLPFNDGVYFASTEKSNIIRGWIFGTTLDSKTQSLLIVNNATNVVIKVCEFQFCNDPFLGVYYHKNNKSWMESEFRVYSSANNCTFEYVSQPFLMDLEGKQGNFKNLREFVFKNIDGYFKIYSKHTPINLVRDLPQGFSALEPLVDLPIGINITRFQTLLALHRSYLTPGDSSSGWTAGAAAYYVGYLQPRTFLLKYNENGTITDAVDCALDPLSETKCTLKSFTVEKGIYQTSNFRVQPTESIVRFPNITNLCPFGEVFNATRFASVYAWNRKRISNCVADYSVLYNSASFSTFKCYGVSPTKLNDLCFTNVYADSFVIRGDEVRQIAPGQTGKIADYNYKLPDDFTGCVIAWNSNNLDSKVGGNYNYLYRLFRKSNLKPFERDISTEIYQAGSTPCNGVEGFNCYFPLQSYGFQPTNGVGYQPYRVVVLSFELLHAPATVCGPKKSTNLVKNKCVNFNFNGLTGTGVLTESNKKFLPFQQFGRDIADTTDAVRDPQTLEILDITPCSFGGVSVITPGTNTSNQVAVLYQGVNCTEVPVAIHADQLTPTWRVYSTGSNVFQTRAGCLIGAEHVNNSYECDIPIGAGICASYQTQTNSPRRARSVASQSIIAYTMSLGAENSVAYSNNSCAIPTNFTISVTTEILPVSMTKTSVDCTMYICGDSTECSNLLLQYGSFCTQLNRALTGIAVEQDKNTQEVFAQVKQIYKTPPIKDFGGFNFSQILPDPSKPSKRSFIEDLLFNKVTLADVGFIKQYGDCLGDIAARDLICAQKFNGLTVLPPLLTDEMIAQYTSALLAGTITSGWTFGAGAALQIPFAMQMAYRFNGIGVTQNVLYENQKLIANQFNSAIGKIQDSLSSTASALGKLQDVVNQNAQALNTLVKQLSSNFGAISSVLNDILSRLDKVEAEVQIDRLITGRLQSLQTYVTQQLIRAAEIRASANLAATKMSECVLGQSKRVDFCGKGYHLMSFPQSAPHGVVFLHVTYVPAQEKNFTCAPAICHDGKAHFPREGVFVSNGTHWFVTQRNFYEPQIITTDNTFVSGNCDVVIGIVNNTVYDPLQPELDSFKEELDKYFKNHTSPDVDLGDISGINASVVNIQKEIDRLNEVAKNLNESLIDLQELGKYEQYIKGGGGSDIIKLLNEQVNKEMQSSNLYMSMSSWCYTHSLDGAGLFLFDHAAEEYEHAKKLIIFLNENNVPVQLTSISAPEHKFEGLTQIFQKAYEHEQHISESINNIVDHAIKSKDHATFNFLQWYVAEQHEEEVLFKDILDKIELIGNENHGLYLADQYVKGIAKSRKS

SEQ ID NO: 5019 - protein, 1379 aa, Artificial Sequence
  SARS-CoV-2/Greece/16/2020__EPI_ISL_418265 spike protein (1-1211)(I712C_T1077C) Ferritin construct
MFVFLVLLPLVSSQCVNLTTRTQLPPAYTNSFTRGVYYPDKVFRSSVLHSTQDLFLPFFSNVTWFHAIHVSGTNGTKRFDNPVLPFNDGVYFASTEKSNIIRGWIFGTTLDSKTQSLLIVNNATNVVIKVCEFQFCNDPFLGVYYHKNNKSWMESEFRVYSSANNCTFEYVSQPFLMDLEGKQGNFKNLREFVFKNVDGYFKIYSKHTPINLVRDLPQGFSALEPLVDLPIGINITRFQTLLALHRSYLTPGDSSSGWTAGAAAYYVGYLQPRTFLLKYNENGTITDAVDCALDPLSETKCTLKSFTVEKGIYQTSNFRVQPTESIVRFPNITNLCPFGEVFNATRFASVYAWNRKRISNCVADYSVLYNSASFSTFKCYGVSPTKLNDLCFTNVYADSFVIRGDEVRQIAPGQTGKIADYNYKLPDDFTGCVIAWNSNNLDSKVGGNYNYLYRLFRKSNLKPFERDISTEIYQAGSTPCNGVEGFNCYFPLQSYGFQPTNGVGYQPYRVVVLSFELLHAPATVCGPKKSTNLVKNKCVNFNFNGLTGTGVLTESNKKFLPFQQFGRDIADTTDAVRDPQTLEILDITPCSFGGVSVITPGTNTSNQVAVLYQDVNCTEVPVAIHADQLTPTWRVYSTGSNVFQTRAGCLIGAEHVNNSYECDIPIGAGICASYQTQTNSPRRARSVASQSIIAYTMSLGAENSVAYSNNSCAIPTNFTISVTTEILPVSMTKTSVDCTMYICGDSTECSNLLLQYGSFCTQLNRALTGIAVEQDKNTQEVFAQVKQIYKTPPIKDFGGFNFSQILPDPSKPSKRSFIEDLLFNKVTLADAGFIKQYGDCLGDIAARDLICAQKFNGLTVLPPLLTDEMIAQYTSALLAGTITSGWTFGAGAALQIPFAMQMAYRFNGIGVTQNVLYENQKLIANQFNSAIGKIQDSLSSTASALGKLQDVVNQNAQALNTLVKQLSSNFGAISSVLNDILSRLDKVEAEVQIDRLITGRLQSLQTYVTQQLIRAAEIRASANLAATKMSECVLGQSKRVDFCGKGYHLMSFPQSAPHGVVFLHVTYVPAQEKNFTCAPAICHDGKAHFPREGVFVSNGTHWFVTQRNFYEPQIITTDNTFVSGNCDVVIGIVNNTVYDPLQPELDSFKEELDKYFKNHTSPDVDLGDISGINASVVNIQKEIDRLNEVAKNLNESLIDLQELGKYEQYIKGGGGSDIIKLLNEQVNKEMQSSNLYMSMSSWCYTHSLDGAGLFLFDHAAEEYEHAKKLIIFLNENNVPVQLTSISAPEHKFEGLTQIFQKAYEHEQHISESINNIVDHAIKSKDHATFNFLQWYVAEQHEEEVLFKDILDKIELIGNENHGLYLADQYVKGIAKSRKS

SEQ ID NO: 5020 - protein, 1379 aa, Artificial Sequence
  SARS-CoV-2/Iceland/319/2020__EPI_ISL_417648 spike protein (1-1211)(I712C_T1077C) Ferritin construct
MFVFLVLLPLVSSQCVNLTTRTQLPPAYTNSFTRGVYYPDKVFRSSVLHSTQDLFLPFFSNVTWFHAIHVSGTNGTKRFDNPVLPFNDGVYFASTEKSNIIRGWIFGTTLDSKTQSLLIVNNATNVVIKVCEFQFCNDPFLGVYYHKNNKSWMESEFRVYSSANNCTFEYVSQPFLIDLEGKQGNFKNLREFVFKNIDGYFKIYSKHTPINLVRDLPQGFSALEPLVDLPIGINITRFQTLLALHRSYLTPGDSSSGWTAGAAAYYVGYLQPRTFLLKYNENGTITDAVDCALDPLSETKCTLKSFTVEKGIYQTSNFRVQPTESIVRFPNITNLCPFGEVFNATRFASVYAWNRKRISNCVADYSVLYNSASFSTFKCYGVSPTKLNDLCFTNVYADSFVIRGDEVRQIAPGQTGKIADYNYKLPDDFTGCVIAWNSNNLDSKVGGNYNYLYRLFRKSNLKPFERDISTEIYQAGSTPCNGVEGFNCYFPLQSYGFQPTNGVGYQPYRVVVLSFELLHAPATVCGPKKSTNLVKNKCVNFNFNGLTGTGVLTESNKKFLPFQQFGRDIADTTDAVRDPQTLEILDITPCSFGGVSVITPGTNTSNQVAVLYQGVNCTEVPVAIHADQLTPTWRVYSTGSNVFQTRAGCLIGAEHVNNSYECDIPIGAGICASYQTQTNSPRRARSVASQSIIAYTMSLGAENSVAYSNNSCAIPTNFTISVTTEILPVSMTKTSVDCTMYICGDSTECSNLLLQYGSFCTQLNRALTGIAVEQDKNTQEVFAQVKQIYKTPPIKDFGGFNFSQILPDPSKPSKRSFIEDLLFNKVTLADAGFIKQYGDCLGDIAARDLICAQKFNGLTVLPPLLTDEMIAQYTSALLAGTITSGWTFGAGAALQIPFAMQMAYRFNGIGVTQNVLYENQKLIANQFNSAIGKIQDSLSSTASALGKLQDVVNQNAQALNTLVKQLSSNFGAISSVLNDILSRLDKVEAEVQIDRLITGRLQSLQTYVTQQLIRAAEIRASANLAATKMSECVLGQSKRVDFCGKGYHLMSFPQSAPHGVVFLHVTYVPAQEKNFTCAPAICHDGKAHFPREGVFVSNGTHWFVTQRNFYEPQIITTDNTFVSGNCDVVIGIVNNTVYDPLQPELDSFKEELDKYFKNHTSPDVDLGDISGINASVVNIQKEIDRLNEVAKNLNESLIDLQELGKYEQYIKGGGGSDIIKLLNEQVNKEMQSSNLYMSMSSWCYTHSLDGAGLFLFDHAAEEYEHAKKLIIFLNENNVPVQLTSISAPEHKFEGLTQIFQKAYEHEQHISESINNIVDHAIKSKDHATFNFLQWYVAEQHEEEVLFKDILDKIELIGNENHGLYLADQYVKGIAKSRKS

SEQ ID NO: 5021 - protein, 1379 aa, Artificial Sequence
  SARS-CoV-2/Congo/94/2020__EPI_ISL_417947 spike protein (1-1211)(I712C_T1077C) Ferritin construct
MFVFLVLLPLVSSQCVNLTTRTQLPPAYTNSFTRGVYYPDKVFRSSVLHSTQDLFLPFFSNVTWFHAIHVSGTNGTKRFDNPVLPFNDGVYFASTEKSNIIRGWIFGTTLDSKTQSLLIVNNATNVVIKVCEFQFCNDPFLGVYYHKNNKSWMESEFRVYSSANNCTFEYVSQPFLMDLEGKQGNFKNLREFVFKNIDGYFKIYSKHTPINLVRDLPQGFSALEPLVDLPIGINITRFQTLLALHRSYLTPGDSSSGWTAGAAAYYVGYLQPRTFLLKYNENGTITDAVDCALDPLSETKCTLKSFTVEKGIYQTSNFRVQPTESIVRFPNITNLCPFGEVFNATRFASVYAWNRKRISNCVADYSVLYNSASFSTFKCYGVSPTKLNDLCFTNVYADSFVIRGDEVRQIAPGQTGKIADYNYKLPDDFTGCVIAWNSNNLDSKVGGNYNYLYRLFRKSNLKPFERDISTEIYQAGSTPCNGVEGFNCYFPLQSYGFQPTNGVGYQPYRVVVLSFELLHAPATVCGPKKSTNLVKNKCVNFNFNGLTGTGVLTESNKKFLPFQQFGRDIADTTDAVRDPQTLEILDITPCSFGGVSVITPGTNTSNQVAVLYQGVNCTEVPVAIHADQLTPTWRVYSTGSNVFQTRAGCLIGAEHVNNSYECDIPIGAGICASYQTQTNSPRRARSVASQSIIAYTMSLGAENSVAYSNNSCAIPTNFTISVTTEILPVSMTKTSVDCTMYICGDSTECSNLLLQYGSFCTQLNRALTGIAVEQDKNTQEVFAQVKQIYKTPPIKDFGGFNFSQILPDPSKPSKRSFIEDILFNKVTLADAGFIKQYGDCLGDIAARDLICAQKFNGLTVLPPLLTDEMIAQYTSALLAGTITSGWTFGAGAALQIPFAMQMAYRFNGIGVTQNVLYENQKLIANQFNSAIGKIQDSLSSTASALGKLQDVVNQNAQALNTLVKQLSSNFGAISSVLNDILSRLDKVEAEVQIDRLITGRLQSLQTYVTQQLIRAAEIRASANLAATKMSECVLGQSKRVDFCGKGYHLMSFPQSAPHGVVFLHVTYVPAQEKNFTCAPAICHDGKAHFPREGVFVSNGTHWFVTQRNFYEPQIITTDNTFVSGNCDVVIGIVNNTVYDPLQPELDSFKEELDKYFKNHTSPDVDLGDISGINASVVNIQKEIDRLNEVAKNLNESLIDLQELGKYEQYIKGGGGSDIIKLLNEQVNKEMQSSNLYMSMSSWCYTHSLDGAGLFLFDHAAEEYEHAKKLIIFLNENNVPVQLTSISAPEHKFEGLTQIFQKAYEHEQHISESINNIVDHAIKSKDHATFNFLQWYVAEQHEEEVLFKDILDKIELIGNENHGLYLADQYVKGIAKSRKS

SEQ ID NO: 5022 - protein, 1379 aa, Artificial Sequence
  SARS-CoV-2/Congo/158/2020__EPI_ISL_417950 spike protein (1-1211)(I712C_T1077C) Ferritin construct
MFVFLVLLPLVSSQCVNLTTRTQLPPAYTNSFTRGVYYPDKVFRSSVLHSTQDLFLPFFSNVTWFHAIHVSGTNGTKRFDNPVLPFNDGVYFASTEKSNIIRGWIFGTTLDSKTQSLLIVNNATNVVIKVCEFQFCNDPFLGVYYHKNNKSWMESEFRVYSSANNCTFEYVSQPFLMDLEGKQGNFKNLREFVFKNIDGYFKIYSKHTPINLVRDLPQGFSALEPLVDLPIGINITRFQTLLALHRSYLTPGDSSSGWTAGAAAYYVGYLQPRTFLLKYNENGTITDAVDCALDPLSETKCTLKSFTVEKGIYQTSNFRVQPTESIVRFPNITNLCPFGEVFNATRFASVYAWNRKRISNCVADYSVLYNSASFSTFKCYGVSPTKLNDLCFTNVYADSFVIRGDEVRQIAPGQTGKIADYNYKLPDDFTGCVIAWNSNNLDSKVGGNYNYLYRLFRKSNLKPFERDISTEIYQAGSTPCNGVEGFNCYFPLQSYGFQPTNGVGYQPYRVVVLSFELLHAPATVCGPKKSTNLVKNKCVNFNFNGLTGTGVLTESNKKFLPFQQFGRDIADTTDAVRDPQTLEILDITPCSFGGVSVITPGTNTSNQVAVLYQDVNCTEVPVAIHADQLTPTWRVYSTGSNVFQTRAGCLIGAEHVNNSYECDIPIGAGICASYQTQTNSPRRARSVASQSIIAYTMSLGAENSVAYSNNSCAIPTNFTISVTTEILPVSMTKTSVDCTMYICGDSTECSNLLLQYGSFCTQLNRALTGIAVEQDKNTQEVFAQVKQIYKTPPIKDFGGFNFSQILPDPSKPSKRSFIEDLLFNKVTLADAGFIKQYGDCLGDIAARDLICAQKFNGLTVLPPLLTDEMIAQYTSALLAGTITSGWTFGAGAALQIPFAMQMAYRFNGIGVTQNVLYENQKLIANQFNSAIGKIQDSLSSTASALGKLQDVVNQNAQALNTLVKQLSSNFGAISSVLNDILSRLDKVEAEVQIDRLITGRLQSLQTYVTQQLIRAAEIRASANLAATKMSECVLGQSKRVDFCGKGYHLMSFPQSAPHGVVFLHVTYVPAQEKNFTCAPAICHDGKAHFPREGVFVSNGTHWFVTQRNFYEPQIITTDNTFLSGNCDVVIGIVNNTVYDPLQPELDSFKEELDKYFKNHTSPDVDLGDISGINASVVNIQKEIDRLNEVAKNLNESLIDLQELGKYEQYIKGGGGSDIIKLLNEQVNKEMQSSNLYMSMSSWCYTHSLDGAGLFLFDHAAEEYEHAKKLIIFLNENNVPVQLTSISAPEHKFEGLTQIFQKAYEHEQHISESINNIVDHAIKSKDHATFNFLQWYVAEQHEEEVLFKDILDKIELIGNENHGLYLADQYVKGIAKSRKS
